United States Patent Application Publication US 2023/0087228 A1 - sequence listing, part 14

SEQ ID NO: 1094 - DNA, 103267 bp, Artificial Sequence
  Synthetic Oligonucleotide
  misc_feature (1)..(95309): n is a, c, g, or t
nnnnnnnnnnnnnnnnnnnnnnnnnnnnnnnnnnnnnnnnnnnnnnnnnnnnnnnnnnnnnnnnnnnnnnnnnnnnnnnnnnnnnnnnnnnnnnnnnnnnnnnnnnnnnnnnnnnnnnnnnnnnnnnnnnnnnnnnnnnnnnnnnnnnnnnnnnnnnnnnnnnnnnnnnnnnnnnnnnnnnnnnnnnnnnnnnnnnnnnnnnnnnnnnnnnnnnnnnnnnnnnnnnnnnnnnnnnnnnnnnnnnnnnnnnnnnnnnnnnnnnnnnnnnnnnnnnnnnnnnnnnnnnnnnnnnnnnnnnnnnnnnnnnnnnnnnnnnnnnnnnnnnnnnnnnnnnnnnnnnnnnnnnnnnnnnnnnnnnnnnnnnnnnnnnnnnnnnnnnnnnnnnnnnnnnnnnnnnnnnnnnnnnnnnnnnnnnnnnnnnnnnnnnnnnnnnnnnnnnnnnnnnnnnnnnnnnnnnnnnnnnnnnnnnnnnnnnnnnnnnnnnnnnnnnnnnnnnnnnnnnnnnnnnnnnnnnnnnnnnnnnnnnnnnnnnnnnnnnnnnnnnnnnnnnnnnnnnnnnnnnnnnnnnnnnnnnnnnnnnnnnnnnnnnnnnnnnnnnnnnnnnnnnnnnnnnnnnnnnnnnnnnnnnnnnnnnnnnnnnnnnnnnnnnnnnnnnnnnnnnnnnnnnnnnnnnnnnnnnnnnnnnnnnnnnnnnnnnnnnnnnnnnnnnnnnnnnnnnnnnnnnnnnnnnnnnnnnnnnnnnnnnnnnnnnnnnnnnnnnnnnnnnnnnnnnnnnnnnnnnnnnnnnnnnnnnnnnnnnnnnnnnnnnnnnnnnnnnnnnnnnnnnnnnnnnnnnnnnnnnnnnnnnnnnnnnnnnnnnnnnnnnnnnnnnnnnnnnnnnnnnnnnnnnnnnnnnnnnnnnnnnnnnnnnnnnnnnnnnnnnnnnnnnnnnnnnnnnnnnnnnnnnnnnnnnnnnnnnnnnnnnnnnnnnnnnnnnnnnnnnnnnnnnnnnnnnnnnnnnnnnnnnnnnnnnnnnnnnnnnnnnnnnnnnnnnnnnnnnnnnnnnnnnnnnnnnnnnnnnnnnnnnnnnnnnnnnnnnnnnnnnnnnnnnnnnnnnnnnnnnnnnnnnnnnnnnnnnnnnnnnnnnnnnnnnnnnnnnnnnnnnnnnnnnnnnnnnnnnnnnnnnnnnnnnnnnnnnnnnnnnnnnnnnnnnnnnnnnnnnnnnnnnnnnnnnnnnnnnnnnnnnnnnnnnnnnnnnnnnnnnnnnnnnnnnnnnnnnnnnnnnnnnnnnnnnnnnnnnnnnnnnnnnnnnnnnnnnnnnnnnnnnnnnnnnnnnnnnnnnnnnnnnnnnnnnnnnnnnnnnnnnnnnnnnnnnnnnnnnnnnnnnnnnnnnnnnnnnnnnnnnnnnnnnnnnnnnnnnnnnnnnnnnnnnnnnnnnnnnnnnnnnnnnnnnnnnnnnnnnnnnnnnnnnnnnnnnnnnnnnnnnnnnnnnnnnnnnnnnnnnnnnnnnnnnnnnnnnnnnnnnnnnnnnnnnnnnnnnnnnnnnnnnnnnnnnnnnnnnnnnnnnnnnnnnnnnnnnnnnnnnnnnnnnnnnnnnnnnnnnnnnnnnnnnnnnnnnnnnnnnnnnnnnnnnnnnnnnnnnnnnnnnnnnnnnnnnnnnnnnnnnnnnnnnnnnnnnnnnnnnnnnnnnnnnnnnnnnnnnnnnnnnnnnnnnnnnnnnnnnnnnnnnnnnnnnnnnnnnnnnnnnnnnnnnnnnnnnnnnnnnnnnnnnnnnnnnnnnnnnnnnnnnnnnnnnnnnnnnnnnnnnnnnnnnnnnnnnnnnnnnnnnnnnnnnnnnnnnnnnnnnnnnnnnnnnnnnnnnnnnnnnnnnnnnnnnnnnnnnnnnnnnnnnnnnnnnnnnnnnnnnnnnnnnnnnnnnnnnnnnnnnnnnnnnnnnnnnnnnnnnnnnnnnnnnnnnnnnnnnnnnnnnnnnnnnnnnnnnnnnnnnnnnnnnnnnnnnnnnnnnnnnnnnnnnnnnnnnnnnnnnnnnnnnnnnnnnnnnnnnnnnnnnnnnnnnnnnnnnnnnnnnnnnnnnnnnnnnnnnnnnnnnnnnnnnnnnnnnnnnnnnnnnnnnnnnnnnnnnnnnnnnnnnnnnnnnnnnnnnnnnnnnnnnnnnnnnnnnnnnnnnnnnnnnnnnnnnnnnnnnnnnnnnnnnnnnnnnnnnnnnnnnnnnnnnnnnnnnnnnnnnnnnnnnnnnnnnnnnnnnnnnnnnnnnnnnnnnnnnnnnnnnnnnnnnnnnnnnnnnnnnnnnnnnnnnnnnnnnnnnnnnnnnnnnnnnnnnnnnnnnnnnnnnnnnnnnnnnnnnnnnnnnnnnnnnnnnnnnnnnnnnnnnnnnnnnnnnnnnnnnnnnnnnnnnnnnnnnnnnnnnnnnnnnnnnnnnnnnnnnnnnnnnnnnnnnnnnnnnnnnnnnnnnnnnnnnnnnnnnnnnnnnnnnnnnnnnnnnnnnnnnnnnnnnnnnnnnnnnnnnnnnnnnnnnnnnnnnnnnnnnnnnnnnnnnnnnnnnnnnnnnnnnnnnnnnnnnnnnnnnnnnnnnnnnnnnnnnnnnnnnnnnnnnnnnnnnnnnnnnnnnnnnnnnnnnnnnnnnnnnnnnnnnnnnnnnnnnnnnnnnnnnnnnnnnnnnnnnnnnnnnnnnnnnnnnnnnnnnnnnnnnnnnnnnnnnnnnnnnnnnnnnnnnnnnnnnnnnnnnnnnnnnnnnnnnnnnnnnnnnnnnnnnnnnnnnnnnnnnnnnnnnnnnnnnnnnnnnnnnnnnnnnnnnnnnnnnnnnnnnnnnnnnnnnnnnnnnnnnnnnnnnnnnnnnnnnnnnnnnnnnnnnnnnnnnnnnnnnnnnnnnnnnnnnnnnnnnnnnnnnnnnnnnnnnnnnnnnnnnnnnnnnnnnnnnnnnnnnnnnnnnnnnnnnnnnnnnnnnnnnnnnnnnnnnnnnnnnnnnnnnnnnnnnnnnnnnnnnnnnnnnnnnnnnnnnnnnnnnnnnnnnnnnnnnnnnnnnnnnnnnnnnnnnnnnnnnnnnnnnnnnnnnnnnnnnnnnnnnnnnnnnnnnnnnnnnnnnnnnnnnnnnnnnnnnnnnnnnnnnnnnnnnnnnnnnnnnnnnnnnnnnnnnnnnnnnnnnnnnnnnnnnnnnnnnnnnnnnnnnnnnnnnnnnnnnnnnnnnnnnnnnnnnnnnnnnnnnnnnnnnnnnnnnnnnnnnnnnnnnnnnnnnnnnnnnnnnnnnnnnnnnnnnnnnnnnnnnnnnnnnnnnnnnnnnnnnnnnnnnnnnnnnnnnnnnnnnnnnnnnnnnnnnnnnnnnnnnnnnnnnnnnnnnnnnnnnnnnnnnnnnnnnnnnnnnnnnnnnnnnnnnnnnnnnnnnnnnnnnnnnnnnnnnnnnnnnnnnnnnnnnnnnnnnnnnnnnnnnnnnnnnnnnnnnnnnnnnnnnnnnnnnnnnnnnnnnnnnnnnnnnnnnnnnnnnnnnnnnnnnnnnnnnnnnnnnnnnnnnnnnnnnnnnnnnnnnnnnnnnnnnnnnnnnnnnnnnnnnnnnnnnnnnnnnnnnnnnnnnnnnnnnnnnnnnnnnnnnnnnnnnnnnnnnnnnnnnnnnnnnnnnnnnnnnnnnnnnnnnnnnnnnnnnnnnnnnnnnnnnnnnnnnnnnnnnnnnnnnnnnnnnnnnnnnnnnnnnnnnnnnnnnnnnnnnnnnnnnnnnnnnnnnnnnnnnnnnnnnnnnnnnnnnnnnnnnnnnnnnnnnnnnnnnnnnnnnnnnnnnnnnnnnnnnnnnnnnnnnnnnnnnnnnnnnnnnnnnnnnnnnnnnnnnnnnnnnnnnnnnnnnnnnnnnnnnnnnnnnnnnnnnnnnnnnnnnnnnnnnnnnnnnnnnnnnnnnnnnnnnnnnnnnnnnnnnnnnnnnnnnnnnnnnnnnnnnnnnnnnnnnnnnnnnnnnnnnnnnnnnnnnnnnnnnnnnnnnnnnnnnnnnnnnnnnnnnnnnnnnnnnnnnnnnnnnnnnnnnnnnnnnnnnnnnnnnnnnnnnnnnnnnnnnnnnnnnnnnnnnnnnnnnnnnnnnnnnnnnnnnnnnnnnnnnnnnnnnnnnnnnnnnnnnnnnnnnnnnnnnnnnnnnnnnnnnnnnnnnnnnnnnnnnnnnnnnnnnnnnnnnnnnnnnnnnnnnnnnnnnnnnnnnnnnnnnnnnnnnnnnnnnnnnnnnnnnnnnnnnnnnnnnnnnnnnnnnnnnnnnnnnnnnnnnnnnnnnnnnnnnnnnnnnnnnnnnnnnnnnnnnnnnnnnnnnnnnnnnnnnnnnnnnnnnnnnnnnnnnnnnnnnnnnnnnnnnnnnnnnnnnnnnnnnnnnnnnnnnnnnnnnnnnnnnnnnnnnnnnnnnnnnnnnnnnnnnnnnnnnnnnnnnnnnnnnnnnnnnnnnnnnnnnnnnnnnnnnnnnnnnnnnnnnnnnnnnnnnnnnnnnnnnnnnnnnnnnnnnnnnnnnnnnnnnnnnnnnnnnnnnnnnnnnnnnnnnnnnnnnnnnnnnnnnnnnnnnnnnnnnnnnnnnnnnnnnnnnnnnnnnnnnnnnnnnnnnnnnnnnnnnnnnnnnnnnnnnnnnnnnnnnnnnnnnnnnnnnnnnnnnnnnnnnnnnnnnnnnnnnnnnnnnnnnnnnnnnnnnnnnnnnnnnnnnnnnnnnnnnnnnnnnnnnnnnnnnnnnnnnnnnnnnnnnnnnnnnnnnnnnnnnnnnnnnnnnnnnnnnnnnnnnnnnnnnnnnnnnnnnnnnnnnnnnnnnnnnnnnnnnnnnnnnnnnnnnnnnnnnnnnnnnnnnnnnnnnnnnnnnnnnnnnnnnnnnnnnnnnnnnnnnnnnnnnnnnnnnnnnnnnnnnnnnnnnnnnnnnnnnnnnnnnnnnnnnnnnnnnnnnnnnnnnnnnnnnnnnnnnnnnnnnnnnnnnnnnnnnnnnnnnnnnnnnnnnnnnnnnnnnnnnnnnnnnnnnnnnnnnnnnnnnnnnnnnnnnnnnnnnnnnnnnnnnnnnnnnnnnnnnnnnnnnnnnnnnnnnnnnnnnnnnnnnnnnnnnnnnnnnnnnnnnnnnnnnnnnnnnnnnnnnnnnnnnnnnnnnnnnnnnnnnnnnnnnnnnnnnnnnnnnnnnnnnnnnnnnnnnnnnnnnnnnnnnnnnnnnnnnnnnnnnnnnnnnnnnnnnnnnnnnnnnnnnnnnnnnnnnnnnnnnnnnnnnnnnnnnnnnnnnnnnnnnnnnnnnnnnnnnnnnnnnnnnnnnnnnnnnnnnnnnnnnnnnnnnnnnnnnnnnnnnnnnnnnnnnnnnnnnnnnnnnnnnnnnnnnnnnnnnnnnnnnnnnnnnnnnnnnnnnnnnnnnnnnnnnnnnnnnnnnnnnnnnnnnnnnnnnnnnnnnnnnnnnnnnnnnnnnnnnnnnnnnnnnnnnnnnnnnnnnnnnnnnnnnnnnnnnnnnnnnnnnnnnnnnnnnnnnnnnnnnnnnnnnnnnnnnnnnnnnnnnnnnnnnnnnnnnnnnnnnnnnnnnnnnnnnnnnnnnnnnnnnnnnnnnnnnnnnnnnnnnnnnnnnnnnnnnnnnnnnnnnnnnnnnnnnnnnnnnnnnnnnnnnnnnnnnnnnnnnnnnnnnnnnnnnnnnnnnnnnnnnnnnnnnnnnnnnnnnnnnnnnnnnnnnnnnnnnnnnnnnnnnnnnnnnnnnnnnnnnnnnnnnnnnnnnnnnnnnnnnnnnnnnnnnnnnnnnnnnnnnnnnnnnnnnnnnnnnnnnnnnnnnnnnnnnnnnnnnnnnnnnnnnnnnnnnnnnnnnnnnnnnnnnnnnnnnnnnnnnnnnnnnnnnnnnnnnnnnnnnnnnnnnnnnnnnnnnnnnnnnnnnnnnnnnnnnnnnnnnnnnnnnnnnnnnnnnnnnnnnnnnnnnnnnnnnnnnnnnnnnnnnnnnnnnnnnnnnnnnnnnnnnnnnnnnnnnnnnnnnnnnnnnnnnnnnnnnnnnnnnnnnnnnnnnnnnnnnnnnnnnnnnnnnnnnnnnnnnnnnnnnnnnnnnnnnnnnnnnnnnnnnnnnnnnnnnnnnnnnnnnnnnnnnnnnnnnnnnnnnnnnnnnnnnnnnnnnnnnnnnnnnnnnnnnnnnnnnnnnnnnnnnnnnnnnnnnnnnnnnnnnnnnnnnnnnnnnnnnnnnnnnnnnnnnnnnnnnnnnnnnnnnnnnnnnnnnnnnnnnnnnnnnnnnnnnnnnnnnnnnnnnnnnnnnnnnnnnnnnnnnnnnnnnnnnnnnnnnnnnnnnnnnnnnnnnnnnnnnnnnnnnnnnnnnnnnnnnnnnnnnnnnnnnnnnnnnnnnnnnnnnnnnnnnnnnnnnnnnnnnnnnnnnnnnnnnnnnnnnnnnnnnnnnnnnnnnnnnnnnnnnnnnnnnnnnnnnnnnnnnnnnnnnnnnnnnnnnnnnnnnnnnnnnnnnnnnnnnnnnnnnnnnnnnnnnnnnnnnnnnnnnnnnnnnnnnnnnnnnnnnnnnnnnnnnnnnnnnnnnnnnnnnnnnnnnnnnnnnnnnnnnnnnnnnnnnnnnnnnnnnnnnnnnnnnnnnnnnnnnnnnnnnnnnnnnnnnnnnnnnnnnnnnnnnnnnnnnnnnnnnnnnnnnnnnnnnnnnnnnnnnnnnnnnnnnnnnnnnnnnnnnnnnnnnnnnnnnnnnnnnnnnnnnnnnnnnnnnnnnnnnnnnnnnnnnnnnnnnnnnnnnnnnnnnnnnnnnnnnnnnnnnnnnnnnnnnnnnnnnnnnnnnnnnnnnnnnnnnnnnnnnnnnnnnnnnnnnnnnnnnnnnnnnnnnnnnnnnnnnnnnnnnnnnnnnnnnnnnnnnnnnnnnnnnnnnnnnnnnnnnnnnnnnnnnnnnnnnnnnnnnnnnnnnnnnnnnnnnnnnnnnnnnnnnnnnnnnnnnnnnnnnnnnnnnnnnnnnnnnnnnnnnnnnnnnnnnnnnnnnnnnnnnnnnnnnnnnnnnnnnnnnnnnnnnnnnnnnnnnnnnnnnnnnnnnnnnnnnnnnnnnnnnnnnnnnnnnnnnnnnnnnnnnnnnnnnnnnnnnnnnnnnnnnnnnnnnnnnnnnnnnnnnnnnnnnnnnnnnnnnnnnnnnnnnnnnnnnnnnnnnnnnnnnnnnnnnnnnnnnnnnnnnnnnnnnnnnnnnnnnnnnnnnnnnnnnnnnnnnnnnnnnnnnnnnnnnnnnnnnnnnnnnnnnnnnnnnnnnnnnnnnnnnnnnnnnnnnnnnnnnnnnnnnnnnnnnnnnnnnnnnnnnnnnnnnnnnnnnnnnnnnnnnnnnnnnnnnnnnnnnnnnnnnnnnnnnnnnnnnnnnnnnnnnnnnnnnnnnnnnnnnnnnnnnnnnnnnnnnnnnnnnnnnnnnnnnnnnnnnnnnnnnnnnnnnnnnnnnnnnnnnnnnnnnnnnnnnnnnnnnnnnnnnnnnnnnnnnnnnnnnnnnnnnnnnnnnnnnnnnnnnnnnnnnnnnnnnnnnnnnnnnnnnnnnnnnnnnnnnnnnnnnnnnnnnnnnnnnnnnnnnnnnnnnnnnnnnnnnnnnnnnnnnnnnnnnnnnnnnnnnnnnnnnnnnnnnnnnnnnnnnnnnnnnnnnnnnnnnnnnnnnnnnnnnnnnnnnnnnnnnnnnnnnnnnnnnnnnnnnnnnnnnnnnnnnnnnnnnnnnnnnnnnnnnnnnnnnnnnnnnnnnnnnnnnnnnnnnnnnnnnnnnnnnnnnnnnnnnnnnnnnnnnnnnnnnnnnnnnnnnnnnnnnnnnnnnnnnnnnnnnnnnnnnnnnnnnnnnnnnnnnnnnnnnnnnnnnnnnnnnnnnnnnnnnnnnnnnnnnnnnnnnnnnnnnnnnnnnnnnnnnnnnnnnnnnnnnnnnnnnnnnnnnnnnnnnnnnnnnnnnnnnnnnnnnnnnnnnnnnnnnnnnnnnnnnnnnnnnnnnnnnnnnnnnnnnnnnnnnnnnnnnnnnnnnnnnnnnnnnnnnnnnnnnnnnnnnnnnnnnnnnnnnnnnnnnnnnnnnnnnnnnnnnnnnnnnnnnnnnnnnnnnnnnnnnnnnnnnnnnnnnnnnnnnnnnnnnnnnnnnnnnnnnnnnnnnnnnnnnnnnnnnnnnnnnnnnnnnnnnnnnnnnnnnnnnnnnnnnnnnnnnnnnnnnnnnnnnnnnnnnnnnnnnnnnnnnnnnnnnnnnnnnnnnnnnnnnnnnnnnnnnnnnnnnnnnnnnnnnnnnnnnnnnnnnnnnnnnnnnnnnnnnnnnnnnnnnnnnnnnnnnnnnnnnnnnnnnnnnnnnnnnnnnnnnnnnnnnnnnnnnnnnnnnnnnnnnnnnnnnnnnnnnnnnnnnnnnnnnnnnnnnnnnnnnnnnnnnnnnnnnnnnnnnnnnnnnnnnnnnnnnnnnnnnnnnnnnnnnnnnnnnnnnnnnnnnnnnnnnnnnnnnnnnnnnnnnnnnnnnnnnnnnnnnnnnnnnnnnnnnnnnnnnnnnnnnnnnnnnnnnnnnnnnnnnnnnnnnnnnnnnnnnnnnnnnnnnnnnnnnnnnnnnnnnnnnnnnnnnnnnnnnnnnnnnnnnnnnnnnnnnnnnnnnnnnnnnnnnnnnnnnnnnnnnnnnnnnnnnnnnnnnnnnnnnnnnnnnnnnnnnnnnnnnnnnnnnnnnnnnnnnnnnnnnnnnnnnnnnnnnnnnnnnnnnnnnnnnnnnnnnnnnnnnnnnnnnnnnnnnnnnnnnnnnnnnnnnnnnnnnnnnnnnnnnnnnnnnnnnnnnnnnnnnnnnnnnnnnnnnnnnnnnnnnnnnnnnnnnnnnnnnnnnnnnnnnnnnnnnnnnnnnnnnnnnnnnnnnnnnnnnnnnnnnnnnnnnnnnnnnnnnnnnnnnnnnnnnnnnnnnnnnnnnnnnnnnnnnnnnnnnnnnnnnnnnnnnnnnnnnnnnnnnnnnnnnnnnnnnnnnnnnnnnnnnnnnnnnnnnnnnnnnnnnnnnnnnnnnnnnnnnnnnnnnnnnnnnnnnnnnnnnnnnnnnnnnnnnnnnnnnnnnnnnnnnnnnnnnnnnnnnnnnnnnnnnnnnnnnnnnnnnnnnnnnnnnnnnnnnnnnnnnnnnnnnnnnnnnnnnnnnnnnnnnnnnnnnnnnnnnnnnnnnnnnnnnnnnnnnnnnnnnnnnnnnnnnnnnnnnnnnnnnnnnnnnnnnnnnnnnnnnnnnnnnnnnnnnnnnnnnnnnnnnnnnnnnnnnnnnnnnnnnnnnnnnnnnnnnnnnnnnnnnnnnnnnnnnnnnnnnnnnnnnnnnnnnnnnnnnnnnnnnnnnnnnnnnnnnnnnnnnnnnnnnnnnnnnnnnnnnnnnnnnnnnnnnnnnnnnnnnnnnnnnnnnnnnnnnnnnnnnnnnnnnnnnnnnnnnnnnnnnnnnnnnnnnnnnnnnnnnnnnnnnnnnnnnnnnnnnnnnnnnnnnnnnnnnnnnnnnnnnnnnnnnnnnnnnnnnnnnnnnnnnnnnnnnnnnnnnnnnnnnnnnnnnnnnnnnnnnnnnnnnnnnnnnnnnnnnnnnnnnnnnnnnnnnnnnnnnnnnnnnnnnnnnnnnnnnnnnnnnnnnnnnnnnnnnnnnnnnnnnnnnnnnnnnnnnnnnnnnnnnnnnnnnnnnnnnnnnnnnnnnnnnnnnnnnnnnnnnnnnnnnnnnnnnnnnnnnnnnnnnnnnnnnnnnnnnnnnnnnnnnnnnnnnnnnnnnnnnnnnnnnnnnnnnnnnnnnnnnnnnnnnnnnnnnnnnnnnnnnnnnnnnnnnnnnnnnnnnnnnnnnnnnnnnnnnnnnnnnnnnnnnnnnnnnnnnnnnnnnnnnnnnnnnnnnnnnnnnnnnnnnnnnnnnnnnnnnnnnnnnnnnnnnnnnnnnnnnnnnnnnnnnnnnnnnnnnnnnnnnnnnnnnnnnnnnnnnnnnnnnnnnnnnnnnnnnnnnnnnnnnnnnnnnnnnnnnnnnnnnnnnnnnnnnnnnnnnnnnnnnnnnnnnnnnnnnnnnnnnnnnnnnnnnnnnnnnnnnnnnnnnnnnnnnnnnnnnnnnnnnnnnnnnnnnnnnnnnnnnnnnnnnnnnnnnnnnnnnnnnnnnnnnnnnnnnnnnnnnnnnnnnnnnnnnnnnnnnnnnnnnnnnnnnnnnnnnnnnnnnnnnnnnnnnnnnnnnnnnnnnnnnnnnnnnnnnnnnnnnnnnnnnnnnnnnnnnnnnnnnnnnnnnnnnnnnnnnnnnnnnnnnnnnnnnnnnnnnnnnnnnnnnnnnnnnnnnnnnnnnnnnnnnnnnnnnnnnnnnnnnnnnnnnnnnnnnnnnnnnnnnnnnnnnnnnnnnnnnnnnnnnnnnnnnnnnnnnnnnnnnnnnnnnnnnnnnnnnnnnnnnnnnnnnnnnnnnnnnnnnnnnnnnnnnnnnnnnnnnnnnnnnnnnnnnnnnnnnnnnnnnnnnnnnnnnnnnnnnnnnnnnnnnnnnnnnnnnnnnnnnnnnnnnnnnnnnnnnnnnnnnnnnnnnnnnnnnnnnnnnnnnnnnnnnnnnnnnnnnnnnnnnnnnnnnnnnnnnnnnnnnnnnnnnnnnnnnnnnnnnnnnnnnnnnnnnnnnnnnnnnnnnnnnnnnnnnnnnnnnnnnnnnnnnnnnnnnnnnnnnnnnnnnnnnnnnnnnnnnnnnnnnnnnnnnnnnnnnnnnnnnnnnnnnnnnnnnnnnnnnnnnnnnnnnnnnnnnnnnnnnnnnnnnnnnnnnnnnnnnnnnnnnnnnnnnnnnnnnnnnnnnnnnnnnnnnnnnnnnnnnnnnnnnnnnnnnnnnnnnnnnnnnnnnnnnnnnnnnnnnnnnnnnnnnnnnnnnnnnnnnnnnnnnnnnnnnnnnnnnnnnnnnnnnnnnnnnnnnnnnnnnnnnnnnnnnnnnnnnnnnnnnnnnnnnnnnnnnnnnnnnnnnnnnnnnnnnnnnnnnnnnnnnnnnnnnnnnnnnnnnnnnnnnnnnnnnnnnnnnnnnnnnnnnnnnnnnnnnnnnnnnnnnnnnnnnnnnnnnnnnnnnnnnnnnnnnnnnnnnnnnnnnnnnnnnnnnnnnnnnnnnnnnnnnnnnnnnnnnnnnnnnnnnnnnnnnnnnnnnnnnnnnnnnnnnnnnnnnnnnnnnnnnnnnnnnnnnnnnnnnnnnnnnnnnnnnnnnnnnnnnnnnnnnnnnnnnnnnnnnnnnnnnnnnnnnnnnnnnnnnnnnnnnnnnnnnnnnnnnnnnnnnnnnnnnnnnnnnnnnnnnnnnnnnnnnnnnnnnnnnnnnnnnnnnnnnnnnnnnnnnnnnnnnnnnnnnnnnnnnnnnnnnnnnnnnnnnnnnnnnnnnnnnnnnnnnnnnnnnnnnnnnnnnnnnnnnnnnnnnnnnnnnnnnnnnnnnnnnnnnnnnnnnnnnnnnnnnnnnnnnnnnnnnnnnnnnnnnnnnnnnnnnnnnnnnnnnnnnnnnnnnnnnnnnnnnnnnnnnnnnnnnnnnnnnnnnnnnnnnnnnnnnnnnnnnnnnnnnnnnnnnnnnnnnnnnnnnnnnnnnnnnnnnnnnnnnnnnnnnnnnnnnnnnnnnnnnnnnnnnnnnnnnnnnnnnnnnnnnnnnnnnnnnnnnnnnnnnnnnnnnnnnnnnnnnnnnnnnnnnnnnnnnnnnnnnnnnnnnnnnnnnnnnnnnnnnnnnnnnnnnnnnnnnnnnnnnnnnnnnnnnnnnnnnnnnnnnnnnnnnnnnnnnnnnnnnnnnnnnnnnnnnnnnnnnnnnnnnnnnnnnnnnnnnnnnnnnnnnnnnnnnnnnnnnnnnnnnnnnnnnnnnnnnnnnnnnnnnnnnnnnnnnnnnnnnnnnnnnnnnnnnnnnnnnnnnnnnnnnnnnnnnnnnnnnnnnnnnnnnnnnnnnnnnnnnnnnnnnnnnnnnnnnnnnnnnnnnnnnnnnnnnnnnnnnnnnnnnnnnnnnnnnnnnnnnnnnnnnnnnnnnnnnnnnnnnnnnnnnnnnnnnnnnnnnnnnnnnnnnnnnnnnnnnnnnnnnnnnnnnnnnnnnnnnnnnnnnnnnnnnnnnnnnnnnnnnnnnnnnnnnnnnnnnnnnnnnnnnnnnnnnnnnnnnnnnnnnnnnnnnnnnnnnnnnnnnnnnnnnnnnnnnnnnnnnnnnnnnnnnnnnnnnnnnnnnnnnnnnnnnnnnnnnnnnnnnnnnnnnnnnnnnnnnnnnnnnnnnnnnnnnnnnnnnnnnnnnnnnnnnnnnnnnnnnnnnnnnnnnnnnnnnnnnnnnnnnnnnnnnnnnnnnnnnnnnnnnnnnnnnnnnnnnnnnnnnnnnnnnnnnnnnnnnnnnnnnnnnnnnnnnnnnnnnnnnnnnnnnnnnnnnnnnnnnnnnnnnnnnnnnnnnnnnnnnnnnnnnnnnnnnnnnnnnnnnnnnnnnnnnnnnnnnnnnnnnnnnnnnnnnnnnnnnnnnnnnnnnnnnnnnnnnnnnnnnnnnnnnnnnnnnnnnnnnnnnnnnnnnnnnnnnnnnnnnnnnnnnnnnnnnnnnnnnnnnnnnnnnnnnnnnnnnnnnnnnnnnnnnnnnnnnnnnnnnnnnnnnnnnnnnnnnnnnnnnnnnnnnnnnnnnnnnnnnnnnnnnnnnnnnnnnnnnnnnnnnnnnnnnnnnnnnnnnnnnnnnnnnnnnnnnnnnnnnnnnnnnnnnnnnnnnnnnnnnnnnnnnnnnnnnnnnnnnnnnnnnnnnnnnnnnnnnnnnnnnnnnnnnnnnnnnnnnnnnnnnnnnnnnnnnnnnnnnnnnnnnnnnnnnnnnnnnnnnnnnnnnnnnnnnnnnnnnnnnnnnnnnnnnnnnnnnnnnnnnnnnnnnnnnnnnnnnnnnnnnnnnnnnnnnnnnnnnnnnnnnnnnnnnnnnnnnnnnnnnnnnnnnnnnnnnnnnnnnnnnnnnnnnnnnnnnnnnnnnnnnnnnnnnnnnnnnnnnnnnnnnnnnnnnnnnnnnnnnnnnnnnnnnnnnnnnnnnnnnnnnnnnnnnnnnnnnnnnnnnnnnnnnnnnnnnnnnnnnnnnnnnnnnnnnnnnnnnnnnnnnnnnnnnnnnnnnnnnnnnnnnnnnnnnnnnnnnnnnnnnnnnnnnnnnnnnnnnnnnnnnnnnnnnnnnnnnnnnnnnnnnnnnnnnnnnnnnnnnnnnnnnnnnnnnnnnnnnnnnnnnnnnnnnnnnnnnnnnnnnnnnnnnnnnnnnnnnnnnnnnnnnnnnnnnnnnnnnnnnnnnnnnnnnnnnnnnnnnnnnnnnnnnnnnnnnnnnnnnnnnnnnnnnnnnnnnnnnnnnnnnnnnnnnnnnnnnnnnnnnnnnnnnnnnnnnnnnnnnnnnnnnnnnnnnnnnnnnnnnnnnnnnnnnnnnnnnnnnnnnnnnnnnnnnnnnnnnnnnnnnnnnnnnnnnnnnnnnnnnnnnnnnnnnnnnnnnnnnnnnnnnnnnnnnnnnnnnnnnnnnnnnnnnnnnnnnnnnnnnnnnnnnnnnnnnnnnnnnnnnnnnnnnnnnnnnnnnnnnnnnnnnnnnnnnnnnnnnnnnnnnnnnnnnnnnnnnnnnnnnnnnnnnnnnnnnnnnnnnnnnnnnnnnnnnnnnnnnnnnnnnnnnnnnnnnnnnnnnnnnnnnnnnnnnnnnnnnnnnnnnnnnnnnnnnnnnnnnnnnnnnnnnnnnnnnnnnnnnnnnnnnnnnnnnnnnnnnnnnnnnnnnnnnnnnnnnnnnnnnnnnnnnnnnnnnnnnnnnnnnnnnnnnnnnnnnnnnnnnnnnnnnnnnnnnnnnnnnnnnnnnnnnnnnnnnnnnnnnnnnnnnnnnnnnnnnnnnnnnnnnnnnnnnnnnnnnnnnnnnnnnnnnnnnnnnnnnnnnnnnnnnnnnnnnnnnnnnnnnnnnnnnnnnnnnnnnnnnnnnnnnnnnnnnnnnnnnnnnnnnnnnnnnnnnnnnnnnnnnnnnnnnnnnnnnnnnnnnnnnnnnnnnnnnnnnnnnnnnnnnnnnnnnnnnnnnnnnnnnnnnnnnnnnnnnnnnnnnnnnnnnnnnnnnnnnnnnnnnnnnnnnnnnnnnnnnnnnnnnnnnnnnnnnnnnnnnnnnnnnnnnnnnnnnnnnnnnnnnnnnnnnnnnnnnnnnnnnnnnnnnnnnnnnnnnnnnnnnnnnnnnnnnnnnnnnnnnnnnnnnnnnnnnnnnnnnnnnnnnnnnnnnnnnnnnnnnnnnnnnnnnnnnnnnnnnnnnnnnnnnnnnnnnnnnnnnnnnnnnnnnnnnnnnnnnnnnnnnnnnnnnnnnnnnnnnnnnnnnnnnnnnnnnnnnnnnnnnnnnnnnnnnnnnnnnnnnnnnnnnnnnnnnnnnnnnnnnnnnnnnnnnnnnnnnnnnnnnnnnnnnnnnnnnnnnnnnnnnnnnnnnnnnnnnnnnnnnnnnnnnnnnnnnnnnnnnnnnnnnnnnnnnnnnnnnnnnnnnnnnnnnnnnnnnnnnnnnnnnnnnnnnnnnnnnnnnnnnnnnnnnnnnnnnnnnnnnnnnnnnnnnnnnnnnnnnnnnnnnnnnnnnnnnnnnnnnnnnnnnnnnnnnnnnnnnnnnnnnnnnnnnnnnnnnnnnnnnnnnnnnnnnnnnnnnnnnnnnnnnnnnnnnnnnnnnnnnnnnnnnnnnnnnnnnnnnnnnnnnnnnnnnnnnnnnnnnnnnnnnnnnnnnnnnnnnnnnnnnnnnnnnnnnnnnnnnnnnnnnnnnnnnnnnnnnnnnnnnnnnnnnnnnnnnnnnnnnnnnnnnnnnnnnnnnnnnnnnnnnnnnnnnnnnnnnnnnnnnnnnnnnnnnnnnnnnnnnnnnnnnnnnnnnnnnnnnnnnnnnnnnnnnnnnnnnnnnnnnnnnnnnnnnnnnnnnnnnnnnnnnnnnnnnnnnnnnnnnnnnnnnnnnnnnnnnnnnnnnnnnnnnnnnnnnnnnnnnnnnnnnnnnnnnnnnnnnnnnnnnnnnnnnnnnnnnnnnnnnnnnnnnnnnnnnnnnnnnnnnnnnnnnnnnnnnnnnnnnnnnnnnnnnnnnnnnnnnnnnnnnnnnnnnnnnnnnnnnnnnnnnnnnnnnnnnnnnnnnnnnnnnnnnnnnnnnnnnnnnnnnnnnnnnnnnnnnnnnnnnnnnnnnnnnnnnnnnnnnnnnnnnnnnnnnnnnnnnnnnnnnnnnnnnnnnnnnnnnnnnnnnnnnnnnnnnnnnnnnnnnnnnnnnnnnnnnnnnnnnnnnnnnnnnnnnnnnnnnnnnnnnnnnnnnnnnnnnnnnnnnnnnnnnnnnnnnnnnnnnnnnnnnnnnnnnnnnnnnnnnnnnnnnnnnnnnnnnnnnnnnnnnnnnnnnnnnnnnnnnnnnnnnnnnnnnnnnnnnnnnnnnnnnnnnnnnnnnnnnnnnnnnnnnnnnnnnnnnnnnnnnnnnnnnnnnnnnnnnnnnnnnnnnnnnnnnnnnnnnnnnnnnnnnnnnnnnnnnnnnnnnnnnnnnnnnnnnnnnnnnnnnnnnnnnnnnnnnnnnnnnnnnnnnnnnnnnnnnnnnnnnnnnnnnnnnnnnnnnnnnnnnnnnnnnnnnnnnnnnnnnnnnnnnnnnnnnnnnnnnnnnnnnnnnnnnnnnnnnnnnnnnnnnnnnnnnnnnnnnnnnnnnnnnnnnnnnnnnnnnnnnnnnnnnnnnnnnnnnnnnnnnnnnnnnnnnnnnnnnnnnnnnnnnnnnnnnnnnnnnnnnnnnnnnnnnnnnnnnnnnnnnnnnnnnnnnnnnnnnnnnnnnnnnnnnnnnnnnnnnnnnnnnnnnnnnnnnnnnnnnnnnnnnnnnnnnnnnnnnnnnnnnnnnnnnnnnnnnnnnnnnnnnnnnnnnnnnnnnnnnnnnnnnnnnnnnnnnnnnnnnnnnnnnnnnnnnnnnnnnnnnnnnnnnnnnnnnnnnnnnnnnnnnnnnnnnnnnnnnnnnnnnnnnnnnnnnnnnnnnnnnnnnnnnnnnnnnnnnnnnnnnnnnnnnnnnnnnnnnnnnnnnnnnnnnnnnnnnnnnnnnnnnnnnnnnnnnnnnnnnnnnnnnnnnnnnnnnnnnnnnnnnnnnnnnnnnnnnnnnnnnnnnnnnnnnnnnnnnnnnnnnnnnnnnnnnnnnnnnnnnnnnnnnnnnnnnnnnnnnnnnnnnnnnnnnnnnnnnnnnnnnnnnnnnnnnnnnnnnnnnnnnnnnnnnnnnnnnnnnnnnnnnnnnnnnnnnnnnnnnnnnnnnnnnnnnnnnnnnnnnnnnnnnnnnnnnnnnnnnnnnnnnnnnnnnnnnnnnnnnnnnnnnnnnnnnnnnnnnnnnnnnnnnnnnnnnnnnnnnnnnnnnnnnnnnnnnnnnnnnnnnnnnnnnnnnnnnnnnnnnnnnnnnnnnnnnnnnnnnnnnnnnnnnnnnnnnnnnnnnnnnnnnnnnnnnnnnnnnnnnnnnnnnnnnnnnnnnnnnnnnnnnnnnnnnnnnnnnnnnnnnnnnnnnnnnnnnnnnnnnnnnnnnnnnnnnnnnnnnnnnnnnnnnnnnnnnnnnnnnnnnnnnnnnnnnnnnnnnnnnnnnnnnnnnnnnnnnnnnnnnnnnnnnnnnnnnnnnnnnnnnnnnnnnnnnnnnnnnnnnnnnnnnnnnnnnnnnnnnnnnnnnnnnnnnnnnnnnnnnnnnnnnnnnnnnnnnnnnnnnnnnnnnnnnnnnnnnnnnnnnnnnnnnnnnnnnnnnnnnnnnnnnnnnnnnnnnnnnnnnnnnnnnnnnnnnnnnnnnnnnnnnnnnnnnnnnnnnnnnnnnnnnnnnnnnnnnnnnnnnnnnnnnnnnnnnnnnnnnnnnnnnnnnnnnnnnnnnnnnnnnnnnnnnnnnnnnnnnnnnnnnnnnnnnnnnnnnnnnnnnnnnnnnnnnnnnnnnnnnnnnnnnnnnnnnnnnnnnnnnnnnnnnnnnnnnnnnnnnnnnnnnnnnnnnnnnnnnnnnnnnnnnnnnnnnnnnnnnnnnnnnnnnnnnnnnnnnnnnnnnnnnnnnnnnnnnnnnnnnnnnnnnnnnnnnnnnnnnnnnnnnnnnnnnnnnnnnnnnnnnnnnnnnnnnnnnnnnnnnnnnnnnnnnnnnnnnnnnnnnnnnnnnnnnnnnnnnnnnnnnnnnnnnnnnnnnnnnnnnnnnnnnnnnnnnnnnnnnnnnnnnnnnnnnnnnnnnnnnnnnnnnnnnnnnnnnnnnnnnnnnnnnnnnnnnnnnnnnnnnnnnnnnnnnnnnnnnnnnnnnnnnnnnnnnnnnnnnnnnnnnnnnnnnnnnnnnnnnnnnnnnnnnnnnnnnnnnnnnnnnnnnnnnnnnnnnnnnnnnnnnnnnnnnnnnnnnnnnnnnnnnnnnnnnnnnnnnnnnnnnnnnnnnnnnnnnnnnnnnnnnnnnnnnnnnnnnnnnnnnnnnnnnnnnnnnnnnnnnnnnnnnnnnnnnnnnnnnnnnnnnnnnnnnnnnnnnnnnnnnnnnnnnnnnnnnnnnnnnnnnnnnnnnnnnnnnnnnnnnnnnnnnnnnnnnnnnnnnnnnnnnnnnnnnnnnnnnnnnnnnnnnnnnnnnnnnnnnnnnnnnnnnnnnnnnnnnnnnnnnnnnnnnnnnnnnnnnnnnnnnnnnnnnnnnnnnnnnnnnnnnnnnnnnnnnnnnnnnnnnnnnnnnnnnnnnnnnnnnnnnnnnnnnnnnnnnnnnnnnnnnnnnnnnnnnnnnnnnnnnnnnnnnnnnnnnnnnnnnnnnnnnnnnnnnnnnnnnnnnnnnnnnnnnnnnnnnnnnnnnnnnnnnnnnnnnnnnnnnnnnnnnnnnnnnnnnnnnnnnnnnnnnnnnnnnnnnnnnnnnnnnnnnnnnnnnnnnnnnnnnnnnnnnnnnnnnnnnnnnnnnnnnnnnnnnnnnnnnnnnnnnnnnnnnnnnnnnnnnnnnnnnnnnnnnnnnnnnnnnnnnnnnnnnnnnnnnnnnnnnnnnnnnnnnnnnnnnnnnnnnnnnnnnnnnnnnnnnnnnnnnnnnnnnnnnnnnnnnnnnnnnnnnnnnnnnnnnnnnnnnnnnnnnnnnnnnnnnnnnnnnnnnnnnnnnnnnnnnnnnnnnnnnnnnnnnnnnnnnnnnnnnnnnnnnnnnnnnnnnnnnnnnnnnnnnnnnnnnnnnnnnnnnnnnnnnnnnnnnnnnnnnnnnnnnnnnnnnnnnnnnnnnnnnnnnnnnnnnnnnnnnnnnnnnnnnnnnnnnnnnnnnnnnnnnnnnnnnnnnnnnnnnnnnnnnnnnnnnnnnnnnnnnnnnnnnnnnnnnnnnnnnnnnnnnnnnnnnnnnnnnnnnnnnnnnnnnnnnnnnnnnnnnnnnnnnnnnnnnnnnnnnnnnnnnnnnnnnnnnnnnnnnnnnnnnnnnnnnnnnnnnnnnnnnnnnnnnnnnnnnnnnnnnnnnnnnnnnnnnnnnnnnnnnnnnnnnnnnnnnnnnnnnnnnnnnnnnnnnnnnnnnnnnnnnnnnnnnnnnnnnnnnnnnnnnnnnnnnnnnnnnnnnnnnnnnnnnnnnnnnnnnnnnnnnnnnnnnnnnnnnnnnnnnnnnnnnnnnnnnnnnnnnnnnnnnnnnnnnnnnnnnnnnnnnnnnnnnnnnnnnnnnnnnnnnnnnnnnnnnnnnnnnnnnnnnnnnnnnnnnnnnnnnnnnnnnnnnnnnnnnnnnnnnnnnnnnnnnnnnnnnnnnnnnnnnnnnnnnnnnnnnnnnnnnnnnnnnnnnnnnnnnnnnnnnnnnnnnnnnnnnnnnnnnnnnnnnnnnnnnnnnnnnnnnnnnnnnnnnnnnnnnnnnnnnnnnnnnnnnnnnnnnnnnnnnnnnnnnnnnnnnnnnnnnnnnnnnnnnnnnnnnnnnnnnnnnnnnnnnnnnnnnnnnnnnnnnnnnnnnnnnnnnnnnnnnnnnnnnnnnnnnnnnnnnnnnnnnnnnnnnnnnnnnnnnnnnnnnnnnnnnnnnnnnnnnnnnnnnnnnnnnnnnnnnnnnnnnnnnnnnnnnnnnnnnnnnnnnnnnnnnnnnnnnnnnnnnnnnnnnnnnnnnnnnnnnnnnnnnnnnnnnnnnnnnnnnnnnnnnnnnnnnnnnnnnnnnnnnnnnnnnnnnnnnnnnnnnnnnnnnnnnnnnnnnnnnnnnnnnnnnnnnnnnnnnnnnnnnnnnnnnnnnnnnnnnnnnnnnnnnnnnnnnnnnnnnnnnnnnnnnnnnnnnnnnnnnnnnnnnnnnnnnnnnnnnnnnnnnnnnnnnnnnnnnnnnnnnnnnnnnnnnnnnnnnnnnnnnnnnnnnnnnnnnnnnnnnnnnnnnnnnnnnnnnnnnnnnnnnnnnnnnnnnnnnnnnnnnnnnnnnnnnnnnnnnnnnnnnnnnnnnnnnnnnnnnnnnnnnnnnnnnnnnnnnnnnnnnnnnnnnnnnnnnnnnnnnnnnnnnnnnnnnnnnnnnnnnnnnnnnnnnnnnnnnnnnnnnnnnnnnnnnnnnnnnnnnnnnnnnnnnnnnnnnnnnnnnnnnnnnnnnnnnnnnnnnnnnnnnnnnnnnnnnnnnnnnnnnnnnnnnnnnnnnnnnnnnnnnnnnnnnnnnnnnnnnnnnnnnnnnnnnnnnnnnnnnnnnnnnnnnnnnnnnnnnnnnnnnnnnnnnnnnnnnnnnnnnnnnnnnnnnnnnnnnnnnnnnnnnnnnnnnnnnnnnnnnnnnnnnnnnnnnnnnnnnnnnnnnnnnnnnnnnnnnnnnnnnnnnnnnnnnnnnnnnnnnnnnnnnnnnnnnnnnnnnnnnnnnnnnnnnnnnnnnnnnnnnnnnnnnnnnnnnnnnnnnnnnnnnnnnnnnnnnnnnnnnnnnnnnnnnnnnnnnnnnnnnnnnnnnnnnnnnnnnnnnnnnnnnnnnnnnnnnnnnnnnnnnnnnnnnnnnnnnnnnnnnnnnnnnnnnnnnnnnnnnnnnnnnnnnnnnnnnnnnnnnnnnnnnnnnnnnnnnnnnnnnnnnnnnnnnnnnnnnnnnnnnnnnnnnnnnnnnnnnnnnnnnnnnnnnnnnnnnnnnnnnnnnnnnnnnnnnnnnnnnnnnnnnnnnnnnnnnnnnnnnnnnnnnnnnnnnnnnnnnnnnnnnnnnnnnnnnnnnnnnnnnnnnnnnnnnnnnnnnnnnnnnnnnnnnnnnnnnnnnnnnnnnnnnnnnnnnnnnnnnnnnnnnnnnnnnnnnnnnnnnnnnnnnnnnnnnnnnnnnnnnnnnnnnnnnnnnnnnnnnnnnnnnnnnnnnnnnnnnnnnnnnnnnnnnnnnnnnnnnnnnnnnnnnnnnnnnnnnnnnnnnnnnnnnnnnnnnnnnnnnnnnnnnnnnnnnnnnnnnnnnnnnnnnnnnnnnnnnnnnnnnnnnnnnnnnnnnnnnnnnnnnnnnnnnnnnnnnnnnnnnnnnnnnnnnnnnnnnnnnnnnnnnnnnnnnnnnnnnnnnnnnnnnnnnnnnnnnnnnnnnnnnnnnnnnnnnnnnnnnnnnnnnnnnnnnnnnnnnnnnnnnnnnnnnnnnnnnnnnnnnnnnnnnnnnnnnnnnnnnnnnnnnnnnnnnnnnnnnnnnnnnnnnnnnnnnnnnnnnnnnnnnnnnnnnnnnnnnnnnnnnnnnnnnnnnnnnnnnnnnnnnnnnnnnnnnnnnnnnnnnnnnnnnnnnnnnnnnnnnnnnnnnnnnnnnnnnnnnnnnnnnnnnnnnnnnnnnnnnnnnnnnnnnnnnnnnnnnnnnnnnnnnnnnnnnnnnnnnnnnnnnnnnnnnnnnnnnnnnnnnnnnnnnnnnnnnnnnnnnnnnnnnnnnnnnnnnnnnnnnnnnnnnnnnnnnnnnnnnnnnnnnnnnnnnnnnnnnnnnnnnnnnnnnnnnnnnnnnnnnnnnnnnnnnnnnnnnnnnnnnnnnnnnnnnnnnnnnnnnnnnnnnnnnnnnnnnnnnnnnnnnnnnnnnnnnnnnnnnnnnnnnnnnnnnnnnnnnnnnnnnnnnnnnnnnnnnnnnnnnnnnnnnnnnnnnnnnnnnnnnnnnnnnnnnnnnnnnnnnnnnnnnnnnnnnnnnnnnnnnnnnnnnnnnnnnnnnnnnnnnnnnnnnnnnnnnnnnnnnnnnnnnnnnnnnnnnnnnnnnnnnnnnnnnnnnnnnnnnnnnnnnnnnnnnnnnnnnnnnnnnnnnnnnnnnnnnnnnnnnnnnnnnnnnnnnnnnnnnnnnnnnnnnnnnnnnnnnnnnnnnnnnnnnnnnnnnnnnnnnnnnnnnnnnnnnnnnnnnnnnnnnnnnnnnnnnnnnnnnnnnnnnnnnnnnnnnnnnnnnnnnnnnnnnnnnnnnnnnnnnnnnnnnnnnnnnnnnnnnnnnnnnnnnnnnnnnnnnnnnnnnnnnnnnnnnnnnnnnnnnnnnnnnnnnnnnnnnnnnnnnnnnnnnnnnnnnnnnnnnnnnnnnnnnnnnnnnnnnnnnnnnnnnnnnnnnnnnnnnnnnnnnnnnnnnnnnnnnnnnnnnnnnnnnnnnnnnnnnnnnnnnnnnnnnnnnnnnnnnnnnnnnnnnnnnnnnnnnnnnnnnnnnnnnnnnnnnnnnnnnnnnnnnnnnnnnnnnnnnnnnnnnnnnnnnnnnnnnnnnnnnnnnnnnnnnnnnnnnnnnnnnnnnnnnnnnnnnnnnnnnnnnnnnnnnnnnnnnnnnnnnnnnnnnnnnnnnnnnnnnnnnnnnnnnnnnnnnnnnnnnnnnnnnnnnnnnnnnnnnnnnnnnnnnnnnnnnnnnnnnnnnnnnnnnnnnnnnnnnnnnnnnnnnnnnnnnnnnnnnnnnnnnnnnnnnnnnnnnnnnnnnnnnnnnnnnnnnnnnnnnnnnnnnnnnnnnnnnnnnnnnnnnnnnnnnnnnnnnnnnnnnnnnnnnnnnnnnnnnnnnnnnnnnnnnnnnnnnnnnnnnnnnnnnnnnnnnnnnnnnnnnnnnnnnnnnnnnnnnnnnnnnnnnnnnnnnnnnnnnnnnnnnnnnnnnnnnnnnnnnnnnnnnnnnnnnnnnnnnnnnnnnnnnnnnnnnnnnnnnnnnnnnnnnnnnnnnnnnnnnnnnnnnnnnnnnnnnnnnnnnnnnnnnnnnnnnnnnnnnnnnnnnnnnnnnnnnnnnnnnnnnnnnnnnnnnnnnnnnnnnnnnnnnnnnnnnnnnnnnnnnnnnnnnnnnnnnnnnnnnnnnnnnnnnnnnnnnnnnnnnnnnnnnnnnnnnnnnnnnnnnnnnnnnnnnnnnnnnnnnnnnnnnnnnnnnnnnnnnnnnnnnnnnnnnnnnnnnnnnnnnnnnnnnnnnnnnnnnnnnnnnnnnnnnnnnnnnnnnnnnnnnnnnnnnnnnnnnnnnnnnnnnnnnnnnnnnnnnnnnnnnnnnnnnnnnnnnnnnnnnnnnnnnnnnnnnnnnnnnnnnnnnnnnnnnnnnnnnnnnnnnnnnnnnnnnnnnnnnnnnnnnnnnnnnnnnnnnnnnnnnnnnnnnnnnnnnnnnnnnnnnnnnnnnnnnnnnnnnnnnnnnnnnnnnnnnnnnnnnnnnnnnnnnnnnnnnnnnnnnnnnnnnnnnnnnnnnnnnnnnnnnnnnnnnnnnnnnnnnnnnnnnnnnnnnnnnnnnnnnnnnnnnnnnnnnnnnnnnnnnnnnnnnnnnnnnnnnnnnnnnnnnnnnnnnnnnnnnnnnnnnnnnnnnnnnnnnnnnnnnnnnnnnnnnnnnnnnnnnnnnnnnnnnnnnnnnnnnnnnnnnnnnnnnnnnnnnnnnnnnnnnnnnnnnnnnnnnnnnnnnnnnnnnnnnnnnnnnnnnnnnnnnnnnnnnnnnnnnnnnnnnnnnnnnnnnnnnnnnnnnnnnnnnnnnnnnnnnnnnnnnnnnnnnnnnnnnnnnnnnnnnnnnnnnnnnnnnnnnnnnnnnnnnnnnnnnnnnnnnnnnnnnnnnnnnnnnnnnnnnnnnnnnnnnnnnnnnnnnnnnnnnnnnnnnnnnnnnnnnnnnnnnnnnnnnnnnnnnnnnnnnnnnnnnnnnnnnnnnnnnnnnnnnnnnnnnnnnnnnnnnnnnnnnnnnnnnnnnnnnnnnnnnnnnnnnnnnnnnnnnnnnnnnnnnnnnnnnnnnnnnnnnnnnnnnnnnnnnnnnnnnnnnnnnnnnnnnnnnnnnnnnnnnnnnnnnnnnnnnnnnnnnnnnnnnnnnnnnnnnnnnnnnnnnnnnnnnnnnnnnnnnnnnnnnnnnnnnnnnnnnnnnnnnnnnnnnnnnnnnnnnnnnnnnnnnnnnnnnnnnnnnnnnnnnnnnnnnnnnnnnnnnnnnnnnnnnnnnnnnnnnnnnnnnnnnnnnnnnnnnnnnnnnnnnnnnnnnnnnnnnnnnnnnnnnnnnnnnnnnnnnnnnnnnnnnnnnnnnnnnnnnnnnnnnnnnnnnnnnnnnnnnnnnnnnnnnnnnnnnnnnnnnnnnnnnnnnnnnnnnnnnnnnnnnnnnnnnnnnnnnnnnnnnnnnnnnnnnnnnnnnnnnnnnnnnnnnnnnnnnnnnnnnnnnnnnnnnnnnnnnnnnnnnnnnnnnnnnnnnnnnnnnnnnnnnnnnnnnnnnnnnnnnnnnnnnnnnnnnnnnnnnnnnnnnnnnnnnnnnnnnnnnnnnnnnnnnnnnnnnnnnnnnnnnnnnnnnnnnnnnnnnnnnnnnnnnnnnnnnnnnnnnnnnnnnnnnnnnnnnnnnnnnnnnnnnnnnnnnnnnnnnnnnnnnnnnnnnnnnnnnnnnnnnnnnnnnnnnnnnnnnnnnnnnnnnnnnnnnnnnnnnnnnnnnnnnnnnnnnnnnnnnnnnnnnnnnnnnnnnnnnnnnnnnnnnnnnnnnnnnnnnnnnnnnnnnnnnnnnnnnnnnnnnnnnnnnnnnnnnnnnnnnnnnnnnnnnnnnnnnnnnnnnnnnnnnnnnnnnnnnnnnnnnnnnnnnnnnnnnnnnnnnnnnnnnnnnnnnnnnnnnnnnnnnnnnnnnnnnnnnnnnnnnnnnnnnnnnnnnnnnnnnnnnnnnnnnnnnnnnnnnnnnnnnnnnnnnnnnnnnnnnnnnnnnnnnnnnnnnnnnnnnnnnnnnnnnnnnnnnnnnnnnnnnnnnnnnnnnnnnnnnnnnnnnnnnnnnnnnnnnnnnnnnnnnnnnnnnnnnnnnnnnnnnnnnnnnnnnnnnnnnnnnnnnnnnnnnnnnnnnnnnnnnnnnnnnnnnnnnnnnnnnnnnnnnnnnnnnnnnnnnnnnnnnnnnnnnnnnnnnnnnnnnnnnnnnnnnnnnnnnnnnnnnnnnnnnnnnnnnnnnnnnnnnnnnnnnnnnnnnnnnnnnnnnnnnnnnnnnnnnnnnnnnnnnnnnnnnnnnnnnnnnnnnnnnnnnnnnnnnnnnnnnnnnnnnnnnnnnnnnnnnnnnnnnnnnnnnnnnnnnnnnnnnnnnnnnnnnnnnnnnnnnnnnnnnnnnnnnnnnnnnnnnnnnnnnnnnnnnnnnnnnnnnnnnnnnnnnnnnnnnnnnnnnnnnnnnnnnnnnnnnnnnnnnnnnnnnnnnnnnnnnnnnnnnnnnnnnnnnnnnnnnnnnnnnnnnnnnnnnnnnnnnnnnnnnnnnnnnnnnnnnnnnnnnnnnnnnnnnnnnnnnnnnnnnnnnnnnnnnnnnnnnnnnnnnnnnnnnnnnnnnnnnnnnnnnnnnnnnnnnnnnnnnnnnnnnnnnnnnnnnnnnnnnnnnnnnnnnnnnnnnnnnnnnnnnnnnnnnnnnnnnnnnnnnnnnnnnnnnnnnnnnnnnnnnnnnnnnnnnnnnnnnnnnnnnnnnnnnnnnnnnnnnnnnnnnnnnnnnnnnnnnnnnnnnnnnnnnnnnnnnnnnnnnnnnnnnnnnnnnnnnnnnnnnnnnnnnnnnnnnnnnnnnnnnnnnnnnnnnnnnnnnnnnnnnnnnnnnnnnnnnnnnnnnnnnnnnnnnnnnnnnnnnnnnnnnnnnnnnnnnnnnnnnnnnnnnnnnnnnnnnnnnnnnnnnnnnnnnnnnnnnnnnnnnnnnnnnnnnnnnnnnnnnnnnnnnnnnnnnnnnnnnnnnnnnnnnnnnnnnnnnnnnnnnnnnnnnnnnnnnnnnnnnnnnnnnnnnnnnnnnnnnnnnnnnnnnnnnnnnnnnnnnnnnnnnnnnnnnnnnnnnnnnnnnnnnnnnnnnnnnnnnnnnnnnnnnnnnnnnnnnnnnnnnnnnnnnnnnnnnnnnnnnnnnnnnnnnnnnnnnnnnnnnnnnnnnnnnnnnnnnnnnnnnnnnnnnnnnnnnnnnnnnnnnnnnnnnnnnnnnnnnnnnnnnnnnnnnnnnnnnnnnnnnnnnnnnnnnnnnnnnnnnnnnnnnnnnnnnnnnnnnnnnnnnnnnnnnnnnnnnnnnnnnnnnnnnnnnnnnnnnnnnnnnnnnnnnnnnnnnnnnnnnnnnnnnnnnnnnnnnnnnnnnnnnnnnnnnnnnnnnnnnnnnnnnnnnnnnnnnnnnnnnnnnnnnnnnnnnnnnnnnnnnnnnnnnnnnnnnnnnnnnnnnnnnnnnnnnnnnnnnnnnnnnnnnnnnnnnnnnnnnnnnnnnnnnnnnnnnnnnnnnnnnnnnnnnnnnnnnnnnnnnnnnnnnnnnnnnnnnnnnnnnnnnnnnnnnnnnnnnnnnnnnnnnnnnnnnnnnnnnnnnnnnnnnnnnnnnnnnnnnnnnnnnnnnnnnnnnnnnnnnnnnnnnnnnnnnnnnnnnnnnnnnnnnnnnnnnnnnnnnnnnnnnnnnnnnnnnnnnnnnnnnnnnnnnnnnnnnnnnnnnnnnnnnnnnnnnnnnnnnnnnnnnnnnnnnnnnnnnnnnnnnnnnnnnnnnnnnnnnnnnnnnnnnnnnnnnnnnnnnnnnnnnnnnnnnnnnnnnnnnnnnnnnnnnnnnnnnnnnnnnnnnnnnnnnnnnnnnnnnnnnnnnnnnnnnnnnnnnnnnnnnnnnnnnnnnnnnnnnnnnnnnnnnnnnnnnnnnnnnnnnnnnnnnnnnnnnnnnnnnnnnnnnnnnnnnnnnnnnnnnnnnnnnnnnnnnnnnnnnnnnnnnnnnnnnnnnnnnnnnnnnnnnnnnnnnnnnnnnnnnnnnnnnnnnnnnnnnnnnnnnnnnnnnnnnnnnnnnnnnnnnnnnnnnnnnnnnnnnnnnnnnnnnnnnnnnnnnnnnnnnnnnnnnnnnnnnnnnnnnnnnnnnnnnnnnnnnnnnnnnnnnnnnnnnnnnnnnnnnnnnnnnnnnnnnnnnnnnnnnnnnnnnnnnnnnnnnnnnnnnnnnnnnnnnnnnnnnnnnnnnnnnnnnnnnnnnnnnnnnnnnnnnnnnnnnnnnnnnnnnnnnnnnnnnnnnnnnnnnnnnnnnnnnnnnnnnnnnnnnnnnnnnnnnnnnnnnnnnnnnnnnnnnnnnnnnnnnnnnnnnnnnnnnnnnnnnnnnnnnnnnnnnnnnnnnnnnnnnnnnnnnnnnnnnnnnnnnnnnnnnnnnnnnnnnnnnnnnnnnnnnnnnnnnnnnnnnnnnnnnnnnnnnnnnnnnnnnnnnnnnnnnnnnnnnnnnnnnnnnnnnnnnnnnnnnnnnnnnnnnnnnnnnnnnnnnnnnnnnnnnnnnnnnnnnnnnnnnnnnnnnnnnnnnnnnnnnnnnnnnnnnnnnnnnnnnnnnnnnnnnnnnnnnnnnnnnnnnnnnnnnnnnnnnnnnnnnnnnnnnnnnnnnnnnnnnnnnnnnnnnnnnnnnnnnnnnnnnnnnnnnnnnnnnnnnnnnnnnnnnnnnnnnnnnnnnnnnnnnnnnnnnnnnnnnnnnnnnnnnnnnnnnnnnnnnnnnnnnnnnnnnnnnnnnnnnnnnnnnnnnnnnnnnnnnnnnnnnnnnnnnnnnnnnnnnnnnnnnnnnnnnnnnnnnnnnnnnnnnnnnnnnnnnnnnnnnnnnnnnnnnnnnnnnnnnnnnnnnnnnnnnnnnnnnnnnnnnnnnnnnnnnnnnnnnnnnnnnnnnnnnnnnnnnnnnnnnnnnnnnnnnnnnnnnnnnnnnnnnnnnnnnnnnnnnnnnnnnnnnnnnnnnnnnnnnnnnnnnnnnnnnnnnnnnnnnnnnnnnnnnnnnnnnnnnnnnnnnnnnnnnnnnnnnnnnnnnnnnnnnnnnnnnnnnnnnnnnnnnnnnnnnnnnnnnnnnnnnnnnnnnnnnnnnnnnnnnnnnnnnnnnnnnnnnnnnnnnnnnnnnnnnnnnnnnnnnnnnnnnnnnnnnnnnnnnnnnnnnnnnnnnnnnnnnnnnnnnnnnnnnnnnnnnnnnnnnnnnnnnnnnnnnnnnnnnnnnnnnnnnnnnnnnnnnnnnnnnnnnnnnnnnnnnnnnnnnnnnnnnnnnnnnnnnnnnnnnnnnnnnnnnnnnnnnnnnnnnnnnnnnnnnnnnnnnnnnnnnnnnnnnnnnnnnnnnnnnnnnnnnnnnnnnnnnnnnnnnnnnnnnnnnnnnnnnnnnnnnnnnnnnnnnnnnnnnnnnnnnnnnnnnnnnnnnnnnnnnnnnnnnnnnnnnnnnnnnnnnnnnnnnnnnnnnnnnnnnnnnnnnnnnnnnnnnnnnnnnnnnnnnnnnnnnnnnnnnnnnnnnnnnnnnnnnnnnnnnnnnnnnnnnnnnnnnnnnnnnnnnnnnnnnnnnnnnnnnnnnnnnnnnnnnnnnnnnnnnnnnnnnnnnnnnnnnnnnnnnnnnnnnnnnnnnnnnnnnnnnnnnnnnnnnnnnnnnnnnnnnnnnnnnnnnnnnnnnnnnnnnnnnnnnnnnnnnnnnnnnnnnnnnnnnnnnnnnnnnnnnnnnnnnnnnnnnnnnnnnnnnnnnnnnnnnnnnnnnnnnnnnnnnnnnnnnnnnnnnnnnnnnnnnnnnnnnnnnnnnnnnnnnnnnnnnnnnnnnnnnnnnnnnnnnnnnnnnnnnnnnnnnnnnnnnnnnnnnnnnnnnnnnnnnnnnnnnnnnnnnnnnnnnnnnnnnnnnnnnnnnnnnnnnnnnnnnnnnnnnnnnnnnnnnnnnnnnnnnnnnnnnnnnnnnnnnnnnnnnnnnnnnnnnnnnnnnnnnnnnnnnnnnnnnnnnnnnnnnnnnnnnnnnnnnnnnnnnnnnnnnnnnnnnnnnnnnnnnnnnnnnnnnnnnnnnnnnnnnnnnnnnnnnnnnnnnnnnnnnnnnnnnnnnnnnnnnnnnnnnnnnnnnnnnnnnnnnnnnnnnnnnnnnnnnnnnnnnnnnnnnnnnnnnnnnnnnnnnnnnnnnnnnnnnnnnnnnnnnnnnnnnnnnnnnnnnnnnnnnnnnnnnnnnnnnnnnnnnnnnnnnnnnnnnnnnnnnnnnnnnnnnnnnnnnnnnnnnnnnnnnnnnnnnnnnnnnnnnnnnnnnnnnnnnnnnnnnnnnnnnnnnnnnnnnnnnnnnnnnnnnnnnnnnnnnnnnnnnnnnnnnnnnnnnnnnnnnnnnnnnnnnnnnnnnnnnnnnnnnnnnnnnnnnnnnnnnnnnnnnnnnnnnnnnnnnnnnnnnnnnnnnnnnnnnnnnnnnnnnnnnnnnnnnnnnnnnnnnnnnnnnnnnnnnnnnnnnnnnnnnnnnnnnnnnnnnnnnnnnnnnnnnnnnnnnnnnnnnnnnnnnnnnnnnnnnnnnnnnnnnnnnnnnnnnnnnnnnnnnnnnnnnnnnnnnnnnnnnnnnnnnnnnnnnnnnnnnnnnnnnnnnnnnnnnnnnnnnnnnnnnnnnnnnnnnnnnnnnnnnnnnnnnnnnnnnnnnnnnnnnnnnnnnnnnnnnnnnnnnnnnnnnnnnnnnnnnnnnnnnnnnnnnnnnnnnnnnnnnnnnnnnnnnnnnnnnnnnnnnnnnnnnnnnnnnnnnnnnnnnnnnnnnnnnnnnnnnnnnnnnnnnnnnnnnnnnnnnnnnnnnnnnnnnnnnnnnnnnnnnnnnnnnnnnnnnnnnnnnnnnnnnnnnnnnnnnnnnnnnnnnnnnnnnnnnnnnnnnnnnnnnnnnnnnnnnnnnnnnnnnnnnnnnnnnnnnnnnnnnnnnnnnnnnnnnnnnnnnnnnnnnnnnnnnnnnnnnnnnnnnnnnnnnnnnnnnnnnnnnnnnnnnnnnnnnnnnnnnnnnnnnnnnnnnnnnnnnnnnnnnnnnnnnnnnnnnnnnnnnnnnnnnnnnnnnnnnnnnnnnnnnnnnnnnnnnnnnnnnnnnnnnnnnnnnnnnnnnnnnnnnnnnnnnnnnnnnnnnnnnnnnnnnnnnnnnnnnnnnnnnnnnnnnnnnnnnnnnnnnnnnnnnnnnnnnnnnnnnnnnnnnnnnnnnnnnnnnnnnnnnnnnnnnnnnnnnnnnnnnnnnnnnnnnnnnnnnnnnnnnnnnnnnnnnnnnnnnnnnnnnnnnnnnnnnnnnnnnnnnnnnnnnnnnnnnnnnnnnnnnnnnnnnnnnnnnnnnnnnnnnnnnnnnnnnnnnnnnnnnnnnnnnnnnnnnnnnnnnnnnnnnnnnnnnnnnnnnnnnnnnnnnnnnnnnnnnnnnnnnnnnnnnnnnnnnnnnnnnnnnnnnnnnnnnnnnnnnnnnnnnnnnnnnnnnnnnnnnnnnnnnnnnnnnnnnnnnnnnnnnnnnnnnnnnnnnnnnnnnnnnnnnnnnnnnnnnnnnnnnnnnnnnnnnnnnnnnnnnnnnnnnnnnnnnnnnnnnnnnnnnnnnnnnnnnnnnnnnnnnnnnnnnnnnnnnnnnnnnnnnnnnnnnnnnnnnnnnnnnnnnnnnnnnnnnnnnnnnnnnnnnnnnnnnnnnnnnnnnnnnnnnnnnnnnnnnnnnnnnnnnnnnnnnnnnnnnnnnnnnnnnnnnnnnnnnnnnnnnnnnnnnnnnnnnnnnnnnnnnnnnnnnnnnnnnnnnnnnnnnnnnnnnnnnnnnnnnnnnnnnnnnnnnnnnnnnnnnnnnnnnnnnnnnnnnnnnnnnnnnnnnnnnnnnnnnnnnnnnnnnnnnnnnnnnnnnnnnnnnnnnnnnnnnnnnnnnnnnnnnnnnnnnnnnnnnnnnnnnnnnnnnnnnnnnnnnnnnnnnnnnnnnnnnnnnnnnnnnnnnnnnnnnnnnnnnnnnnnnnnnnnnnnnnnnnnnnnnnnnnnnnnnnnnnnnnnnnnnnnnnnnnnnnnnnnnnnnnnnnnnnnnnnnnnnnnnnnnnnnnnnnnnnnnnnnnnnnnnnnnnnnnnnnnnnnnnnnnnnnnnnnnnnnnnnnnnnnnnnnnnnnnnnnnnnnnnnnnnnnnnnnnnnnnnnnnnnnnnnnnnnnnnnnnnnnnnnnnnnnnnnnnnnnnnnnnnnnnnnnnnnnnnnnnnnnnnnnnnnnnnnnnnnnnnnnnnnnnnnnnnnnnnnnnnnnnnnnnnnnnnnnnnnnnnnnnnnnnnnnnnnnnnnnnnnnnnnnnnnnnnnnnnnnnnnnnnnnnnnnnnnnnnnnnnnnnnnnnnnnnnnnnnnnnnnnnnnnnnnnnnnnnnnnnnnnnnnnnnnnnnnnnnnnnnnnnnnnnnnnnnnnnnnnnnnnnnnnnnnnnnnnnnnnnnnnnnnnnnnnnnnnnnnnnnnnnnnnnnnnnnnnnnnnnnnnnnnnnnnnnnnnnnnnnnnnnnnnnnnnnnnnnnnnnnnnnnnnnnnnnnnnnnnnnnnnnnnnnnnnnnnnnnnnnnnnnnnnnnnnnnnnnnnnnnnnnnnnnnnnnnnnnnnnnnnnnnnnnnnnnnnnnnnnnnnnnnnnnnnnnnnnnnnnnnnnnnnnnnnnnnnnnnnnnnnnnnnnnnnnnnnnnnnnnnnnnnnnnnnnnnnnnnnnnnnnnnnnnnnnnnnnnnnnnnnnnnnnnnnnnnnnnnnnnnnnnnnnnnnnnnnnnnnnnnnnnnnnnnnnnnnnnnnnnnnnnnnnnnnnnnnnnnnnnnnnnnnnnnnnnnnnnnnnnnnnnnnnnnnnnnnnnnnnnnnnnnnnnnnnnnnnnnnnnnnnnnnnnnnnnnnnnnnnnnnnnnnnnnnnnnnnnnnnnnnnnnnnnnnnnnnnnnnnnnnnnnnnnnnnnnnnnnnnnnnnnnnnnnnnnnnnnnnnnnnnnnnnnnnnnnnnnnnnnnnnnnnnnnnnnnnnnnnnnnnnnnnnnnnnnnnnnnnnnnnnnnnnnnnnnnnnnnnnnnnnnnnnnnnnnnnnnnnnnnnnnnnnnnnnnnnnnnnnnnnnnnnnnnnnnnnnnnnnnnnnnnnnnnnnnnnnnnnnnnnnnnnnnnnnnnnnnnnnnnnnnnnnnnnnnnnnnnnnnnnnnnnnnnnnnnnnnnnnnnnnnnnnnnnnnnnnnnnnnnnnnnnnnnnnnnnnnnnnnnnnnnnnnnnnnnnnnnnnnnnnnnnnnnnnnnnnnnnnnnnnnnnnnnnnnnnnnnnnnnnnnnnnnnnnnnnnnnnnnnnnnnnnnnnnnnnnnnnnnnnnnnnnnnnnnnnnnnnnnnnnnnnnnnnnnnnnnnnnnnnnnnnnnnnnnnnnnnnnnnnnnnnnnnnnnnnnnnnnnnnnnnnnnnnnnnnnnnnnnnnnnnnnnnnnnnnnnnnnnnnnnnnnnnnnnnnnnnnnnnnnnnnnnnnnnnnnnnnnnnnnnnnnnnnnnnnnnnnnnnnnnnnnnnnnnnnnnnnnnnnnnnnnnnnnnnnnnnnnnnnnnnnnnnnnnnnnnnnnnnnnnnnnnnnnnnnnnnnnnnnnnnnnnnnnnnnnnnnnnnnnnnnnnnnnnnnnnnnnnnnnnnnnnnnnnnnnnnnnnnnnnnnnnnnnnnnnnnnnnnnnnnnnnnnnnnnnnnnnnnnnnnnnnnnnnnnnnnnnnnnnnnnnnnnnnnnnnnnnnnnnnnnnnnnnnnnnnnnnnnnnnnnnnnnnnnnnnnnnnnnnnnnnnnnnnnnnnnnnnnnnnnnnnnnnnnnnnnnnnnnnnnnnnnnnnnnnnnnnnnnnnnnnnnnnnnnnnnnnnnnnnnnnnnnnnnnnnnnnnnnnnnnnnnnnnnnnnnnnnnnnnnnnnnnnnnnnnnnnnnnnnnnnnnnnnnnnnnnnnnnnnnnnnnnnnnnnnnnnnnnnnnnnnnnnnnnnnnnnnnnnnnnnnnnnnnnnnnnnnnnnnnnnnnnnnnnnnnnnnnnnnnnnnnnnnnnnnnnnnnnnnnnnnnnnnnnnnnnnnnnnnnnnnnnnnnnnnnnnnnnnnnnnnnnnnnnnnnnnnnnnnnnnnnnnnnnnnnnnnnnnnnnnnnnnnnnnnnnnnnnnnnnnnnnnnnnnnnnnnnnnnnnnnnnnnnnnnnnnnnnnnnnnnnnnnnnnnnnnnnnnnnnnnnnnnnnnnnnnnnnnnnnnnnnnnnnnnnnnnnnnnnnnnnnnnnnnnnnnnnnnnnnnnnnnnnnnnnnnnnnnnnnnnnnnnnnnnnnnnnnnnnnnnnnnnnnnnnnnnnnnnnnnnnnnnnnnnnnnnnnnnnnnnnnnnnnnnnnnnnnnnnnnnnnnnnnnnnnnnnnnnnnnnnnnnnnnnnnnnnnnnnnnnnnnnnnnnnnnnnnnnnnnnnnnnnnnnnnnnnnnnnnnnnnnnnnnnnnnnnnnnnnnnnnnnnnnnnnnnnnnnnnnnnnnnnnnnnnnnnnnnnnnnnnnnnnnnnnnnnnnnnnnnnnnnnnnnnnnnnnnnnnnnnnnnnnnnnnnnnnnnnnnnnnnnnnnnnnnnnnnnnnnnnnnnnnnnnnnnnnnnnnnnnnnnnnnnnnnnnnnnnnnnnnnnnnnnnnnnnnnnnnnnnnnnnnnnnnnnnnnnnnnnnnnnnnnnnnnnnnnnnnnnnnnnnnnnnnnnnnnnnnnnnnnnnnnnnnnnnnnnnnnnnnnnnnnnnnnnnnnnnnnnnnnnnnnnnnnnnnnnnnnnnnnnnnnnnnnnnnnnnnnnnnnnnnnnnnnnnnnnnnnnnnnnnnnnnnnnnnnnnnnnnnnnnnnnnnnnnnnnnnnnnnnnnnnnnnnnnnnnnnnnnnnnnnnnnnnnnnnnnnnnnnnnnnnnnnnnnnnnnnnnnnnnnnnnnnnnnnnnnnnnnnnnnnnnnnnnnnnnnnnnnnnnnnnnnnnnnnnnnnnnnnnnnnnnnnnnnnnnnnnnnnnnnnnnnnnnnnnnnnnnnnnnnnnnnnnnnnnnnnnnnnnnnnnnnnnnnnnnnnnnnnnnnnnnnnnnnnnnnnnnnnnnnnnnnnnnnnnnnnnnnnnnnnnnnnnnnnnnnnnnnnnnnnnnnnnnnnnnnnnnnnnnnnnnnnnnnnnnnnnnnnnnnnnnnnnnnnnnnnnnnnnnnnnnnnnnnnnnnnnnnnnnnnnnnnnnnnnnnnnnnnnnnnnnnnnnnnnnnnnnnnnnnnnnnnnnnnnnnnnnnnnnnnnnnnnnnnnnnnnnnnnnnnnnnnnnnnnnnnnnnnnnnnnnnnnnnnnnnnnnnnnnnnnnnnnnnnnnnnnnnnnnnnnnnnnnnnnnnnnnnnnnnnnnnnnnnnnnnnnnnnnnnnnnnnnnnnnnnnnnnnnnnnnnnnnnnnnnnnnnnnnnnnnnnnnnnnnnnnnnnnnnnnnnnnnnnnnnnnnnnnnnnnnnnnnnnnnnnnnnnnnnnnnnnnnnnnnnnnnnnnnnnnnnnnnnnnnnnnnnnnnnnnnnnnnnnnnnnnnnnnnnnnnnnnnnnnnnnnnnnnnnnnnnnnnnnnnnnnnnnnnnnnnnnnnnnnnnnnnnnnnnnnnnnnnnnnnnnnnnnnnnnnnnnnnnnnnnnnnnnnnnnnnnnnnnnnnnnnnnnnnnnnnnnnnnnnnnnnnnnnnnnnnnnnnnnnnnnnnnnnnnnnnnnnnnnnnnnnnnnnnnnnnnnnnnnnnnnnnnnnnnnnnnnnnnnnnnnnnnnnnnnnnnnnnnnnnnnnnnnnnnnnnnnnnnnnnnnnnnnnnnnnnnnnnnnnnnnnnnnnnnnnnnnnnnnnnnnnnnnnnnnnnnnnnnnnnnnnnnnnnnnnnnnnnnnnnnnnnnnnnnnnnnnnnnnnnnnnnnnnnnnnnnnnnnnnnnnnnnnnnnnnnnnnnnnnnnnnnnnnnnnnnnnnnnnnnnnnnnnnnnnnnnnnnnnnnnnnnnnnnnnnnnnnnnnnnnnnnnnnnnnnnnnnnnnnnnnnnnnnnnnnnnnnnnnnnnnnnnnnnnnnnnnnnnnnnnnnnnnnnnnnnnnnnnnnnnnnnnnnnnnnnnnnnnnnnnnnnnnnnnnnnnnnnnnnnnnnnnnnnnnnnnnnnnnnnnnnnnnnnnnnnnnnnnnnnnnnnnnnnnnnnnnnnnnnnnnnnnnnnnnnnnnnnnnnnnnnnnnnnnnnnnnnnnnnnnnnnnnnnnnnnnnnnnnnnnnnnnnnnnnnnnnnnnnnnnnnnnnnnnnnnnnnnnnnnnnnnnnnnnnnnnnnnnnnnnnnnnnnnnnnnnnnnnnnnnnnnnnnnnnnnnnnnnnnnnnnnnnnnnnnnnnnnnnnnnnnnnnnnnnnnnnnnnnnnnnnnnnnnnnnnnnnnnnnnnnnnnnnnnnnnnnnnnnnnnnnnnnnnnnnnnnnnnnnnnnnnnnnnnnnnnnnnnnnnnnnnnnnnnnnnnnnnnnnnnnnnnnnnnnnnnnnnnnnnnnnnnnnnnnnnnnnnnnnnnnnnnnnnnnnnnnnnnnnnnnnnnnnnnnnnnnnnnnnnnnnnnnnnnnnnnnnnnnnnnnnnnnnnnnnnnnnnnnnnnnnnnnnnnnnnnnnnnnnnnnnnnnnnnnnnnnnnnnnnnnnnnnnnnnnnnnnnnnnnnnnnnnnnnnnnnnnnnnnnnnnnnnnnnnnnnnnnnnnnnnnnnnnnnnnnnnnnnnnnnnnnnnnnnnnnnnnnnnnnnnnnnnnnnnnnnnnnnnnnnnnnnnnnnnnnnnnnnnnnnnnnnnnnnnnnnnnnnnnnnnnnnnnnnnnnnnnnnnnnnnnnnnnnnnnnnnnnnnnnnnnnnnnnnnnnnnnnnnnnnnnnnnnnnnnnnnnnnnnnnnnnnnnnnnnnnnnnnnnnnnnnnnnnnnnnnnnnnnnnnnnnnnnnnnnnnnnnnnnnnnnnnnnnnnnnnnnnnnnnnnnnnnnnnnnnnnnnnnnnnnnnnnnnnnnnnnnnnnnnnnnnnnnnnnnnnnnnnnnnnnnnnnnnnnnnnnnnnnnnnnnnnnnnnnnnnnnnnnnnnnnnnnnnnnnnnnnnnnnnnnnnnnnnnnnnnnnnnnnnnnnnnnnnnnnnnnnnnnnnnnnnnnnnnnnnnnnnnnnnnnnnnnnnnnnnnnnnnnnnnnnnnnnnnnnnnnnnnnnnnnnnnnnnnnnnnnnnnnnnnnnnnnnnnnnnnnnnnnnnnnnnnnnnnnnnnnnnnnnnnnnnnnnnnnnnnnnnnnnnnnnnnnnnnnnnnnnnnnnnnnnnnnnnnnnnnnnnnnnnnnnnnnnnnnnnnnnnnnnnnnnnnnnnnnnnnnnnnnnnnnnnnnnnnnnnnnnnnnnnnnnnnnnnnnnnnnnnnnnnnnnnnnnnnnnnnnnnnnnnnnnnnnnnnnnnnnnnnnnnnnnnnnnnnnnnnnnnnnnnnnnnnnnnnnnnnnnnnnnnnnnnnnnnnnnnnnnnnnnnnnnnnnnnnnnnnnnnnnnnnnnnnnnnnnnnnnnnnnnnnnnnnnnnnnnnnnnnnnnnnnnnnnnnnnnnnnnnnnnnnnnnnnnnnnnnnnnnnnnnnnnnnnnnnnnnnnnnnnnnnnnnnnnnnnnnnnnnnnnnnnnnnnnnnnnnnnnnnnnnnnnnnnnnnnnnnnnnnnnnnnnnnnnnnnnnnnnnnnnnnnnnnnnnnnnnnnnnnnnnnnnnnnnnnnnnnnnnnnnnnnnnnnnnnnnnnnnnnnnnnnnnnnnnnnnnnnnnnnnnnnnnnnnnnnnnnnnnnnnnnnnnnnnnnnnnnnnnnnnnnnnnnnnnnnnnnnnnnnnnnnnnnnnnnnnnnnnnnnnnnnnnnnnnnnnnnnnnnnnnnnnnnnnnnnnnnnnnnnnnnnnnnnnnnnnnnnnnnnnnnnnnnnnnnnnnnnnnnnnnnnnnnnnnnnnnnnnnnnnnnnnnnnnnnnnnnnnnnnnnnnnnnnnnnnnnnnnnnnnnnnnnnnnnnnnnnnnnnnnnnnnnnnnnnnnnnnnnnnnnnnnnnnnnnnnnnnnnnnnnnnnnnnnnnnnnnnnnnnnnnnnnnnnnnnnnnnnnnnnnnnnnnnnnnnnnnnnnnnnnnnnnnnnnnnnnnnnnnnnnnnnnnnnnnnnnnnnnnnnnnnnnnnnnnnnnnnnnnnnnnnnnnnnnnnnnnnnnnnnnnnnnnnnnnnnnnnnnnnnnnnnnnnnnnnnnnnnnnnnnnnnnnnnnnnnnnnnnnnnnnnnnnnnnnnnnnnnnnnnnnnnnnnnnnnnnnnnnnnnnnnnnnnnnnnnnnnnnnnnnnnnnnnnnnnnnnnnnnnnnnnnnnnnnnnnnnnnnnnnnnnnnnnnnnnnnnnnnnnnnnnnnnnnnnnnnnnnnnnnnnnnnnnnnnnnnnnnnnnnnnnnnnnnnnnnnnnnnnnnnnnnnnnnnnnnnnnnnnnnnnnnnnnnnnnnnnnnnnnnnnnnnnnnnnnnnnnnnnnnnnnnnnnnnnnnnnnnnnnnnnnnnnnnnnnnnnnnnnnnnnnnnnnnnnnnnnnnnnnnnnnnnnnnnnnnnnnnnnnnnnnnnnnnnnnnnnnnnnnnnnnnnnnnnnnnnnnnnnnnnnnnnnnnnnnnnnnnnnnnnnnnnnnnnnnnnnnnnnnnnnnnnnnnnnnnnnnnnnnnnnnnnnnnnnnnnnnnnnnnnnnnnnnnnnnnnnnnnnnnnnnnnnnnnnnnnnnnnnnnnnnnnnnnnnnnnnnnnnnnnnnnnnnnnnnnnnnnnnnnnnnnnnnnnnnnnnnnnnnnnnnnnnnnnnnnnnnnnnnnnnnnnnnnnnnnnnnnnnnnnnnnnnnnnnnnnnnnnnnnnnnnnnnnnnnnnnnnnnnnnnnnnnnnnnnnnnnnnnnnnnnnnnnnnnnnnnnnnnnnnnnnnnnnnnnnnnnnnnnnnnnnnnnnnnnnnnnnnnnnnnnnnnnnnnnnnnnnnnnnnnnnnnnnnnnnnnnnnnnnnnnnnnnnnnnnnnnnnnnnnnnnnnnnnnnnnnnnnnnnnnnnnnnnnnnnnnnnnnnnnnnnnnnnnnnnnnnnnnnnnnnnnnnnnnnnnnnnnnnnnnnnnnnnnnnnnnnnnnnnnnnnnnnnnnnnnnnnnnnnnnnnnnnnnnnnnnnnnnnnnnnnnnnnnnnnnnnnnnnnnnnnnnnnnnnnnnnnnnnnnnnnnnnnnnnnnnnnnnnnnnnnnnnnnnnnnnnnnnnnnnnnnnnnnnnnnnnnnnnnnnnnnnnnnnnnnnnnnnnnnnnnnnnnnnnnnnnnnnnnnnnnnnnnnnnnnnnnnnnnnnnnnnnnnnnnnnnnnnnnnnnnnnnnnnnnnnnnnnnnnnnnnnnnnnnnnnnnnnnnnnnnnnnnnnnnnnnnnnnnnnnnnnnnnnnnnnnnnnnnnnnnnnnnnnnnnnnnnnnnnnnnnnnnnnnnnnnnnnnnnnnnnnnnnnnnnnnnnnnnnnnnnnnnnnnnnnnnnnnnnnnnnnnnnnnnnnnnnnnnnnnnnnnnnnnnnnnnnnnnnnnnnnnnnnnnnnnnnnnnnnnnnnnnnnnnnnnnnnnnnnnnnnnnnnnnnnnnnnnnnnnnnnnnnnnnnnnnnnnnnnnnnnnnnnnnnnnnnnnnnnnnnnnnnnnnnnnnnnnnnnnnnnnnnnnnnnnnnnnnnnnnnnnnnnnnnnnnnnnnnnnnnnnnnnnnnnnnnnnnnnnnnnnnnnnnnnnnnnnnnnnnnnnnnnnnnnnnnnnnnnnnnnnnnnnnnnnnnnnnnnnnnnnnnnnnnnnnnnnnnnnnnnnnnnnnnnnnnnnnnnnnnnnnnnnnnnnnnnnnnnnnnnnnnnnnnnnnnnnnnnnnnnnnnnnnnnnnnnnnnnnnnnnnnnnnnnnnnnnnnnnnnnnnnnnnnnnnnnnnnnnnnnnnnnnnnnnnnnnnnnnnnnnnnnnnnnnnnnnnnnnnnnnnnnnnnnnnnnnnnnnnnnnnnnnnnnnnnnnnnnnnnnnnnnnnnnnnnnnnnnnnnnnnnnnnnnnnnnnnnnnnnnnnnnnnnnnnnnnnnnnnnnnnnnnnnnnnnnnnnnnnnnnnnnnnnnnnnnnnnnnnnnnnnnnnnnnnnnnnnnnnnnnnnnnnnnnnnnnnnnnnnnnnnnnnnnnnnnnnnnnnnnnnnnnnnnnnnnnnnnnnnnnnnnnnnnnnnnnnnnnnnnnnnnnnnnnnnnnnnnnnnnnnnnnnnnnnnnnnnnnnnnnnnnnnnnnnnnnnnnnnnnnnnnnnnnnnnnnnnnnnnnnnnnnnnnnnnnnnnnnnnnnnnnnnnnnnnnnnnnnnnnnnnnnnnnnnnnnnnnnnnnnnnnnnnnnnnnnnnnnnnnnnnnnnnnnnnnnnnnnnnnnnnnnnnnnnnnnnnnnnnnnnnnnnnnnnnnnnnnnnnnnnnnnnnnnnnnnnnnnnnnnnnnnnnnnnnnnnnnnnnnnnnnnnnnnnnnnnnnnnnnnnnnnnnnnnnnnnnnnnnnnnnnnnnnnnnnnnnnnnnnnnnnnnnnnnnnnnnnnnnnnnnnnnnnnnnnnnnnnnnnnnnnnnnnnnnnnnnnnnnnnnnnnnnnnnnnnnnnnnnnnnnnnnnnnnnnnnnnnnnnnnnnnnnnnnnnnnnnnnnnnnnnnnnnnnnnnnnnnnnnnnnnnnnnnnnnnnnnnnnnnnnnnnnnnnnnnnnnnnnnnnnnnnnnnnnnnnnnnnnnnnnnnnnnnnnnnnnnnnnnnnnnnnnnnnnnnnnnnnnnnnnnnnnnnnnnnnnnnnnnnnnnnnnnnnnnnnnnnnnnnnnnnnnnnnnnnnnnnnnnnnnnnnnnnnnnnnnnnnnnnnnnnnnnnnnnnnnnnnnnnnnnnnnnnnnnnnnnnnnnnnnnnnnnnnnnnnnnnnnnnnnnnnnnnnnnnnnnnnnnnnnnnnnnnnnnnnnnnnnnnnnnnnnnnnnnnnnnnnnnnnnnnnnnnnnnnnnnnnnnnnnnnnnnnnnnnnnnnnnnnnnnnnnnnnnnnnnnnnnnnnnnnnnnnnnnnnnnnnnnnnnnnnnnnnnnnnnnnnnnnnnnnnnnnnnnnnnnnnnnnnnnnnnnnnnnnnnnnnnnnnnnnnnnnnnnnnnnnnnnnnnnnnnnnnnnnnnnnnnnnnnnnnnnnnnnnnnnnnnnnnnnnnnnnnnnnnnnnnnnnnnnnnnnnnnnnnnnnnnnnnnnnnnnnnnnnnnnnnnnnnnnnnnnnnnnnnnnnnnnnnnnnnnnnnnnnnnnnnnnnnnnnnnnnnnnnnnnnnnnnnnnnnnnnnnnnnnnnnnnnnnnnnnnnnnnnnnnnnnnnnnnnnnnnnnnnnnnnnnnnnnnnnnnnnnnnnnnnnnnnnnnnnnnnnnnnnnnnnnnnnnnnnnnnnnnnnnnnnnnnnnnnnnnnnnnnnnnnnnnnnnnnnnnnnnnnnnnnnnnnnnnnnnnnnnnnnnnnnnnnnnnnnnnnnnnnnnnnnnnnnnnnnnnnnnnnnnnnnnnnnnnnnnnnnnnnnnnnnnnnnnnnnnnnnnnnnnnnnnnnnnnnnnnnnnnnnnnnnnnnnnnnnnnnnnnnnnnnnnnnnnnnnnnnnnnnnnnnnnnnnnnnnnnnnnnnnnnnnnnnnnnnnnnnnnnnnnnnnnnnnnnnnnnnnnnnnnnnnnnnnnnnnnnnnnnnnnnnnnnnnnnnnnnnnnnnnnnnnnnnnnnnnnnnnnnnnnnnnnnnnnnnnnnnnnnnnnnnnnnnnnnnnnnnnnnnnnnnnnnnnnnnnnnnnnnnnnnnnnnnnnnnnnnnnnnnnnnnnnnnnnnnnnnnnnnnnnnnnnnnnnnnnnnnnnnnnnnnnnnnnnnnnnnnnnnnnnnnnnnnnnnnnnnnnnnnnnnnnnnnnnnnnnnnnnnnnnnnnnnnnnnnnnnnnnnnnnnnnnnnnnnnnnnnnnnnnnnnnnnnnnnnnnnnnnnnnnnnnnnnnnnnnnnnnnnnnnnnnnnnnnnnnnnnnnnnnnnnnnnnnnnnnnnnnnnnnnnnnnnnnnnnnnnnnnnnnnnnnnnnnnnnnnnnnnnnnnnnnnnnnnnnnnnnnnnnnnnnnnnnnnnnnnnnnnnnnnnnnnnnnnnnnnnnnnnnnnnnnnnnnnnnnnnnnnnnnnnnnnnnnnnnnnnnnnnnnnnnnnnnnnnnnnnnnnnnnnnnnnnnnnnnnnnnnnnnnnnnnnnnnnnnnnnnnnnnnnnnnnnnnnnnnnnnnnnnnnnnnnnnnnnnnnnnnnnnnnnnnnnnnnnnnnnnnnnnnnnnnnnnnnnnnnnnnnnnnnnnnnnnnnnnnnnnnnnnnnnnnnnnnnnnnnnnnnnnnnnnnnnnnnnnnnnnnnnnnnnnnnnnnnnnnnnnnnnnnnnnnnnnnnnnnnnnnnnnnnnnnnnnnnnnnnnnnnnnnnnnnnnnnnnnnnnnnnnnnnnnnnnnnnnnnnnnnnnnnnnnnnnnnnnnnnnnnnnnnnnnnnnnnnnnnnnnnnnnnnnnnnnnnnnnnnnnnnnnnnnnnnnnnnnnnnnnnnnnnnnnnnnnnnnnnnnnnnnnnnnnnnnnnnnnnnnnnnnnnnnnnnnnnnnnnnnnnnnnnnnnnnnnnnnnnnnnnnnnnnnnnnnnnnnnnnnnnnnnnnnnnnnnnnnnnnnnnnnnnnnnnnnnnnnnnnnnnnnnnnnnnnnnnnnnnnnnnnnnnnnnnnnnnnnnnnnnnnnnnnnnnnnnnnnnnnnnnnnnnnnnnnnnnnnnnnnnnnnnnnnnnnnnnnnnnnnnnnnnnnnnnnnnnnnnnnnnnnnnnnnnnnnnnnnnnnnnnnnnnnnnnnnnnnnnnnnnnnnnnnnnnnnnnnnnnnnnnnnnnnnnnnnnnnnnnnnnnnnnnnnnnnnnnnnnnnnnnnnnnnnnnnnnnnnnnnnnnnnnnnnnnnnnnnnnnnnnnnnnnnnnnnnnnnnnnnnnnnnnnnnnnnnnnnnnnnnnnnnnnnnnnnnnnnnnnnnnnnnnnnnnnnnnnnnnnnnnnnnnnnnnnnnnnnnnnnnnnnnnnnnnnnnnnnnnnnnnnnnnnnnnnnnnnnnnnnnnnnnnnnnnnnnnnnnnnnnnnnnnnnnnnnnnnnnnnnnnnnnnnnnnnnnnnnnnnnnnnnnnnnnnnnnnnnnnnnnnnnnnnnnnnnnnnnnnnnnnnnnnnnnnnnnnnnnnnnnnnnnnnnnnnnnnnnnnnnnnnnnnnnnnnnnnnnnnnnnnnnnnnnnnnnnnnnnnnnnnnnnnnnnnnnnnnnnnnnnnnnnnnnnnnnnnnnnnnnnnnnnnnnnnnnnnnnnnnnnnnnnnnnnnnnnnnnnnnnnnnnnnnnnnnnnnnnnnnnnnnnnnnnnnnnnnnnnnnnnnnnnnnnnnnnnnnnnnnnnnnnnnnnnnnnnnnnnnnnnnnnnnnnnnnnnnnnnnnnnnnnnnnnnnnnnnnnnnnnnnnnnnnnnnnnnnnnnnnnnnnnnnnnnnnnnnnnnnnnnnnnnnnnnnnnnnnnnnnnnnnnnnnnnnnnnnnnnnnnnnnnnnnnnnnnnnnnnnnnnnnnnnnnnnnnnnnnnnnnnnnnnnnnnnnnnnnnnnnnnnnnnnnnnnnnnnnnnnnnnnnnnnnnnnnnnnnnnnnnnnnnnnnnnnnnnnnnnnnnnnnnnnnnnnnnnnnnnnnnnnnnnnnnnnnnnnnnnnnnnnnnnnnnnnnnnnnnnnnnnnnnnnnnnnnnnnnnnnnnnnnnnnnnnnnnnnnnnnnnnnnnnnnnnnnnnnnnnnnnnnnnnnnnnnnnnnnnnnnnnnnnnnnnnnnnnnnnnnnnnnnnnnnnnnnnnnnnnnnnnnnnnnnnnnnnnnnnnnnnnnnnnnnnnnnnnnnnnnnnnnnnnnnnnnnnnnnnnnnnnnnnnnnnnnnnnnnnnnnnnnnnnnnnnnnnnnnnnnnnnnnnnnnnnnnnnnnnnnnnnnnnnnnnnnnnnnnnnnnnnnnnnnnnnnnnnnnnnnnnnnnnnnnnnnnnnnnnnnnnnnnnnnnnnnnnnnnnnnnnnnnnnnnnnnnnnnnnnnnnnnnnnnnnnnnnnnnnnnnnnnnnnnnnnnnnnnnnnnnnnnnnnnnnnnnnnnnnnnnnnnnnnnnnnnnnnnnnnnnnnnnnnnnnnnnnnnnnnnnnnnnnnnnnnnnnnnnnnnnnnnnnnnnnnnnnnnnnnnnnnnnnnnnnnnnnnnnnnnnnnnnnnnnnnnnnnnnnnnnnnnnnnnnnnnnnnnnnnnnnnnnnnnnnnnnnnnnnnnnnnnnnnnnnnnnnnnnnnnnnnnnnnnnnnnnnnnnnnnnnnnnnnnnnnnnnnnnnnnnnnnnnnnnnnnnnnnnnnnnnnnnnnnnnnnnnnnnnnnnnnnnnnnnnnnnnnnnnnnnnnnnnnnnnnnnnnnnnnnnnnnnnnnnnnnnnnnnnnnnnnnnnnnnnnnnnnnnnnnnnnnnnnnnnnnnnnnnnnnnnnnnnnnnnnnnnnnnnnnnnnnnnnnnnnnnnnnnnnnnnnnnnnnnnnnnnnnnnnnnnnnnnnnnnnnnnnnnnnnnnnnnnnnnnnnnnnnnnnnnnnnnnnnnnnnnnnnnnnnnnnnnnnnnnnnnnnnnnnnnnnnnnnnnnnnnnnnnnnnnnnnnnnnnnnnnnnnnnnnnnnnnnnnnnnnnnnnnnnnnnnnnnnnnnnnnnnnnnnnnnnnnnnnnnnnnnnnnnnnnnnnnnnnnnnnnnnnnnnnnnnnnnnnnnnnnnnnnnnnnnnnnnnnnnnnnnnnnnnnnnnnnnnnnnnnnnnnnnnnnnnnnnnnnnnnnnnnnnnnnnnnnnnnnnnnnnnnnnnnnnnnnnnnnnnnnnnnnnnnnnnnnnnnnnnnnnnnnnnnnnnnnnnnnnnnnnnnnnnnnnnnnnnnnnnnnnnnnnnnnnnnnnnnnnnnnnnnnnnnnnnnnnnnnnnnnnnnnnnnnnnnnnnnnnnnnnnnnnnnnnnnnnnnnnnnnnnnnnnnnnnnnnnnnnnnnnnnnnnnnnnnnnnnnnnnnnnnnnnnnnnnnnnnnnnnnnnnnnnnnnnnnnnnnnnnnnnnnnnnnnnnnnnnnnnnnnnnnnnnnnnnnnnnnnnnnnnnnnnnnnnnnnnnnnnnnnnnnnnnnnnnnnnnnnnnnnnnnnnnnnnnnnnnnnnnnnnnnnnnnnnnnnnnnnnnnnnnnnnnnnnnnnnnnnnnnnnnnnnnnnnnnnnnnnnnnnnnnnnnnnnnnnnnnnnnnnnnnnnnnnnnnnnnnnnnnnnnnnnnnnnnnnnnnnnnnnnnnnnnnnnnnnnnnnnnnnnnnnnnnnnnnnnnnnnnnnnnnnnnnnnnnnnnnnnnnnnnnnnnnnnnnnnnnnnnnnnnnnnnnnnnnnnnnnnnnnnnnnnnnnnnnnnnnnnnnnnnnnnnnnnnnnnnnnnnnnnnnnnnnnnnnnnnnnnnnnnnnnnnnnnnnnnnnnnnnnnnnnnnnnnnnnnnnnnnnnnnnnnnnnnnnnnnnnnnnnnnnnnnnnnnnnnnnnnnnnnnnnnnnnnnnnnnnnnnnnnnnnnnnnnnnnnnnnnnnnnnnnnnnnnnnnnnnnnnnnnnnnnnnnnnnnnnnnnnnnnnnnnnnnnnnnnnnnnnnnnnnnnnnnnnnnnnnnnnnnnnnnnnnnnnnnnnnnnnnnnnnnnnnnnnnnnnnnnnnnnnnnnnnnnnnnnnnnnnnnnnnnnnnnnnnnnnnnnnnnnnnnnnnnnnnnnnnnnnnnnnnnnnnnnnnnnnnnnnnnnnnnnnnnnnnnnnnnnnnnnnnnnnnnnnnnnnnnnnnnnnnnnnnnnnnnnnnnnnnnnnnnnnnnnnnnnnnnnnnnnnnnnnnnnnnnnnnnnnnnnnnnnnnnnnnnnnnnnnnnnnnnnnnnnnnnnnnnnnnnnnnnnnnnnnnnnnnnnnnnnnnnnnnnnnnnnnnnnnnnnnnnnnnnnnnnnnnnnnnnnnnnnnnnnnnnnnnnnnnnnnnnnnnnnnnnnnnnnnnnnnnnnnnnnnnnnnnnnnnnnnnnnnnnnnnnnnnnnnnnnnnnnnnnnnnnnnnnnnnnnnnnnnnnnnnnnnnnnnnnnnnnnnnnnnnnnnnnnnnnnnnnnnnnnnnnnnnnnnnnnnnnnnnnnnnnnnnnnnnnnnnnnnnnnnnnnnnnnnnnnnnnnnnnnnnnnnnnnnnnnnnnnnnnnnnnnnnnnnnnnnnnnnnnnnnnnnnnnnnnnnnnnnnnnnnnnnnnnnnnnnnnnnnnnnnnnnnnnnnnnnnnnnnnnnnnnnnnnnnnnnnnnnnnnnnnnnnnnnnnnnnnnnnnnnnnnnnnnnnnnnnnnnnnnnnnnnnnnnnnnnnnnnnnnnnnnnnnnnnnnnnnnnnnnnnnnnnnnnnnnnnnnnnnnnnnnnnnnnnnnnnnnnnnnnnnnnnnnnnnnnnnnnnnnnnnnnnnnnnnnnnnnnnnnnnnnnnnnnnnnnnnnnnnnnnnnnnnnnnnnnnnnnnnnnnnnnnnnnnnnnnnnnnnnnnnnnnnnnnnnnnnnnnnnnnnnnnnnnnnnnnnnnnnnnnnnnnnnnnnnnnnnnnnnnnnnnnnnnnnnnnnnnnnnnnnnnnnnnnnnnnnnnnnnnnnnnnnnnnnnnnnnnnnnnnnnnnnnnnnnnnnnnnnnnnnnnnnnnnnnnnnnnnnnnnnnnnnnnnnnnnnnnnnnnnnnnnnnnnnnnnnnnnnnnnnnnnnnnnnnnnnnnnnnnnnnnnnnnnnnnnnnnnnnnnnnnnnnnnnnnnnnnnnnnnnnnnnnnnnnnnnnnnnnnnnnnnnnnnnnnnnnnnnnnnnnnnnnnnnnnnnnnnnnnnnnnnnnnnnnnnnnnnnnnnnnnnnnnnnnnnnnnnnnnnnnnnnnnnnnnnnnnnnnnnnnnnnnnnnnnnnnnnnnnnnnnnnnnnnnnnnnnnnnnnnnnnnnnnnnnnnnnnnnnnnnnnnnnnnnnnnnnnnnnnnnnnnnnnnnnnnnnnnnnnnnnnnnnnnnnnnnnnnnnnnnnnnnnnnnnnnnnnnnnnnnnnnnnnnnnnnnnnnnnnnnnnnnnnnnnnnnnnnnnnnnnnnnnnnnnnnnnnnnnnnnnnnnnnnnnnnnnnnnnnnnnnnnnnnnnnnnnnnnnnnnnnnnnnnnnnnnnnnnnnnnnnnnnnnnnnnnnnnnnnnnnnnnnnnnnnnnnnnnnnnnnnnnnnnnnnnnnnnnnnnnnnnnnnnnnnnnnnnnnnnnnnnnnnnnnnnnnnnnnnnnnnnnnnnnnnnnnnnnnnnnnnnnnnnnnnnnnnnnnnnnnnnnnnnnnnnnnnnnnnnnnnnnnnnnnnnnnnnnnnnnnnnnnnnnnnnnnnnnnnnnnnnnnnnnnnnnnnnnnnnnnnnnnnnnnnnnnnnnnnnnnnnnnnnnnnnnnnnnnnnnnnnnnnnnnnnnnnnnnnnnnnnnnnnnnnnnnnnnnnnnnnnnnnnnnnnnnnnnnnnnnnnnnnnnnnnnnnnnnnnnnnnnnnnnnnnnnnnnnnnnnnnnnnnnnnnnnnnnnnnnnnnnnnnnnnnnnnnnnnnnnnnnnnnnnnnnnnnnnnnnnnnnnnnnnnnnnnnnnnnnnnnnnnnnnnnnnnnnnnnnnnnnnnnnnnnnnnnnnnnnnnnnnnnnnnnnnnnnnnnnnnnnnnnnnnnnnnnnnnnnnnnnnnnnnnnnnnnnnnnnnnnnnnnnnnnnnnnnnnnnnnnnnnnnnnnnnnnnnnnnnnnnnnnnnnnnnnnnnnnnnnnnnnnnnnnnnnnnnnnnnnnnnnnnnnnnnnnnnnnnnnnnnnnnnnnnnnnnnnnnnnnnnnnnnnnnnnnnnnnnnnnnnnnnnnnnnnnnnnnnnnnnnnnnnnnnnnnnnnnnnnnnnnnnnnnnnnnnnnnnnnnnnnnnnnnnnnnnnnnnnnnnnnnnnnnnnnnnnnnnnnnnnnnnnnnnnnnnnnnnnnnnnnnnnnnnnnnnnnnnnnnnnnnnnnnnnnnnnnnnnnnnnnnnnnnnnnnnnnnnnnnnnnnnnnnnnnnnnnnnnnnnnnnnnnnnnnnnnnnnnnnnnnnnnnnnnnnnnnnnnnnnnnnnnnnnnnnnnnnnnnnnnnnnnnnnnnnnnnnnnnnnnnnnnnnnnnnnnnnnnnnnnnnnnnnnnnnnnnnnnnnnnnnnnnnnnnnnnnnnnnnnnnnnnnnnnnnnnnnnnnnnnnnnnnnnnnnnnnnnnnnnnnnnnnnnnnnnnnnnnnnnnnnnnnnnnnnnnnnnnnnnnnnnnnnnnnnnnnnnnnnnnnnnnnnnnnnnnnnnnnnnnnnnnnnnnnnnnnnnnnnnnnnnnnnnnnnnnnnnnnnnnnnnnnnnnnnnnnnnnnnnnnnnnnnnnnnnnnnnnnnnnnnnnnnnnnnnnnnnnnnnnnnnnnnnnnnnnnnnnnnnnnnnnnnnnnnnnnnnnnnnnnnnnnnnnnnnnnnnnnnnnnnnnnnnnnnnnnnnnnnnnnnnnnnnnnnnnnnnnnnnnnnnnnnnnnnnnnnnnnnnnnnnnnnnnnnnnnnnnnnnnnnnnnnnnnnnnnnnnnnnnnnnnnnnnnnnnnnnnnnnnnnnnnnnnnnnnnnnnnnnnnnnnnnnnnnnnnnnnnnnnnnnnnnnnnnnnnnnnnnnnnnnnnnnnnnnnnnnnnnnnnnnnnnnnnnnnnnnnnnnnnnnnnnnnnnnnnnnnnnnnnnnnnnnnnnnnnnnnnnnnnnnnnnnnnnnnnnnnnnnnnnnnnnnnnnnnnnnnnnnnnnnnnnnnnnnnnnnnnnnnnnnnnnnnnnnnnnnnnnnnnnnnnnnnnnnnnnnnnnnnnnnnnnnnnnnnnnnnnnnnnnnnnnnnnnnnnnnnnnnnnnnnnnnnnnnnnnnnnnnnnnnnnnnnnnnnnnnnnnnnnnnnnnnnnnnnnnnnnnnnnnnnnnnnnnnnnnnnnnnnnnnnnnnnnnnnnnnnnnnnnnnnnnnnnnnnnnnnnnnnnnnnnnnnnnnnnnnnnnnnnnnnnnnnnnnnnnnnnnnnnnnnnnnnnnnnnnnnnnnnnnnnnnnnnnnnnnnnnnnnnnnnnnnnnnnnnnnnnnnnnnnnnnnnnnnnnnnnnnnnnnnnnnnnnnnnnnnnnnnnnnnnnnnnnnnnnnnnnnnnnnnnnnnnnnnnnnnnnnnnnnnnnnnnnnnnnnnnnnnnnnnnnnnnnnnnnnnnnnnnnnnnnnnnnnnnnnnnnnnnnnnnnnnnnnnnnnnnnnnnnnnnnnnnnnnnnnnnnnnnnnnnnnnnnnnnnnnnnnnnnnnnnnnnnnnnnnnnnnnnnnnnnnnnnnnnnnnnnnnnnnnnnnnnnnnnnnnnnnnnnnnnnnnnnnnnnnnnnnnnnnnnnnnnnnnnnnnnnnnnnnnnnnnnnnnnnnnnnnnnnnnnnnnnnnnnnnnnnnnnnnnnnnnnnnnnnnnnnnnnnnnnnnnnnnnnnnnnnnnnnnnnnnnnnnnnnnnnnnnnnnnnnnnnnnnnnnnnnnnnnnnnnnnnnnnnnnnnnnnnnnnnnnnnnnnnnnnnnnnnnnnnnnnnnnnnnnnnnnnnnnnnnnnnnnnnnnnnnnnnnnnnnnnnnnnnnnnnnnnnnnnnnnnnnnnnnnnnnnnnnnnnnnnnnnnnnnnnnnnnnnnnnnnnnnnnnnnnnnnnnnnnnnnnnnnnnnnnnnnnnnnnnnnnnnnnnnnnnnnnnnnnnnnnnnnnnnnnnnnnnnnnnnnnnnnnnnnnnnnnnnnnnnnnnnnnnnnnnnnnnnnnnnnnnnnnnnnnnnnnnnnnnnnnnnnnnnnnnnnnnnnnnnnnnnnnnnnnnnnnnnnnnnnnnnnnnnnnnnnnnnnnnnnnnnnnnnnnnnnnnnnnnnnnnnnnnnnnnnnnnnnnnnnnnnnnnnnnnnnnnnnnnnnnnnnnnnnnnnnnnnnnnnnnnnnnnnnnnnnnnnnnnnnnnnnnnnnnnnnnnnnnnnnnnnnnnnnnnnnnnnnnnnnnnnnnnnnnnnnnnnnnnnnnnnnnnnnnnnnnnnnnnnnnnnnnnnnnnnnnnnnnnnnnnnnnnnnnnnnnnnnnnnnnnnnnnnnnnnnnnnnnnnnnnnnnnnnnnnnnnnnnnnnnnnnnnnnnnnnnnnnnnnnnnnnnnnnnnnnnnnnnnnnnnnnnnnnnnnnnnnnnnnnnnnnnnnnnnnnnnnnnnnnnnnnnnnnnnnnnnnnnnnnnnnnnnnnnnnnnnnnnnnnnnnnnnnnnnnnnnnnnnnnnnnnnnnnnnnnnnnnnnnnnnnnnnnnnnnnnnnnnnnnnnnnnnnnnnnnnnnnnnnnnnnnnnnnnnnnnnnnnnnnnnnnnnnnnnnnnnnnnnnnnnnnnnnnnnnnnnnnnnnnnnnnnnnnnnnnnnnnnnnnnnnnnnnnnnnnnnnnnnnnnnnnnnnnnnnnnnnnnnnnnnnnnnnnnnnnnnnnnnnnnnnnnnnnnnnnnnnnnnnnnnnnnnnnnnnnnnnnnnnnnnnnnnnnnnnnnnnnnnnnnnnnnnnnnnnnnnnnnnnnnnnnnnnnnnnnnnnnnnnnnnnnnnnnnnnnnnnnnnnnnnnnnnnnnnnnnnnnnnnnnnnnnnnnnnnnnnnnnnnnnnnnnnnnnnnnnnnnnnnnnnnnnnnnnnnnnnnnnnnnnnnnnnnnnnnnnnnnnnnnnnnnnnnnnnnnnnnnnnnnnnnnnnnnnnnnnnnnnnnnnnnnnnnnnnnnnnnnnnnnnnnnnnnnnnnnnnnnnnnnnnnnnnnnnnnnnnnnnnnnnnnnnnnnnnnnnnnnnnnnnnnnnnnnnnnnnnnnnnnnnnnnnnnnnnnnnnnnnnnnnnnnnnnnnnnnnnnnnnnnnnnnnnnnnnnnnnnnnnnnnnnnnnnnnnnnnnnnnnnnnnnnnnnnnnnnnnnnnnnnnnnnnnnnnnnnnnnnnnnnnnnnnnnnnnnnnnnnnnnnnnnnnnnnnnnnnnnnnnnnnnnnnnnnnnnnnnnnnnnnnnnnnnnnnnnnnnnnnnnnnnnnnnnnnnnnnnnnnnnnnnnnnnnnnnnnnnnnnnnnnnnnnnnnnnnnnnnnnnnnnnnnnnnnnnnnnnnnnnnnnnnnnnnnnnnnnnnnnnnnnnnnnnnnnnnnnnnnnnnnnnnnnnnnnnnnnnnnnnnnnnnnnnnnnnnnnnnnnnnnnnnnnnnnnnnnnnnnnnnnnnnnnnnnnnnnnnnnnnnnnnnnnnnnnnnnnnnnnnnnnnnnnnnnnnnnnnnnnnnnnnnnnnnnnnnnnnnnnnnnnnnnnnnnnnnnnnnnnnnnnnnnnnnnnnnnnnnnnnnnnnnnnnnnnnnnnnnnnnnnnnnnnnnnnnnnnnnnnnnnnnnnnnnnnnnnnnnnnnnnnnnnnnnnnnnnnnnnnnnnnnnnnnnnnnnnnnnnnnnnnnnnnnnnnnnnnnnnnnnnnnnnnnnnnnnnnnnnnnnnnnnnnnnnnnnnnnnnnnnnnnnnnnnnnnnnnnnnnnnnnnnnnnnnnnnnnnnnnnnnnnnnnnnnnnnnnnnnnnnnnnnnnnnnnnnnnnnnnnnnnnnnnnnnnnnnnnnnnnnnnnnnnnnnnnnnnnnnnnnnnnnnnnnnnnnnnnnnnnnnnnnnnnnnnnnnnnnnnnnnnnnnnnnnnnnnnnnnnnnnnnnnnnnnnnnnnnnnnnnnnnnnnnnnnnnnnnnnnnnnnnnnnnnnnnnnnnnnnnnnnnnnnnnnnnnnnnnnnnnnnnnnnnnnnnnnnnnnnnnnnnnnnnnnnnnnnnnnnnnnnnnnnnnnnnnnnnnnnnnnnnnnnnnnnnnnnnnnnnnnnnnnnnnnnnnnnnnnnnnnnnnnnnnnnnnnnnnnnnnnnnnnnnnnnnnnnnnnnnnnnnnnnnnnnnnnnnnnnnnnnnnnnnnnnnnnnnnnnnnnnnnnnnnnnnnnnnnnnnnnnnnnnnnnnnnnnnnnnnnnnnnnnnnnnnnnnnnnnnnnnnnnnnnnnnnnnnnnnnnnnnnnnnnnnnnnnnnnnnnnnnnnnnnnnnnnnnnnnnnnnnnnnnnnnnnnnnnnnnnnnnnnnnnnnnnnnnnnnnnnnnnnnnnnnnnnnnnnnnnnnnnnnnnnnnnnnnnnnnnnnnnnnnnnnnnnnnnnnnnnnnnnnnnnnnnnnnnnnnnnnnnnnnnnnnnnnnnnnnnnnnnnnnnnnnnnnnnnnnnnnnnnnnnnnnnnnnnnnnnnnnnnnnnnnnnnnnnnnnnnnnnnnnnnnnnnnnnnnnnnnnnnnnnnnnnnnnnnnnnnnnnnnnnnnnnnnnnnnnnnnnnnnnnnnnnnnnnnnnnnnnnnnnnnnnnnnnnnnnnnnnnnnnnnnnnnnnnnnnnnnnnnnnnnnnnnnnnnnnnnnnnnnnnnnnnnnnnnnnnnnnnnnnnnnnnnnnnnnnnnnnnnnnnnnnnnnnnnnnnnnnnnnnnnnnnnnnnnnnnnnnnnnnnnnnnnnnnnnnnnnnnnnnnnnnnnnnnnnnnnnnnnnnnnnnnnnnnnnnnnnnnnnnnnnnnnnnnnnnnnnnnnnnnnnnnnnnnnnnnnnnnnnnnnnnnnnnnnnnnnnnnnnnnnnnnnnnnnnnnnnnnnnnnnnnnnnnnnnnnnnnnnnnnnnnnnnnnnnnnnnnnnnnnnnnnnnnnnnnnnnnnnnnnnnnnnnnnnnnnnnnnnnnnnnnnnnnnnnnnnnnnnnnnnnnnnnnnnnnnnnnnnnnnnnnnnnnnnnnnnnnnnnnnnnnnnnnnnnnnnnnnnnnnnnnnnnnnnnnnnnnnnnnnnnnnnnnnnnnnnnnnnnnnnnnnnnnnnnnnnnnnnnnnnnnnnnnnnnnnnnnnnnnnnnnnnnnnnnnnnnnnnnnnnnnnnnnnnnnnnnnnnnnnnnnnnnnnnnnnnnnnnnnnnnnnnnnnnnnnnnnnnnnnnnnnnnnnnnnnnnnnnnnnnnnnnnnnnnnnnnnnnnnnnnnnnnnnnnnnnnnnnnnnnnnnnnnnnnnnnnnnnnnnnnnnnnnnnnnnnnnnnnnnnnnnnnnnnnnnnnnnnnnnnnnnnnnnnnnnnnnnnnnnnnnnnnnnnnnnnnnnnnnnnnnnnnnnnnnnnnnnnnnnnnnnnnnnnnnnnnnnnnnnnnnnnnnnnnnnnnnnnnnnnnnnnnnnnnnnnnnnnnnnnnnnnnnnnnnnnnnnnnnnnnnnnnnnnnnnnnnnnnnnnnnnnnnnnnnnnnnnnnnnnnnnnnnnnnnnnnnnnnnnnnnnnnnnnnnnnnnnnnnnnnnnnnnnnnnnnnnnnnnnnnnnnnnnnnnnnnnnnnnnnnnnnnnnnnnnnnnnnnnnnnnnnnnnnnnnnnnnnnnnnnnnnnnnnnnnnnnnnnnnnnnnnnnnnnnnnnnnnnnnnnnnnnnnnnnnnnnnnnnnnnnnnnnnnnnnnnnnnnnnnnnnnnnnnnnnnnnnnnnnnnnnnnnnnnnnnnnnnnnnnnnnnnnnnnnnnnnnnnnnnnnnnnnnnnnnnnnnnnnnnnnnnnnnnnnnnnnnnnnnnnnnnnnnnnnnnnnnnnnnnnnnnnnnnnnnnnnnnnnnnnnnnnnnnnnnnnnnnnnnnnnnnnnnnnnnnnnnnnnnnnnnnnnnnnnnnnnnnnnnnnnnnnnnnnnnnnnnnnnnnnnnnnnnnnnnnnnnnnnnnnnnnnnnnnnnnnnnnnnnnnnnnnnnnnnnnnnnnnnnnnnnnnnnnnnnnnnnnnnnnnnnnnnnnnnnnnnnnnnnnnnnnnnnnnnnnnnnnnnnnnnnnnnnnnnnnnnnnnnnnnnnnnnnnnnnnnnnnnnnnnnnnnnnnnnnnnnnnnnnnnnnnnnnnnnnnnnnnnnnnnnnnnnnnnnnnnnnnnnnnnnnnnnnnnnnnnnnnnnnnnnnnnnnnnnnnnnnnnnnnnnnnnnnnnnnnnnnnnnnnnnnnnnnnnnnnnnnnnnnnnnnnnnnnnnnnnnnnnnnnnnnnnnnnnnnnnnnnnnnnnnnnnnnnnnnnnnnnnnnnnnnnnnnnnnnnnnnnnnnnnnnnnnnnnnnnnnnnnnnnnnnnnnnnnnnnnnnnnnnnnnnnnnnnnnnnnnnnnnnnnnnnnnnnnnnnnnnnnnnnnnnnnnnnnnnnnnnnnnnnnnnnnnnnnnnnnnnnnnnnnnnnnnnnnnnnnnnnnnnnnnnnnnnnnnnnnnnnnnnnnnnnnnnnnnnnnnnnnnnnnnnnnnnnnnnnnnnnnnnnnnnnnnnnnnnnnnnnnnnnnnnnnnnnnnnnnnnnnnnnnnnnnnnnnnnnnnnnnnnnnnnnnnnnnnnnnnnnnnnnnnnnnnnnnnnnnnnnnnnnnnnnnnnnnnnnnnnnnnnnnnnnnnnnnnnnnnnnnnnnnnnnnnnnnnnnnnnnnnnnnnnnnnnnnnnnnnnnnnnnnnnnnnnnnnnnnnnnnnnnnnnnnnnnnnnnnnnnnnnnnnnnnnnnnnnnnnnnnnnnnnnnnnnnnnnnnnnnnnnnnnnnnnnnnnnnnnnnnnnnnnnnnnnnnnnnnnnnnnnnnnnnnnnnnnnnnnnnnnnnnnnnnnnnnnnnnnnnnnnnnnnnnnnnnnnnnnnnnnnnnnnnnnnnnnnnnnnnnnnnnnnnnnnnnnnnnnnnnnnnnnnnnnnnnnnnnnnnnnnnnnnnnnnnnnnnnnnnnnnnnnnnnnnnnnnnnnnnnnnnnnnnnnnnnnnnnnnnnnnnnnnnnnnnnnnnnnnnnnnnnnnnnnnnnnnnnnnnnnnnnnnnnnnnnnnnnnnnnnnnnnnnnnnnnnnnnnnnnnnnnnnnnnnnnnnnnnnnnnnnnnnnnnnnnnnnnnnnnnnnnnnnnnnnnnnnnnnnnnnnnnnnnnnnnnnnnnnnnnnnnnnnnnnnnnnnnnnnnnnnnnnnnnnnnnnnnnnnnnnnnnnnnnnnnnnnnnnnnnnnnnnnnnnnnnnnnnnnnnnnnnnnnnnnnnnnnnnnnnnnnnnnnnnnnnnnnnnnnnnnnnnnnnnnnnnnnnnnnnnnnnnnnnnnnnnnnnnnnnnnnnnnnnnnnnnnnnnnnnnnnnnnnnnnnnnnnnnnnnnnnnnnnnnnnnnnnnnnnnnnnnnnnnnnnnnnnnnnnnnnnnnnnnnnnnnnnnnnnnnnnnnnnnnnnnnnnnnnnnnnnnnnnnnnnnnnnnnnnnnnnnnnnnnnnnnnnnnnnnnnnnnnnnnnnnnnnnnnnnnnnnnnnnnnnnnnnnnnnnnnnnnnnnnnnnnnnnnnnnnnnnnnnnnnnnnnnnnnnnnnnnnnnnnnnnnnnnnnnnnnnnnnnnnnnnnnnnnnnnnnnnnnnnnnnnnnnnnnnnnnnnnnnnnnnnnnnnnnnnnnnnnnnnnnnnnnnnnnnnnnnnnnnnnnnnnnnnnnnnnnnnnnnnnnnnnnnnnnnnnnnnnnnnnnnnnnnnnnnnnnnnnnnnnnnnnnnnnnnnnnnnnnnnnnnnnnnnnnnnnnnnnnnnnnnnnnnnnnnnnnnnnnnnnnnnnnnnnnnnnnnnnnnnnnnnnnnnnnnnnnnnnnnnnnnnnnnnnnnnnnnnnnnnnnnnnnnnnnnnnnnnnnnnnnnnnnnnnnnnnnnnnnnnnnnnnnnnnnnnnnnnnnnnnnnnnnnnnnnnnnnnnnnnnnnnnnnnnnnnnnnnnnnnnnnnnnnnnnnnnnnnnnnnnnnnnnnnnnnnnnnnnnnnnnnnnnnnnnnnnnnnnnnnnnnnnnnnnnnnnnnnnnnnnnnnnnnnnnnnnnnnnnnnnnnnnnnnnnnnnnnnnnnnnnnnnnnnnnnnnnnnnnnnnnnnnnnnnnnnnnnnnnnnnnnnnnnnnnnnnnnnnnnnnnnnnnnnnnnnnnnnnnnnnnnnnnnnnnnnnnnnnnnnnnnnnnnnnnnnnnnnnnnnnnnnnnnnnnnnnnnnnnnnnnnnnnnnnnnnnnnnnnnnnnnnnnnnnnnnnnnnnnnnnnnnnnnnnnnnnnnnnnnnnnnnnnnnnnnnnnnnnnnnnnnnnnnnnnnnnnnnnnnnnnnnnnnnnnnnnnnnnnnnnnnnnnnnnnnnnnnnnnnnnnnnnnnnnnnnnnnnnnnnnnnnnnnnnnnnnnnnnnnnnnnnnnnnnnnnnnnnnnnnnnnnnnnnnnnnnnnnnnnnnnnnnnnnnnnnnnnnnnnnnnnnnnnnnnnnnnnnnnnnnnnnnnnnnnnnnnnnnnnnnnnnnnnnnnnnnnnnnnnnnnnnnnnnnnnnnnnnnnnnnnnnnnnnnnnnnnnnnnnnnnnnnnnnnnnnnnnnnnnnnnnnnnnnnnnnnnnnnnnnnnnnnnnnnnnnnnnnnnnnnnnnnnnnnnnnnnnnnnnnnnnnnnnnnnnnnnnnnnnnnnnnnnnnnnnnnnnnnnnnnnnnnnnnnnnnnnnnnnnnnnnnnnnnnnnnnnnnnnnnnnnnnnnnnnnnnnnnnnnnnnnnnnnnnnnnnnnnnnnnnnnnnnnnnnnnnnnnnnnnnnnnnnnnnnnnnnnnnnnnnnnnnnnnnnnnnnnnnnnnnnnnnnnnnnnnnnnnnnnnnnnnnnnnnnnnnnnnnnnnnnnnnnnnnnnnnnnnnnnnnnnnnnnnnnnnnnnnnnnnnnnnnnnnnnnnnnnnnnnnnnnnnnnnnnnnnnnnnnnnnnnnnnnnnnnnnnnnnnnnnnnnnnnnnnnnnnnnnnnnnnnnnnnnnnnnnnnnnnnnnnnnnnnnnnnnnnnnnnnnnnnnnnnnnnnnnnnnnnnnnnnnnnnnnnnnnnnnnnnnnnnnnnnnnnnnnnnnnnnnnnnnnnnnnnnnnnnnnnnnnnnnnnnnnnnnnnnnnnnnnnnnnnnnnnnnnnnnnnnnnnnnnnnnnnnnnnnnnnnnnnnnnnnnnnnnnnnnnnnnnnnnnnnnnnnnnnnnnnnnnnnnnnnnnnnnnnnnnnnnnnnnnnnnnnnnnnnnnnnnnnnnnnnnnnnnnnnnnnnnnnnnnnnnnnnnnnnnnnnnnnnnnnnnnnnnnnnnnnnnnnnnnnnnnnnnnnnnnnnnnnnnnnnnnnnnnnnnnnnnnnnnnnnnnnnnnnnnnnnnnnnnnnnnnnnnnnnnnnnnnnnnnnnnnnnnnnnnnnnnnnnnnnnnnnnnnnnnnnnnnnnnnnnnnnnnnnnnnnnnnnnnnnnnnnnnnnnnnnnnnnnnnnnnnnnnnnnnnnnnnnnnnnnnnnnnnnnnnnnnnnnnnnnnnnnnnnnnnnnnnnnnnnnnnnnnnnnnnnnnnnnnnnnnnnnnnnnnnnnnnnnnnnnnnnnnnnnnnnnnnnnnnnnnnnnnnnnnnnnnnnnnnnnnnnnnnnnnnnnnnnnnnnnnnnnnnnnnnnnnnnnnnnnnnnnnnnnnnnnnnnnnnnnnnnnnnnnnnnnnnnnnnnnnnnnnnnnnnnnnnnnnnnnnnnnnnnnnnnnnnnnnnnnnnnnnnnnnnnnnnnnnnnnnnnnnnnnnnnnnnnnnnnnnnnnnnnnnnnnnnnnnnnnnnnnnnnnnnnnnnnnnnnnnnnnnnnnnnnnnnnnnnnnnnnnnnnnnnnnnnnnnnnnnnnnnnnnnnnnnnnnnnnnnnnnnnnnnnnnnnnnnnnnnnnnnnnnnnnnnnnnnnnnnnnnnnnnnnnnnnnnnnnnnnnnnnnnnnnnnnnnnnnnnnnnnnnnnnnnnnnnnnnnnnnnnnnnnnnnnnnnnnnnnnnnnnnnnnnnnnnnnnnnnnnnnnnnnnnnnnnnnnnnnnnnnnnnnnnnnnnnnnnnnnnnnnnnnnnnnnnnnnnnnnnnnnnnnnnnnnnnnnnnnnnnnnnnnnnnnnnnnnnnnnnnnnnnnnnnnnnnnnnnnnnnnnnnnnnnnnnnnnnnnnnnnnnnnnnnnnnnnnnnnnnnnnnnnnnnnnnnnnnnnnnnnnnnnnnnnnnnnnnnnnnnnnnnnnnnnnnnnnnnnnnnnnnnnnnnnnnnnnnnnnnnnnnnnnnnnnnnnnnnnnnnnnnnnnnnnnnnnnnnnnnnnnnnnnnnnnnnnnnnnnnnnnnnnnnnnnnnnnnnnnnnnnnnnnnnnnnnnnnnnnnnnnnnnnnnnnnnnnnnnnnnnnnnnnnnnnnnnnnnnnnnnnnnnnnnnnnnnnnnnnnnnnnnnnnnnnnnnnnnnnnnnnnnnnnnnnnnnnnnnnnnnnnnnnnnnnnnnnnnnnnnnnnnnnnnnnnnnnnnnnnnnnnnnnnnnnnnnnnnnnnnnnnnnnnnnnnnnnnnnnnnnnnnnnnnnnnnnnnnnnnnnnnnnnnnnnnnnnnnnnnnnnnnnnnnnnnnnnnnnnnnnnnnnnnnnnnnnnnnnnnnnnnnnnnnnnnnnnnnnnnnnnnnnnnnnnnnnnnnnnnnnnnnnnnnnnnnnnnnnnnnnnnnnnnnnnnnnnnnnnnnnnnnnnnnnnnnnnnnnnnnnnnnnnnnnnnnnnnnnnnnnnnnnnnnnnnnnnnnnnnnnnnnnnnnnnnnnnnnnnnnnnnnnnnnnnnnnnnnnnnnnnnnnnnnnnnnnnnnnnnnnnnnnnnnnnnnnnnnnnnnnnnnnnnnnnnnnnnnnnnnnnnnnnnnnnnnnnnnnnnnnnnnnnnnnnnnnnnnnnnnnnnnnnnnnnnnnnnnnnnnnnnnnnnnnnnnnnnnnnnnnnnnnnnnnnnnnnnnnnnnnnnnnnnnnnnnnnnnnnnnnnnnnnnnnnnnnnnnnnnnnnnnnnnnnnnnnnnnnnnnnnnnnnnnnnnnnnnnnnnnnnnnnnnnnnnnnnnnnnnnnnnnnnnnnnnnnnnnnnnnnnnnnnnnnnnnnnnnnnnnnnnnnnnnnnnnnnnnnnnnnnnnnnnnnnnnnnnnnnnnnnnnnnnnnnnnnnnnnnnnnnnnnnnnnnnnnnnnnnnnnnnnnnnnnnnnnnnnnnnnnnnnnnnnnnnnnnnnnnnnnnnnnnnnnnnnnnnnnnnnnnnnnnnnnnnnnnnnnnnnnnnnnnnnnnnnnnnnnnnnnnnnnnnnnnnnnnnnnnnnnnnnnnnnnnnnnnnnnnnnnnnnnnnnnnnnnnnnnnnnnnnnnnnnnnnnnnnnnnnnnnnnnnnnnnnnnnnnnnnnnnnnnnnnnnnnnnnnnnnnnnnnnnnnnnnnnnnnnnnnnnnnnnnnnnnnnnnnnnnnnnnnnnnnnnnnnnnnnnnnnnnnnnnnnnnnnnnnnnnnnnnnnnnnnnnnnnnnnnnnnnnnnnnnnnnnnnnnnnnnnnnnnnnnnnnnnnnnnnnnnnnnnnnnnnnnnnnnnnnnnnnnnnnnnnnnnnnnnnnnnnnnnnnnnnnnnnnnnnnnnnnnnnnnnnnnnnnnnnnnnnnnnnnnnnnnnnnnnnnnnnnnnnnnnnnnnnnnnnnnnnnnnnnnnnnnnnnnnnnnnnnnnnnnnnnnnnnnnnnnnnnnnnnnnnnnnnnnnnnnnnnnnnnnnnnnnnnnnnnnnnnnnnnnnnnnnnnnnnnnnnnnnnnnnnnnnnnnnnnnnnnnnnnnnnnnnnnnnnnnnnnnnnnnnnnnnnnnnnnnnnnnnnnnnnnnnnnnnnnnnnnnnnnnnnnnnnnnnnnnnnnnnnnnnnnnnnnnnnnnnnnnnnnnnnnnnnnnnnnnnnnnnnnnnnnnnnnnnnnnnnnnnnnnnnnnnnnnnnnnnnnnnnnnnnnnnnnnnnnnnnnnnnnnnnnnnnnnnnnnnnnnnnnnnnnnnnnnnnnnnnnnnnnnnnnnnnnnnnnnnnnnnnnnnnnnnnnnnnnnnnnnnnnnnnnnnnnnnnnnnnnnnnnnnnnnnnnnnnnnnnnnnnnnnnnnnnnnnnnnnnnnnnnnnnnnnnnnnnnnnnnnnnnnnnnnnnnnnnnnnnnnnnnnnnnnnnnnnnnnnnnnnnnnnnnnnnnnnnnnnnnnnnnnnnnnnnnnnnnnnnnnnnnnnnnnnnnnnnnnnnnnnnnnnnnnnnnnnnnnnnnnnnnnnnnnnnnnnnnnnnnnnnnnnnnnnnnnnnnnnnnnnnnnnnnnnnnnnnnnnnnnnnnnnnnnnnnnnnnnnnnnnnnnnnnnnnnnnnnnnnnnnnnnnnnnnnnnnnnnnnnnnnnnnnnnnnnnnnnnnnnnnnnnnnnnnnnnnnnnnnnnnnnnnnnnnnnnnnnnnnnnnnnnnnnnnnnnnnnnnnnnnnnnnnnnnnnnnnnnnnnnnnnnnnnnnnnnnnnnnnnnnnnnnnnnnnnnnnnnnnnnnnnnnnnnnnnnnnnnnnnnnnnnnnnnnnnnnnnnnnnnnnnnnnnnnnnnnnnnnnnnnnnnnnnnnnnnnnnnnnnnnnnnnnnnnnnnnnnnnnnnnnnnnnnnnnnnnnnnnnnnnnnnnnnnnnnnnnnnnnnnnnnnnnnnnnnnnnnnnnnnnnnnnnnnnnnnnnnnnnnnnnnnnnnnnnnnnnnnnnnnnnnnnnnnnnnnnnnnnnnnnnnnnnnnnnnnnnnnnnnnnnnnnnnnnnnnnnnnnnnnnnnnnnnnnnnnnnnnnnnnnnnnnnnnnnnnnnnnnnnnnnnnnnnnnnnnnnnnnnnnnnnnnnnnnnnnnnnnnnnnnnnnnnnnnnnnnnnnnnnnnnnnnnnnnnnnnnnnnnnnnnnnnnnnnnnnnnnnnnnnnnnnnnnnnnnnnnnnnnnnnnnnnnnnnnnnnnnnnnnnnnnnnnnnnnnnnnnnnnnnnnnnnnnnnnnnnnnnnnnnnnnnnnnnnnnnnnnnnnnnnnnnnnnnnnnnnnnnnnnnnnnnnnnnnnnnnnnnnnnnnnnnnnnnnnnnnnnnnnnnnnnnnnnnnnnnnnnnnnnnnnnnnnnnnnnnnnnnnnnnnnnnnnnnnnnnnnnnnnnnnnnnnnnnnnnnnnnnnnnnnnnnnnnnnnnnnnnnnnnnnnnnnnnnnnnnnnnnnnnnnnnnnnnnnnnnnnnnnnnnnnnnnnnnnnnnnnnnnnnnnnnnnnnnnnnnnnnnnnnnnnnnnnnnnnnnnnnnnnnnnnnnnnnnnnnnnnnnnnnnnnnnnnnnnnnnnnnnnnnnnnnnnnnnnnnnnnnnnnnnnnnnnnnnnnnnnnnnnnnnnnnnnnnnnnnnnnnnnnnnnnnnnnnnnnnnnnnnnnnnnnnnnnnnnnnnnnnnnnnnnnnnnnnnnnnnnnnnnnnnnnnnnnnnnnnnnnnnnnnnnnnnnnnnnnnnnnnnnnnnnnnnnnnnnnnnnnnnnnnnnnnnnnnnnnnnnnnnnnnnnnnnnnnnnnnnnnnnnnnnnnnnnnnnnnnnnnnnnnnnnnnnnnnnnnnnnnnnnnnnnnnnnnnnnnnnnnnnnnnnnnnnnnnnnnnnnnnnnnnnnnnnnnnnnnnnnnnnnnnnnnnnnnnnnnnnnnnnnnnnnnnnnnnnnnnnnnnnnnnnnnnnnnnnnnnnnnnnnnnnnnnnnnnnnnnnnnnnnnnnnnnnnnnnnnnnnnnnnnnnnnnnnnnnnnnnnnnnnnnnnnnnnnnnnnnnnnnnnnnnnnnnnnnnnnnnnnnnnnnnnnnnnnnnnnnnnnnnnnnnnnnnnnnnnnnnnnnnnnnnnnnnnnnnnnnnnnnnnnnnnnnnnnnnnnnnnnnnnnnnnnnnnnnnnnnnnnnnnnnnnnnnnnnnnnnnnnnnnnnnnnnnnnnnnnnnnnnnnnnnnnnnnnnnnnnnnnnnnnnnnnnnnnnnnnnnnnnnnnnnnnnnnnnnnnnnnnnnnnnnnnnnnnnnnnnnnnnnnnnnnnnnnnnnnnnnnnnnnnnnnnnnnnnnnnnnnnnnnnnnnnnnnnnnnnnnnnnnnnnnnnnnnnnnnnnnnnnnnnnnnnnnnnnnnnnnnnnnnnnnnnnnnnnnnnnnnnnnnnnnnnnnnnnnnnnnnnnnnnnnnnnnnnnnnnnnnnnnnnnnnnnnnnnnnnnnnnnnnnnnnnnnnnnnnnnnnnnnnnnnnnnnnnnnnnnnnnnnnnnnnnnnnnnnnnnnnnnnnnnnnnnnnnnnnnnnnnnnnnnnnnnnnnnnnnnnnnnnnnnnnnnnnnnnnnnnnnnnnnnnnnnnnnnnnnnnnnnnnnnnnnnnnnnnnnnnnnnnnnnnnnnnnnnnnnnnnnnnnnnnnnnnnnnnnnnnnnnnnnnnnnnnnnnnnnnnnnnnnnnnnnnnnnnnnnnnnnnnnnnnnnnnnnnnnnnnnnnnnnnnnnnnnnnnnnnnnnnnnnnnnnnnnnnnnnnnnnnnnnnnnnnnnnnnnnnnnnnnnnnnnnnnnnnnnnnnnnnnnnnnnnnnnnnnnnnnnnnnnnnnnnnnnnnnnnnnnnnnnnnnnnnnnnnnnnnnnnnnnnnnnnnnnnnnnnnnnnnnnnnnnnnnnnnnnnnnnnnnnnnnnnnnnnnnnnnnnnnnnnnnnnnnnnnnnnnnnnnnnnnnnnnnnnnnnnnnnnnnnnnnnnnnnnnnnnnnnnnnnnnnnnnnnnnnnnnnnnnnnnnnnnnnnnnnnnnnnnnnnnnnnnnnnnnnnnnnnnnnnnnnnnnnnnnnnnnnnnnnnnnnnnnnnnnnnnnnnnnnnnnnnnnnnnnnnnnnnnnnnnnnnnnnnnnnnnnnnnnnnnnnnnnnnnnnnnnnnnnnnnnnnnnnnnnnnnnnnnnnnnnnnnnnnnnnnnnnnnnnnnnnnnnnnnnnnnnnnnnnnnnnnnnnnnnnnnnnnnnnnnnnnnnnnnnnnnnnnnnnnnnnnnnnnnnnnnnnnnnnnnnnnnnnnnnnnnnnnnnnnnnnnnnnnnnnnnnnnnnnnnnnnnnnnnnnnnnnnnnnnnnnnnnnnnnnnnnnnnnnnnnnnnnnnnnnnnnnnnnnnnnnnnnnnnnnnnnnnnnnnnnnnnnnnnnnnnnnnnnnnnnnnnnnnnnnnnnnnnnnnnnnnnnnnnnnnnnnnnnnnnnnnnnnnnnnnnnnnnnnnnnnnnnnnnnnnnnnnnnnnnnnnnnnnnnnnnnnnnnnnnnnnnnnnnnnnnnnnnnnnnnnnnnnnnnnnnnnnnnnnnnnnnnnnnnnnnnnnnnnnnnnnnnnnnnnnnnnnnnnnnnnnnnnnnnnnnnnnnnnnnnnnnnnnnnnnnnnnnnnnnnnnnnnnnnnnnnnnnnnnnnnnnnnnnnnnnnnnnnnnnnnnnnnnnnnnnnnnnnnnnnnnnnnnnnnnnnnnnnnnnnnnnnnnnnnnnnnnnnnnnnnnnnnnnnnnnnnnnnnnnnnnnnnnnnnnnnnnnnnnnnnnnnnnnnnnnnnnnnnnnnnnnnnnnnnnnnnnnnnnnnnnnnnnnnnnnnnnnnnnnnnnnnnnnnnnnnnnnnnnnnnnnnnnnnnnnnnnnnnnnnnnnnnnnnnnnnnnnnnnnnnnnnnnnnnnnnnnnnnnnnnnnnnnnnnnnnnnnnnnnnnnnnnnnnnnnnnnnnnnnnnnnnnnnnnnnnnnnnnnnnnnnnnnnnnnnnnnnnnnnnnnnnnnnnnnnnnnnnnnnnnnnnnnnnnnnnnnnnnnnnnnnnnnnnnnnnnnnnnnnnnnnnnnnnnnnnnnnnnnnnnnnnnnnnnnnnnnnnnnnnnnnnnnnnnnnnnnnnnnnnnnnnnnnnnnnnnnnnnnnnnnnnnnnnnnnnnnnnnnnnnnnnnnnnnnnnnnnnnnnnnnnnnnnnnnnnnnnnnnnnnnnnnnnnnnnnnnnnnnnnnnnnnnnnnnnnnnnnnnnnnnnnnnnnnnnnnnnnnnnnnnnnnnnnnnnnnnnnnnnnnnnnnnnnnnnnnnnnnnnnnnnnnnnnnnnnnnnnnnnnnnnnnnnnnnnnnnnnnnnnnnnnnnnnnnnnnnnnnnnnnnnnnnnnnnnnnnnnnnnnnnnnnnnnnnnnnnnnnnnnnnnnnnnnnnnnnnnnnnnnnnnnnnnnnnnnnnnnnnnnnnnnnnnnnnnnnnnnnnnnnnnnnnnnnnnnnnnnnnnnnnnnnnnnnnnnnnnnnnnnnnnnnnnnnnnnnnnnnnnnnnnnnnnnnnnnnnnnnnnnnnnnnnnnnnnnnnnnnnnnnnnnnnnnnnnnnnnnnnnnnnnnnnnnnnnnnnnnnnnnnnnnnnnnnnnnnnnnnnnnnnnnnnnnnnnnnnnnnnnnnnnnnnnnnnnnnnnnnnnnnnnnnnnnnnnnnnnnnnnnnnnnnnnnnnnnnnnnnnnnnnnnnnnnnnnnnnnnnnnnnnnnnnnnnnnnnnnnnnnnnnnnnnnnnnnnnnnnnnnnnnnnnnnnnnnnnnnnnnnnnnnnnnnnnnnnnnnnnnnnnnnnnnnnnnnnnnnnnnnnnnnnnnnnnnnnnnnnnnnnnnnnnnnnnnnnnnnnnnnnnnnnnnnnnnnnnnnnnnnnnnnnnnnnnnnnnnnnnnnnnnnnnnnnnnnnnnnnnnnnnnnnnnnnnnnnnnnnnnnnnnnnnnnnnnnnnnnnnnnnnnnnnnnnnnnnnnnnnnnnnnnnnnnnnnnnnnnnnnnnnnnnnnnnnnnnnnnnnnnnnnnnnnnnnnnnnnnnnnnnnnnnnnnnnnnnnnnnnnnnnnnnnnnnnnnnnnnnnnnnnnnnnnnnnnnnnnnnnnnnnnnnnnnnnnnnnnnnnnnnnnnnnnnnnnnnnnnnnnnnnnnnnnnnnnnnnnnnnnnnnnnnnnnnnnnnnnnnnnnnnnnnnnnnnnnnnnnnnnnnnnnnnnnnnnnnnnnnnnnnnnnnnnnnnnnnnnnnnnnnnnnnnnnnnnnnnnnnnnnnnnnnnnnnnnnnnnnnnnnnnnnnnnnnnnnnnnnnnnnnnnnnnnnnnnnnnnnnnnnnnnnnnnnnnnnnnnnnnnnnnnnnnnnnnnnnnnnnnnnnnnnnnnnnnnnnnnnnnnnnnnnnnnnnnnnnnnnnnnnnnnnnnnnnnnnnnnnnnnnnnnnnnnnnnnnnnnnnnnnnnnnnnnnnnnnnnnnnnnnnnnnnnnnnnnnnnnnnnnnnnnnnnnnnnnnnnnnnnnnnnnnnnnnnnnnnnnnnnnnnnnnnnnnnnnnnnnnnnnnnnnnnnnnnnnnnnnnnnnnnnnnnnnnnnnnnnnnnnnnnnnnnnnnnnnnnnnnnnnnnnnnnnnnnnnnnnnnnnnnnnnnnnnnnnnnnnnnnnnnnnnnnnnnnnnnnnnnnnnnnnnnnnnnnnnnnnnnnnnnnnnnnnnnnnnnnnnnnnnnnnnnnnnnnnnnnnnnnnnnnnnnnnnnnnnnnnnnnnnnnnnnnnnnnnnnnnnnnnnnnnnnnnnnnnnnnnnnnnnnnnnnnnnnnnnnnnnnnnnnnnnnnnnnnnnnnnnnnnnnnnnnnnnnnnnnnnnnnnnnnnnnnnnnnnnnnnnnnnnnnnnnnnnnnnnnnnnnnnnnnnnnnnnnnnnnnnnnnnnnnnnnnnnnnnnnnnnnnnnnnnnnnnnnnnnnnnnnnnnnnnnnnnnnnnnnnnnnnnnnnnnnnnnnnnnnnnnnnnnnnnnnnnnnnnnnnnnnnnnnnnnnnnnnnnnnnnnnnnnnnnnnnnnnnnnnnnnnnnnnnnnnnnnnnnnnnnnnnnnnnnnnnnnnnnnnnnnnnnnnnnnnnnnnnnnnnnnnnnnnnnnnnnnnnnnnnnnnnnnnnnnnnnnnnnnnnnnnnnnnnnnnnnnnnnnnnnnnnnnnnnnnnnnnnnnnnnnnnnnnnnnnnnnnnnnnnnnnnnnnnnnnnnnnnnnnnnnnnnnnnnnnnnnnnnnnnnnnnnnnnnnnnnnnnnnnnnnnnnnnnnnnnnnnnnnnnnnnnnnnnnnnnnnnnnnnnnnnnnnnnnnnnnnnnnnnnnnnnnnnnnnnnnnnnnnnnnnnnnnnnnnnnnnnnnnnnnnnnnnnnnnnnnnnnnnnnnnnnnnnnnnnnnnnnnnnnnnnnnnnnnnnnnnnnnnnnnnnnnnnnnnnnnnnnnnnnnnnnnnnnnnnnnnnnnnnnnnnnnnnnnnnnnnnnnnnnnnnnnnnnnnnnnnnnnnnnnnnnnnnnnnnnnnnnnnnnnnnnnnnnnnnnnnnnnnnnnnnnnnnnnnnnnnnnnnnnnnnnnnnnnnnnnnnnnnnnnnnnnnnnnnnnnnnnnnnnnnnnnnnnnnnnnnnnnnnnnnnnnnnnnnnnnnnnnnnnnnnnnnnnnnnnnnnnnnnnnnnnnnnnnnnnnnnnnnnnnnnnnnnnnnnnnnnnnnnnnnnnnnnnnnnnnnnnnnnnnnnnnnnnnnnnnnnnnnnnnnnnnnnnnnnnnnnnnnnnnnnnnnnnnnnnnnnnnnnnnnnnnnnnnnnnnnnnnnnnnnnnnnnnnnnnnnnnnnnnnnnnnnnnnnnnnnnnnnnnnnnnnnnnnnnnnnnnnnnnnnnnnnnnnnnnnnnnnnnnnnnnnnnnnnnnnnnnnnnnnnnnnnnnnnnnnnnnnnnnnnnnnnnnnnnnnnnnnnnnnnnnnnnnnnnnnnnnnnnnnnnnnnnnnnnnnnnnnnnnnnnnnnnnnnnnnnnnnnnnnnnnnnnnnnnnnnnnnnnnnnnnnnnnnnnnnnnnnnnnnnnnnnnnnnnnnnnnnnnnnnnnnnnnnnnnnnnnnnnnnnnnnnnnnnnnnnnnnnnnnnnnnnnnnnnnnnnnnnnnnnnnnnnnnnnnnnnnnnnnnnnnnnnnnnnnnnnnnnnnnnnnnnnnnnnnnnnnnnnnnnnnnnnnnnnnnnnnnnnnnnnnnnnnnnnnnnnnnnnnnnnnnnnnnnnnnnnnnnnnnnnnnnnnnnnnnnnnnnnnnnnnnnnnnnnnnnnnnnnnnnnnnnnnnnnnnnnnnnnnnnnnnnnnnnnnnnnnnnnnnnnnnnnnnnnnnnnnnnnnnnnnnnnnnnnnnnnnnnnnnnnnnnnnnnnnnnnnnnnnnnnnnnnnnnnnnnnnnnnnnnnnnnnnnnnnnnnnnnnnnnnnnnnnnnnnnnnnnnnnnnnnnnnnnnnnnnnnnnnnnnnnnnnnnnnnnnnnnnnnnnnnnnnnnnnnnnnnnnnnnnnnnnnnnnnnnnnnnnnnnnnnnnnnnnnnnnnnnnnnnnnnnnnnnnnnnnnnnnnnnnnnnnnnnnnnnnnnnnnnnnnnnnnnnnnnnnnnnnnnnnnnnnnnnnnnnnnnnnnnnnnnnnnnnnnnnnnnnnnnnnnnnnnnnnnnnnnnnnnnnnnnnnnnnnnnnnnnnnnnnnnnnnnnnnnnnnnnnnnnnnnnnnnnnnnnnnnnnnnnnnnnnnnnnnnnnnnnnnnnnnnnnnnnnnnnnnnnnnnnnnnnnnnnnnnnnnnnnnnnnnnnnnnnnnnnnnnnnnnnnnnnnnnnnnnnnnnnnnnnnnnnnnnnnnnnnnnnnnnnnnnnnnnnnnnnnnnnnnnnnnnnnnnnnnnnnnnnnnnnnnnnnnnnnnnnnnnnnnnnnnnnnnnnnnnnnnnnnnnnnnnnnnnnnnnnnnnnnnnnnnnnnnnnnnnnnnnnnnnnnnnnnnnnnnnnnnnnnnnnnnnnnnnnnnnnnnnnnnnnnnnnnnnnnnnnnnnnnnnnnnnnnnnnnnnnnnnnnnnnnnnnnnnnnnnnnnnnnnnnnnnnnnnnnnnnnnnnnnnnnnnnnnnnnnnnnnnnnnnnnnnnnnnnnnnnnnnnnnnnnnnnnnnnnnnnnnnnnnnnnnnnnnnnnnnnnnnnnnnnnnnnnnnnnnnnnnnnnnnnnnnnnnnnnnnnnnnnnnnnnnnnnnnnnnnnnnnnnnnnnnnnnnnnnnnnnnnnnnnnnnnnnnnnnnnnnnnnnnnnnnnnnnnnnnnnnnnnnnnnnnnnnnnnnnnnnnnnnnnnnnnnnnnnnnnnnnnnnnnnnnnnnnnnnnnnnnnnnnnnnnnnnnnnnnnnnnnnnnnnnnnnnnnnnnnnnnnnnnnnnnnnnnnnnnnnnnnnnnnnnnnnnnnnnnnnnnnnnnnnnnnnnnnnnnnnnnnnnnnnnnnnnnnnnnnnnnnnnnnnnnnnnnnnnnnnnnnnnnnnnnnnnnnnnnnnnnnnnnnnnnnnnnnnnnnnnnnnnnnnnnnnnnnnnnnnnnnnnnnnnnnnnnnnnnnnnnnnnnnnnnnnnnnnnnnnnnnnnnnnnnnnnnnnnnnnnnnnnnnnnnnnnnnnnnnnnnnnnnnnnnnnnnnnnnnnnnnnnnnnnnnnnnnnnnnnnnnnnnnnnnnnnnnnnnnnnnnnnnnnnnnnnnnnnnnnnnnnnnnnnnnnnnnnnnnnnnnnnnnnnnnnnnnnnnnnnnnnnnnnnnnnnnnnnnnnnnnnnnnnnnnnnnnnnnnnnnnnnnnnnnnnnnnnnnnnnnnnnnnnnnnnnnnnnnnnnnnnnnnnnnnnnnnnnnnnnnnnnnnnnnnnnnnnnnnnnnnnnnnnnnnnnnnnnnnnnnnnnnnnnnnnnnnnnnnnnnnnnnnnnnnnnnnnnnnnnnnnnnnnnnnnnnnnnnnnnnnnnnnnnnnnnnnnnnnnnnnnnnnnnnnnnnnnnnnnnnnnnnnnnnnnnnnnnnnnnnnnnnnnnnnnnnnnnnnnnnnnnnnnnnnnnnnnnnnnnnnnnnnnnnnnnnnnnnnnnnnnnnnnnnnnnnnnnnnnnnnnnnnnnnnnnnnnnnnnnnnnnnnnnnnnnnnnnnnnnnnnnnnnnnnnnnnnnnnnnnnnnnnnnnnnnnnnnnnnnnnnnnnnnnnnnnnnnnnnnnnnnnnnnnnnnnnnnnnnnnnnnnnnnnnnnnnnnnnnnnnnnnnnnnnnnnnnnnnnnnnnnnnnnnnnnnnnnnnnnnnnnnnnnnnnnnnnnnnnnnnnnnnnnnnnnnnnnnnnnnnnnnnnnnnnnnnnnnnnnnnnnnnnnnnnnnnnnnnnnnnnnnnnnnnnnnnnnnnnnnnnnnnnnnnnnnnnnnnnnnnnnnnnnnnnnnnnnnnnnnnnnnnnnnnnnnnnnnnnnnnnnnnnnnnnnnnnnnnnnnnnnnnnnnnnnnnnnnnnnnnnnnnnnnnnnnnnnnnnnnnnnnnnnnnnnnnnnnnnnnnnnnnnnnnnnnnnnnnnnnnnnnnnnnnnnnnnnnnnnnnnnnnnnnnnnnnnnnnnnnnnnnnnnnnnnnnnnnnnnnnnnnnnnnnnnnnnnnnnnnnnnnnnnnnnnnnnnnnnnnnnnnnnnnnnnnnnnnnnnnnnnnnnnnnnnnnnnnnnnnnnnnnnnnnnnnnnnnnnnnnnnnnnnnnnnnnnnnnnnnnnnnnnnnnnnnnnnnnnnnnnnnnnnnnnnnnnnnnnnnnnnnnnnnnnnnnnnnnnnnnnnnnnnnnnnnnnnnnnnnnnnnnnnnnnnnnnnnnnnnnnnnnnnnnnnnnnnnnnnnnnnnnnnnnnnnnnnnnnnnnnnnnnnnnnnnnnnnnnnnnnnnnnnnnnnnnnnnnnnnnnnnnnnnnnnnnnnnnnnnnnnnnnnnnnnnnnnnnnnnnnnnnnnnnnnnnnnnnnnnnnnnnnnnnnnnnnnnnnnnnnnnnnnnnnnnnnnnnnnnnnnnnnnnnnnnnnnnnnnnnnnnnnnnnnnnnnnnnnnnnnnnnnnnnnnnnnnnnnnnnnnnnnnnnnnnnnnnnnnnnnnnnnnnnnnnnnnnnnnnnnnnnnnnnnnnnnnnnnnnnnnnnnnnnnnnnnnnnnnnnnnnnnnnnnnnnnnnnnnnnnnnnnnnnnnnnnnnnnnnnnnnnnnnnnnnnnnnnnnnnnnnnnnnnnnnnnnnnnnnnnnnnnnnnnnnnnnnnnnnnnnnnnnnnnnnnnnnnnnnnnnnnnnnnnnnnnnnnnnnnnnnnnnnnnnnnnnnnnnnnnnnnnnnnnnnnnnnnnnnnnnnnnnnnnnnnnnnnnnnnnnnnnnnnnnnnnnnnnnnnnnnnnnnnnnnnnnnnnnnnnnnnnnnnnnnnnnnnnnnnnnnnnnnnnnnnnnnnnnnnnnnnnnnnnnnnnnnnnnnnnnnnnnnnnnnnnnnnnnnnnnnnnnnnnnnnnnnnnnnnnnnnnnnnnnnnnnnnnnnnnnnnnnnnnnnnnnnnnnnnnnnnnnnnnnnnnnnnnnnnnnnnnnnnnnnnnnnnnnnnnnnnnnnnnnnnnnnnnnnnnnnnnnnnnnnnnnnnnnnnnnnnnnnnnnnnnnnnnnnnnnnnnnnnnnnnnnnnnnnnnnnnnnnnnnnnnnnnnnnnnnnnnnnnnnnnnnnnnnnnnnnnnnnnnnnnnnnnnnnnnnnnnnnnnnnnnnnnnnnnnnnnnnnnnnnnnnnnnnnnnnnnnnnnnnnnnnnnnnnnnnnnnnnnnnnnnnnnnnnnnnnnnnnnnnnnnnnnnnnnnnnnnnnnnnnnnnnnnnnnnnnnnnnnnnnnnnnnnnnnnnnnnnnnnnnnnnnnnnnnnnnnnnnnnnnnnnnnnnnnnnnnnnnnnnnnnnnnnnnnnnnnnnnnnnnnnnnnnnnnnnnnnnnnnnnnnnnnnnnnnnnnnnnnnnnnnnnnnnnnnnnnnnnnnnnnnnnnnnnnnnnnnnnnnnnnnnnnnnnnnnnnnnnnnnnnnnnnnnnnnnnnnnnnnnnnnnnnnnnnnnnnnnnnnnnnnnnnnnnnnnnnnnnnnnnnnnnnnnnnnnnnnnnnnnnnnnnnnnnnnnnnnnnnnnnnnnnnnnnnnnnnnnnnnnnnnnnnnnnnnnnnnnnnnnnnnnnnnnnnnnnnnnnnnnnnnnnnnnnnnnnnnnnnnnnnnnnnnnnnnnnnnnnnnnnnnnnnnnnnnnnnnnnnnnnnnnnnnnnnnnnnnnnnnnnnnnnnnnnnnnnnnnnnnnnnnnnnnnnnnnnnnnnnnnnnnnnnnnnnnnnnnnnnnnnnnnnnnnnnnnnnnnnnnnnnnnnnnnnnnnnnnnnnnnnnnnnnnnnnnnnnnnnnnnnnnnnnnnnnnnnnnnnnnnnnnnnnnnnnnnnnnnnnnnnnnnnnnnnnnnnnnnnnnnnnnnnnnnnnnnnnnnnnnnnnnnnnnnnnnnnnnnnnnnnnnnnnnnnnnnnnnnnnnnnnnnnnnnnnnnnnnnnnnnnnnnnnnnnnnnnnnnnnnnnnnnnnnnnnnnnnnnnnnnnnnnnnnnnnnnnnnnnnnnnnnnnnnnnnnnnnnnnnnnnnnnnnnnnnnnnnnnnnnnnnnnnnnnnnnnnnnnnnnnnnnnnnnnnnnnnnnnnnnnnnnnnnnnnnnnnnnnnnnnnnnnnnnnnnnnnnnnnnnnnnnnnnnnnnnnnnnnnnnnnnnnnnnnnnnnnnnnnnnnnnnnnnnnnnnnnnnnnnnnnnnnnnnnnnnnnnnnnnnnnnnnnnnnnnnnnnnnnnnnnnnnnnnnnnnnnnnnnnnnnnnnnnnnnnnnnnnnnnnnnnnnnnnnnnnnnnnnnnnnnnnnnnnnnnnnnnnnnnnnnnnnnnnnnnnnnnnnnnnnnnnnnnnnnnnnnnnnnnnnnnnnnnnnnnnnnnnnnnnnnnnnnnnnnnnnnnnnnnnnnnnnnnnnnnnnnnnnnnnnnnnnnnnnnnnnnnnnnnnnnnnnnnnnnnnnnnnnnnnnnnnnnnnnnnnnnnnnnnnnnnnnnnnnnnnnnnnnnnnnnnnnnnnnnnnnnnnnnnnnnnnnnnnnnnnnnnnnnnnnnnnnnnnnnnnnnnnnnnnnnnnnnnnnnnnnnnnnnnnnnnnnnnnnnnnnnnnnnnnnnnnnnnnnnnnnnnnnnnnnnnnnnnnnnnnnnnnnnnnnnnnnnnnnnnnnnnnnnnnnnnnnnnnnnnnnnnnnnnnnnnnnnnnnnnnnnnnnnnnnnnnnnnnnnnnnnnnnnnnnnnnnnnnnnnnnnnnnnnnnnnnnnnnnnnnnnnnnnnnnnnnnnnnnnnnnnnnnnnnnnnnnnnnnnnnnnnnnnnnnnnnnnnnnnnnnnnnnnnnnnnnnnnnnnnnnnnnnnnnnnnnnnnnnnnnnnnnnnnnnnnnnnnnnnnnnnnnnnnnnnnnnnnnnnnnnnnnnnnnnnnnnnnnnnnnnnnnnnnnnnnnnnnnnnnnnnnnnnnnnnnnnnnnnnnnnnnnnnnnnnnnnnnnnnnnnnnnnnnnnnnnnnnnnnnnnnnnnnnnnnnnnnnnnnnnnnnnnnnnnnnnnnnnnnnnnnnnnnnnnnnnnnnnnnnnnnnnnnnnnnnnnnnnnnnnnnnnnnnnnnnnnnnnnnnnnnnnnnnnnnnnnnnnnnnnnnnnnnnnnnnnnnnnnnnnnnnnnnnnnnnnnnnnnnnnnnnnnnnnnnnnnnnnnnnnnnnnnnnnnnnnnnnnnnnnnnnnnnnnnnnnnnnnnnnnnnnnnnnnnnnnnnnnnnnnnnnnnnnnnnnnnnnnnnnnnnnnnnnnnnnnnnnnnnnnnnnnnnnnnnnnnnnnnnnnnnnnnnnnnnnnnnnnnnnnnnnnnnnnnnnnnnnnnnnnnnnnnnnnnnnnnnnnnnnnnnnnnnnnnnnnnnnnnnnnnnnnnnnnnnnnnnnnnnnnnnnnnnnnnnnnnnnnnnnnnnnnnnnnnnnnnnnnnnnnnnnnnnnnnnnnnnnnnnnnnnnnnnnnnnnnnnnnnnnnnnnnnnnnnnnnnnnnnnnnnnnnnnnnnnnnnnnnnnnnnnnnnnnnnnnnnnnnnnnnnnnnnnnnnnnnnnnnnnnnnnnnnnnnnnnnnnnnnnnnnnnnnnnnnnnnnnnnnnnnnnnnnnnnnnnnnnnnnnnnnnnnnnnnnnnnnnnnnnnnnnnnnnnnnnnnnnnnnnnnnnnnnnnnnnnnnnnnnnnnnnnnnnnnnnnnnnnnnnnnnnnnnnnnnnnnnnnnnnnnnnnnnnnnnnnnnnnnnnnnnnnnnnnnnnnnnnnnnnnnnnnnnnnnnnnnnnnnnnnnnnnnnnnnnnnnnnnnnnnnnnnnnnnnnnnnnnnnnnnnnnnnnnnnnnnnnnnnnnnnnnnnnnnnnnnnnnnnnnnnnnnnnnnnnnnnnnnnnnnnnnnnnnnnnnnnnnnnnnnnnnnnnnnnnnnnnnnnnnnnnnnnnnnnnnnnnnnnnnnnnnnnnnnnnnnnnnnnnnnnnnnnnnnnnnnnnnnnnnnnnnnnnnnnnnnnnnnnnnnnnnnnnnnnnnnnnnnnnnnnnnnnnnnnnnnnnnnnnnnnnnnnnnnnnnnnnnnnnnnnnnnnnnnnnnnnnnnnnnnnnnnnnnnnnnnnnnnnnnnnnnnnnnnnnnnnnnnnnnnnnnnnnnnnnnnnnnnnnnnnnnnnnnnnnnnnnnnnnnnnnnnnnnnnnnnnnnnnnnnnnnnnnnnnnnnnnnnnnnnnnnnnnnnnnnnnnnnnnnnnnnnnnnnnnnnnnnnnnnnnnnnnnnnnnnnnnnnnnnnnnnnnnnnnnnnnnnnnnnnnnnnnnnnnnnnnnnnnnnnnnnnnnnnnnnnnnnnnnnnnnnnnnnnnnnnnnnnnnnnnnnnnnnnnnnnnnnnnnnnnnnnnnnnnnnnnnnnnnnnnnnnnnnnnnnnnnnnnnnnnnnnnnnnnnnnnnnnnnnnnnnnnnnnnnnnnnnnnnnnnnnnnnnnnnnnnnnnnnnnnnnnnnnnnnnnnnnnnnnnnnnnnnnnnnnnnnnnnnnnnnnnnnnnnnnnnnnnnnnnnnnnnnnnnnnnnnnnnnnnnnnnnnnnnnnnnnnnnnnnnnnnnnnnnnnnnnnnnnnnnnnnnnnnnnnnnnnnnnnnnnnnnnnnnnnnnnnnnnnnnnnnnnnnnnnnnnnnnnnnnnnnnnnnnnnnnnnnnnnnnnnnnnnnnnnnnnnnnnnnnnnnnnnnnnnnnnnnnnnnnnnnnnnnnnnnnnnnnnnnnnnnnnnnnnnnnnnnnnnnnnnnnnnnnnnnnnnnnnnnnnnnnnnnnnnnnnnnnnnnnnnnnnnnnnnnnnnnnnnnnnnnnnnnnnnnnnnnnnnnnnnnnnnnnnnnnnnnnnnnnnnnnnnnnnnnnnnnnnnnnnnnnnnnnnnnnnnnnnnnnnnnnnnnnnnnnnnnnnnnnnnnnnnnnnnnnnnnnnnnnnnnnnnnnnnnnnnnnnnnnnnnnnnnnnnnnnnnnnnnnnnnnnnnnnnnnnnnnnnnnnnnnnnnnnnnnnnnnnnnnnnnnnnnnnnnnnnnnnnnnnnnnnnnnnnnnnnnnnnnnnnnnnnnnnnnnnnnnnnnnnnnnnnnnnnnnnnnnnnnnnnnnnnnnnnnnnnnnnnnnnnnnnnnnnnnnnnnnnnnnnnnnnnnnnnnnnnnnnnnnnnnnnnnnnnnnnnnnnnnnnnnnnnnnnnnnnnnnnnnnnnnnnnnnnnnnnnnnnnnnnnnnnnnnnnnnnnnnnnnnnnnnnnnnnnnnnnnnnnnnnnnnnnnnnnnnnnnnnnnnnnnnnnnnnnnnnnnnnnnnnnnnnnnnnnnnnnnnnnnnnnnnnnnnnnnnnnnnnnnnnnnnnnnnnnnnnnnnnnnnnnnnnnnnnnnnnnnnnnnnnnnnnnnnnnnnnnnnnnnnnnnnnnnnnnnnnnnnnnnnnnnnnnnnnnnnnnnnnnnnnnnnnnnnnnnnnnnnnnnnnnnnnnnnnnnnnnnnnnnnnnnnnnnnnnnnnnnnnnnnnnnnnnnnnnnnnnnnnnnnnnnnnnnnnnnnnnnnnnnnnnnnnnnnnnnnnnnnnnnnnnnnnnnnnnnnnnnnnnnnnnnnnnnnnnnnnnnnnnnnnnnnnnnnnnnnnnnnnnnnnnnnnnnnnnnnnnnnnnnnnnnnnnnnnnnnnnnnnnnnnnnnnnnnnnnnnnnnnnnnnnnnnnnnnnnnnnnnnnnnnnnnnnnnnnnnnnnnnnnnnnnnnnnnnnnnnnnnnnnnnnnnnnnnnnnnnnnnnnnnnnnnnnnnnnnnnnnnnnnnnnnnnnnnnnnnnnnnnnnnnnnnnnnnnnnnnnnnnnnnnnnnnnnnnnnnnnnnnnnnnnnnnnnnnnnnnnnnnnnnnnnnnnnnnnnnnnnnnnnnnnnnnnnnnnnnnnnnnnnnnnnnnnnnnnnnnnnnnnnnnnnnnnnnnnnnnnnnnnnnnnnnnnnnnnnnnnnnnnnnnnnnnnnnnnnnnnnnnnnnnnnnnnnnnnnnnnnnnnnnnnnnnnnnnnnnnnnnnnnnnnnnnnnnnnnnnnnnnnnnnnnnnnnnnnnnnnnnnnnnnnnnnnnnnnnnnnnnnnnnnnnnnnnnnnnnnnnnnnnnnnnnnnnnnnnnnnnnnnnnnnnnnnnnnnnnnnnnnnnnnnnnnnnnnnnnnnnnnnnnnnnnnnnnnnnnnnnnnnnnnnnnnnnnnnnnnnnnnnnnnnnnnnnnnnnnnnnnnnnnnnnnnnnnnnnnnnnnnnnnnnnnnnnnnnnnnnnnnnnnnnnnnnnnnnnnnnnnnnnnnnnnnnnnnnnnnnnnnnnnnnnnnnnnnnnnnnnnnnnnnnnnnnnnnnnnnnnnnnnnnnnnnnnnnnnnnnnnnnnnnnnnnnnnnnnnnnnnnnnnnnnnnnnnnnnnnnnnnnnnnnnnnnnnnnnnnnnnnnnnnnnnnnnnnnnnnnnnnnnnnnnnnnnnnnnnnnnnnnnnnnnnnnnnnnnnnnnnnnnnnnnnnnnnnnnnnnnnnnnnnnnnnnnnnnnnnnnnnnnnnnnnnnnnnnnnnnnnnnnnnnnnnnnnnnnnnnnnnnnnnnnnnnnnnnnnnnnnnnnnnnnnnnnnnnnnnnnnnnnnnnnnnnnnnnnnnnnnnnnnnnnnnnnnnnnnnnnnnnnnnnnnnnnnnnnnnnnnnnnnnnnnnnnnnnnnnnnnnnnnnnnnnnnnnnnnnnnnnnnnnnnnnnnnnnnnnnnnnnnnnnnnnnnnnnnnnnnnnnnnnnnnnnnnnnnnnnnnnnnnnnnnnnnnnnnnnnnnnnnnnnnnnnnnnnnnnnnnnnnnnnnnnnnnnnnnnnnnnnnnnnnnnnnnnnnnnnnnnnnnnnnnnnnnnnnnnnnnnnnnnnnnnnnnnnnnnnnnnnnnnnnnnnnnnnnnnnnnnnnnnnnnnnnnnnnnnnnnnnnnnnnnnnnnnnnnnnnnnnnnnnnnnnnnnnnnnnnnnnnnnnnnnnnnnnnnnnnnnnnnnnnnnnnnnnnnnnnnnnnnnnnnnnnnnnnnnnnnnnnnnnnnnnnnnnnnnnnnnnnnnnnnnnnnnnnnnnnnnnnnnnnnnnnnnnnnnnnnnnnnnnnnnnnnnnnnnnnnnnnnnnnnnnnnnnnnnnnnnnnnnnnnnnnnnnnnnnnnnnnnnnnnnnnnnnnnnnnnnnnnnnnnnnnnnnnnnnnnnnnnnnnnnnnnnnnnnnnnnnnnnnnnnnnnnnnnnnnnnnnnnnnnnnnnnnnnnnnnnnnnnnnnnnnnnnnnnnnnnnnnnnnnnnnnnnnnnnnnnnnnnnnnnnnnnnnnnnnnnnnnnnnnnnnnnnnnnnnnnnnnnnnnnnnnnnnnnnnnnnnnnnnnnnnnnnnnnnnnnnnnnnnnnnnnnnnnnnnnnnnnnnnnnnnnnnnnnnnnnnnnnnnnnnnnnnnnnnnnnnnnnnnnnnnnnnnnnnnnnnnnnnnnnnnnnnnnnnnnnnnnnnnnnnnnnnnnnnnnnnnnnnnnnnnnnnnnnnnnnnnnnnnnnnnnnnnnnnnnnnnnnnnnnnnnnnnnnnnnnnnnnnnnnnnnnnnnnnnnnnnnnnnnnnnnnnnnnnnnnnnnnnnnnnnnnnnnnnnnnnnnnnnnnnnnnnnnnnnnnnnnnnnnnnnnnnnnnnnnnnnnnnnnnnnnnnnnnnnnnnnnnnnnnnnnnnnnnnnnnnnnnnnnnnnnnnnnnnnnnnnnnnnnnnnnnnnnnnnnnnnnnnnnnnnnnnnnnnnnnnnnnnnnnnnnnnnnnnnnnnnnnnnnnnnnnnnnnnnnnnnnnnnnnnnnnnnnnnnnnnnnnnnnnnnnnnnnnnnnnnnnnnnnnnnnnnnnnnnnnnnnnnnnnnnnnnnnnnnnnnnnnnnnnnnnnnnnnnnnnnnnnnnnnnnnnnnnnnnnnnnnnnnnnnnnnnnnnnnnnnnnnnnnnnnnnnnnnnnnnnnnnnnnnnnnnnnnnnnnnnnnnnnnnnnnnnnnnnnnnnnnnnnnnnnnnnnnnnnnnnnnnnnnnnnnnnnnnnnnnnnnnnnnnnnnnnnnnnnnnnnnnnnnnnnnnnnnnnnnnnnnnnnnnnnnnnnnnnnnnnnnnnnnnnnnnnnnnnnnnnnnnnnnnnnnnnnnnnnnnnnnnnnnnnnnnnnnnnnnnnnnnnnnnnnnnnnnnnnnnnnnnnnnnnnnnnnnnnnnnnnnnnnnnnnnnnnnnnnnnnnnnnnnnnnnnnnnnnnnnnnnnnnnnnnnnnnnnnnnnnnnnnnnnnnnnnnnnnnnnnnnnnnnnnnnnnnnnnnnnnnnnnnnnnnnnnnnnnnnnnnnnnnnnnnnnnnnnnnnnnnnnnnnnnnnnnnnnnnnnnnnnnnnnnnnnnnnnnnnnnnnnnnnnnnnnnnnnnnnnnnnnnnnnnnnnnnnnnnnnnnnnnnnnnnnnnnnnnnnnnnnnnnnnnnnnnnnnnnnnnnnnnnnnnnnnnnnnnnnnnnnnnnnnnnnnnnnnnnnnnnnnnnnnnnnnnnnnnnnnnnnnnnnnnnnnnnnnnnnnnnnnnnnnnnnnnnnnnnnnnnnnnnnnnnnnnnnnnnnnnnnnnnnnnnnnnnnnnnnnnnnnnnnnnnnnnnnnnnnnnnnnnnnnnnnnnnnnnnnnnnnnnnnnnnnnnnnnnnnnnnnnnnnnnnnnnnnnnnnnnnnnnnnnnnnnnnnnnnnnnnnnnnnnnnnnnnnnnnnnnnnnnnnnnnnnnnnnnnnnnnnnnnnnnnnnnnnnnnnnnnnnnnnnnnnnnnnnnnnnnnnnnnnnnnnnnnnnnnnnnnnnnnnnnnnnnnnnnnnnnnnnnnnnnnnnnnnnnnnnnnnnnnnnnnnnnnnnnnnnnnnnnnnnnnnnnnnnnnnnnnnnnnnnnnnnnnnnnnnnnnnnnnnnnnnnnnnnnnnnnnnnnnnnnnnnnnnnnnnnnnnnnnnnnnnnnnnnnnnnnnnnnnnnnnnnnnnnnnnnnnnnnnnnnnnnnnnnnnnnnnnnnnnnnnnnnnnnnnnnnnnnnnnnnnnnnnnnnnnnnnnnnnnnnnnnnnnnnnnnnnnnnnnnnnnnnnnnnnnnnnnnnnnnnnnnnnnnnnnnnnnnnnnnnnnnnnnnnnnnnnnnnnnnnnnnnnnnnnnnnnnnnnnnnnnnnnnnnnnnnnnnnnnnnnnnnnnnnnnnnnnnnnnnnnnnnnnnnnnnnnnnnnnnnnnnnnnnnnnnnnnnnnnnnnnnnnnnnnnnnnnnnnnnnnnnnnnnnnnnnnnnnnnnnnnnnnnnnnnnnnnnnnnnnnnnnnnnnnnnnnnnnnnnnnnnnnnnnnnnnnnnnnnnnnnnnnnnnnnnnnnnnnnnnnnnnnnnnnnnnnnnnnnnnnnnnnnnnnnnnnnnnnnnnnnnnnnnnnnnnnnnnnnnnnnnnnnnnnnnnnnnnnnnnnnnnnnnnnnnnnnnnnnnnnnnnnnnnnnnnnnnnnnnnnnnnnnnnnnnnnnnnnnnnnnnnnnnnnnnnnnnnnnnnnnnnnnnnnnnnnnnnnnnnnnnnnnnnnnnnnnnnnnnnnnnnnnnnnnnnnnnnnnnnnnnnnnnnnnnnnnnnnnnnnnnnnnnnnnnnnnnnnnnnnnnnnnnnnnnnnnnnnnnnnnnnnnnnnnnnnnnnnnnnnnnnnnnnnnnnnnnnnnnnnnnnnnnnnnnnnnnnnnnnnnnnnnnnnnnnnnnnnnnnnnnnnnnnnnnnnnnnnnnnnnnnnnnnnnnnnnnnnnnnnnnnnnnnnnnnnnnnnnnnnnnnnnnnnnnnnnnnnnnnnnnnnnnnnnnnnnnnnnnnnnnnnnnnnnnnnnnnnnnnnnnnnnnnnnnnnnnnnnnnnnnnnnnnnnnnnnnnnnnnnnnnnnnnnnnnnnnnnnnnnnnnnnnnnnnnnnnnnnnnnnnnnnnnnnnnnnnnnnnnnnnnnnnnnnnnnnnnnnnnnnnnnnnnnnnnnnnnnnnnnnnnnnnnnnnnnnnnnnnnnnnnnnnnnnnnnnnnnnnnnnnnnnnnnnnnnnnnnnnnnnnnnnnnnnnnnnnnnnnnnnnnnnnnnnnnnnnnnnnnnnnnnnnnnnnnnnnnnnnnnnnnnnnnnnnnnnnnnnnnnnnnnnnnnnnnnnnnnnnnnnnnnnnnnnnnnnnnnnnnnnnnnnnnnnnnnnnnnnnnnnnnnnnnnnnnnnnnnnnnnnnnnnnnnnnnnnnnnnnnnnnnnnnnnnnnnnnnnnnnnnnnnnnnnnnnnnnnnnnnnnnnnnnnnnnnnnnnnnnnnnnnnnnnnnnnnnnnnnnnnnnnnnnnnnnnnnnnnnnnnnnnnnnnnnnnnnnnnnnnnnnnnnnnnnnnnnnnnnnnnnnnnnnnnnnnnnnnnnnnnnnnnnnnnnnnnnnnnnnnnnnnnnnnnnnnnnnnnnnnnnnnnnnnnnnnnnnnnnnnnnnnnnnnnnnnnnnnnnnnnnnnnnnnnnnnnnnnnnnnnnnnnnnnnnnnnnnnnnnnnnnnnnnnnnnnnnnnnnnnnnnnnnnnnnnnnnnnnnnnnnnnnnnnnnnnnnnnnnnnnnnnnnnnnnnnnnnnnnnnnnnnnnnnnnnnnnnnnnnnnnnnnnnnnnnnnnnnnnnnnnnnnnnnnnnnnnnnnnnnnnnnnnnnnnnnnnnnnnnnnnnnnnnnnnnnnnnnnnnnnnnnnnnnnnnnnnnnnnnnnnnnnnnnnnnnnnnnnnnnnnnnnnnnnnnnnnnnnnnnnnnnnnnnnnnnnnnnnnnnnnnnnnnnnnnnnnnnnnnnnnnnnnnnnnnnnnnnnnnnnnnnnnnnnnnnnnnnnnnnnnnnnnnnnnnnnnnnnnnnnnnnnnnnnnnnnnnnnnnnnnnnnnnnnnnnnnnnnnnnnnnnnnnnnnnnnnnnnnnnnnnnnnnnnnnnnnnnnnnnnnnnnnnnnnnnnnnnnnnnnnnnnnnnnnnnnnnnnnnnnnnnnnnnnnnnnnnnnnnnnnnnnnnnnnnnnnnnnnnnnnnnnnnnnnnnnnnnnnnnnnnnnnnnnnnnnnnnnnnnnnnnnnnnnnnnnnnnnnnnnnnnnnnnnnnnnnnnnnnnnnnnnnnnnnnnnnnnnnnnnnnnnnnnnnnnnnnnnnnnnnnnnnnnnnnnnnnnnnnnnnnnnnnnnnnnnnnnnnnnnnnnnnnnnnnnnnnnnnnnnnnnnnnnnnnnnnnnnnnnnnnnnnnnnnnnnnnnnnnnnnnnnnnnnnnnnnnnnnnnnnnnnnnnnnnnnnnnnnnnnnnnnnnnnnnnnnnnnnnnnnnnnnnnnnnnnnnnnnnnnnnnnnnnnnnnnnnnnnnnnnnnnnnnnnnnnnnnnnnnnnnnnnnnnnnnnnnnnnnnnnnnnnnnnnnnnnnnnnnnnnnnnnnnnnnnnnnnnnnnnnnnnnnnnnnnnnnnnnnnnnnnnnnnnnnnnnnnnnnnnnnnnnnnnnnnnnnnnnnnnnnnnnnnnnnnnnnnnnnnnnnnnnnnnnnnnnnnnnnnnnnnnnnnnnnnnnnnnnnnnnnnnnnnnnnnnnnnnnnnnnnnnnnnnnnnnnnnnnnnnnnnnnnnnnnnnnnnnnnnnnnnnnnnnnnnnnnnnnnnnnnnnnnnnnnnnnnnnnnnnnnnnnnnnnnnnnnnnnnnnnnnnnnnnnnnnnnnnnnnnnnnnnnnnnnnnnnnnnnnnnnnnnnnnnnnnnnnnnnnnnnnnnnnnnnnnnnnnnnnnnnnnnnnnnnnnnnnnnnnnnnnnnnnnnnnnnnnnnnnnnnnnnnnnnnnnnnnnnnnnnnnnnnnnnnnnnnnnnnnnnnnnnnnnnnnnnnnnnnnnnnnnnnnnnnnnnnnnnnnnnnnnnnnnnnnnnnnnnnnnnnnnnnnnnnnnnnnnnnnnnnnnnnnnnnnnnnnnnnnnnnnnnnnnnnnnnnnnnnnnnnnnnnnnnnnnnnnnnnnnnnnnnnnnnnnnnnnnnnnnnnnnnnnnnnnnnnnnnnnnnnnnnnnnnnnnnnnnnnnnnnnnnnnnnnnnnnnnnnnnnnnnnnnnnnnnnnnnnnnnnnnnnnnnnnnnnnnnnnnnnnnnnnnnnnnnnnnnnnnnnnnnnnnnnnnnnnnnnnnnnnnnnnnnnnnnnnnnnnnnnnnnnnnnnnnnnnnnnnnnnnnnnnnnnnnnnnnnnnnnnnnnnnnnnnnnnnnnnnnnnnnnnnnnnnnnnnnnnnnnnnnnnnnnnnnnnnnnnnnnnnnnnnnnnnnnnnnnnnnnnnnnnnnnnnnnnnnnnnnnnnnnnnnnnnnnnnnnnnnnnnnnnnnnnnnnnnnnnnnnnnnnnnnnnnnnnnnnnnnnnnnnnnnnnnnnnnnnnnnnnnnnnnnnnnnnnnnnnnnnnnnnnnnnnnnnnnnnnnnnnnnnnnnnnnnnnnnnnnnnnnnnnnnnnnnnnnnnnnnnnnnnnnnnnnnnnnnnnnnnnnnnnnnnnnnnnnnnnnnnnnnnnnnnnnnnnnnnnnnnnnnnnnnnnnnnnnnnnnnnnnnnnnnnnnnnnnnnnnnnnnnnnnnnnnnnnnnnnnnnnnnnnnnnnnnnnnnnnnnnnnnnnnnnnnnnnnnnnnnnnnnnnnnnnnnnnnnnnnnnnnnnnnnnnnnnnnnnnnnnnnnnnnnnnnnnnnnnnnnnnnnnnnnnnnnnnnnnnnnnnnnnnnnnnnnnnnnnnnnnnnnnnnnnnnnnnnnnnnnnnnnnnnnnnnnnnnnnnnnnnnnnnnnnnnnnnnnnnnnnnnnnnnnnnnnnnnnnnnnnnnnnnnnnnnnnnnnnnnnnnnnnnnnnnnnnnnnnnnnnnnnnnnnnnnnnnnnnnnnnnnnnnnnnnnnnnnnnnnnnnnnnnnnnnnnnnnnnnnnnnnnnnnnnnnnnnnnnnnnnnnnnnnnnnnnnnnnnnnnnnnnnnnnnnnnnnnnnnnnnnnnnnnnnnnnnnnnnnnnnnnnnnnnnnnnnnnnnnnnnnnnnnnnnnnnnnnnnnnnnnnnnnnnnnnnnnnnnnnnnnnnnnnnnnnnnnnnnnnnnnnnnnnnnnnnnnnnnnnnnnnnnnnnnnnnnnnnnnnnnnnnnnnnnnnnnnnnnnnnnnnnnnnnnnnnnnnnnnnnnnnnnnnnnnnnnnnnnnnnnnnnnnnnnnnnnnnnnnnnnnnnnnnnnnnnnnnnnnnnnnnnnnnnnnnnnnnnnnnnnnnnnnnnnnnnnnnnnnnnnnnnnnnnnnnnnnnnnnnnnnnnnnnnnnnnnnnnnnnnnnnnnnnnnnnnnnnnnnnnnnnnnnnnnnnnnnnnnnnnnnnnnnnnnnnnnnnnnnnnnnnnnnnnnnnnnnnnnnnnnnnnnnnnnnnnnnnnnnnnnnnnnnnnnnnnnnnnnnnnnnnnnnnnnnnnnnnnnnnnnnnnnnnnnnnnnnnnnnnnnnnnnnnnnnnnnnnnnnnnnnnnnnnnnnnnnnnnnnnnnnnnnnnnnnnnnnnnnnnnnnnnnnnnnnnnnnnnnnnnnnnnnnnnnnnnnnnnnnnnnnnnnnnnnnnnnnnnnnnnnnnnnnnnnnnnnnnnnnnnnnnnnnnnnnnnnnnnnnnnnnnnnnnnnnnnnnnnnnnnnnnnnnnnnnnnnnnnnnnnnnnnnnnnnnnnnnnnnnnnnnnnnnnnnnnnnnnnnnnnnnnnnnnnnnnnnnnnnnnnnnnnnnnnnnnnnnnnnnnnnnnnnnnnnnnnnnnnnnnnnnnnnnnnnnnnnnnnnnnnnnnnnnnnnnnnnnnnnnnnnnnnnnnnnnnnnnnnnnnnnnnnnnnnnnnnnnnnnnnnnnnnnnnnnnnnnnnnnnnnnnnnnnnnnnnnnnnnnnnnnnnnnnnnnnnnnnnnnnnnnnnnnnnnnnnnnnnnnnnnnnnnnnnnnnnnnnnnnnnnnnnnnnnnnnnnnnnnnnnnnnnnnnnnnnnnnnnnnnnnnnnnnnnnnnnnnnnnnnnnnnnnnnnnnnnnnnnnnnnnnnnnnnnnnnnnnnnnnnnnnnnnnnnnnnnnnnnnnnnnnnnnnnnnnnnnnnnnnnnnnnnnnnnnnnnnnnnnnnnnnnnnnnnnnnnnnnnnnnnnnnnnnnnnnnnnnnnnnnnnnnnnnnnnnnnnnnnnnnnnnnnnnnnnnnnnnnnnnnnnnnnnnnnnnnnnnnnnnnnnnnnnnnnnnnnnnnnnnnnnnnnnnnnnnnnnnnnnnnnnnnnnnnnnnnnnnnnnnnnnnnnnnnnnnnnnnnnnnnnnnnnnnnnnnnnnnnnnnnnnnnnnnnnnnnnnnnnnnnnnnnnnnnnnnnnnnnnnnnnnnnnnnnnnnnnnnnnnnnnnnnnnnnnnnnnnnnnnnnnnnnnnnnnnnnnnnnnnnnnnnnnnnnnnnnnnnnnnnnnnnnnnnnnnnnnnnnnnnnnnnnnnnnnnnnnnnnnnnnnnnnnnnnnnnnnnnnnnnnnnnnnnnnnnnnnnnnnnnnnnnnnnnnnnnnnnnnnnnnnnnnnnnnnnnnnnnnnnnnnnnnnnnnnnnnnnnnnnnnnnnnnnnnnnnnnnnnnnnnnnnnnnnnnnnnnnnnnnnnnnnnnnnnnnnnnnnnnnnnnnnnnnnnnnnnnnnnnnnnnnnnnnnnnnnnnnnnnnnnnnnnnnnnnnnnnnnnnnnnnnnnnnnnnnnnnnnnnnnnnnnnnnnnnnnnnnnnnnnnnnnnnnnnnnnnnnnnnnnnnnnnnnnnnnnnnnnnnnnnnnnnnnnnnnnnnnnnnnnnnnnnnnnnnnnnnnnnnnnnnnnnnnnnnnnnnnnnnnnnnnnnnnnnnnnnnnnnnnnnnnnnnnnnnnnnnnnnnnnnnnnnnnnnnnnnnnnnnnnnnnnnnnnnnnnnnnnnnnnnnnnnnnnnnnnnnnnnnnnnnnnnnnnnnnnnnnnnnnnnnnnnnnnnnnnnnnnnnnnnnnnnnnnnnnnnnnnnnnnnnnnnnnnnnnnnnnnnnnnnnnnnnnnnnnnnnnnnnnnnnnnnnnnnnnnnnnnnnnnnnnnnnnnnnnnnnnnnnnnnnnnnnnnnnnnnnnnnnnnnnnnnnnnnnnnnnnnnnnnnnnnnnnnnnnnnnnnnnnnnnnnnnnnnnnnnnnnnnnnnnnnnnnnnnnnnnnnnnnnnnnnnnnnnnnnnnnnnnnnnnnnnnnnnnnnnnnnnnnnnnnnnnnnnnnnnnnnnnnnnnnnnnnnnnnnnnnnnnnnnnnnnnnnnnnnnnnnnnnnnnnnnnnnnnnnnnnnnnnnnnnnnnnnnnnnnnnnnnnnnnnnnnnnnnnnnnnnnnnnnnnnnnnnnnnnnnnnnnnnnnnnnnnnnnnnnnnnnnnnnnnnnnnnnnnnnnnnnnnnnnnnnnnnnnnnnnnnnnnnnnnnnnnnnnnnnnnnnnnnnnnnnnnnnnnnnnnnnnnnnnnnnnnnnnnnnnnnnnnnnnnnnnnnnnnnnnnnnnnnnnnnnnnnnnnnnnnnnnnnnnnnnnnnnnnnnnnnnnnnnnnnnnnnnnnnnnnnnnnnnnnnnnnnnnnnnnnnnnnnnnnnnnnnnnnnnnnnnnnnnnnnnnnnnnnnnnnnnnnnnnnnnnnnnnnnnnnnnnnnnnnnnnnnnnnnnnnnnnnnnnnnnnnnnnnnnnnnnnnnnnnnnnnnnnnnnnnnnnnnnnnnnnnnnnnnnnnnnnnnnnnnnnnnnnnnnnnnnnnnnnnnnnnnnnnnnnnnnnnnnnnnnnnnnnnnnnnnnnnnnnnnnnnnnnnnnnnnnnnnnnnnnnnnnnnnnnnnnnnnnnnnnnnnnnnnnnnnnnnnnnnnnnnnnnnnnnnnnnnnnnnnnnnnnnnnnnnnnnnnnnnnnnnnnnnnnnnnnnnnnnnnnnnnnnnnnnnnnnnnnnnnnnnnnnnnnnnnnnnnnnnnnnnnnnnnnnnnnnnnnnnnnnnnnnnnnnnnnnnnnnnnnnnnnnnnnnnnnnnnnnnnnnnnnnnnnnnnnnnnnnnnnnnnnnnnnnnnnnnnnnnnnnnnnnnnnnnnnnnnnnnnnnnnnnnnnnnnnnnnnnnnnnnnnnnnnnnnnnnnnnnnnnnnnnnnnnnnnnnnnnnnnnnnnnnnnnnnnnnnnnnnnnnnnnnnnnnnnnnnnnnnnnnnnnnnnnnnnnnnnnnnnnnnnnnnnnnnnnnnnnnnnnnnnnnnnnnnnnnnnnnnnnnnnnnnnnnnnnnnnnnnnnnnnnnnnnnnnnnnnnnnnnnnnnnnnnnnnnnnnnnnnnnnnnnnnnnnnnnnnnnnnnnnnnnnnnnnnnnnnnnnnnnnnnnnnnnnnnnnnnnnnnnnnnnnnnnnnnnnnnnnnnnnnnnnnnnnnnnnnnnnnnnnnnnnnnnnnnnnnnnnnnnnnnnnnnnnnnnnnnnnnnnnnnnnnnnnnnnnnnnnnnnnnnnnnnnnnnnnnnnnnnnnnnnnnnnnnnnnnnnnnnnnnnnnnnnnnnnnnnnnnnnnnnnnnnnnnnnnnnnnnnnnnnnnnnnnnnnnnnnnnnnnnnnnnnnnnnnnnnnnnnnnnnnnnnnnnnnnnnnnnnnnnnnnnnnnnnnnnnnnnnnnnnnnnnnnnnnnnnnnnnnnnnnnnnnnnnnnnnnnnnnnnnnnnnnnnnnnnnnnnnnnnnnnnnnnnnnnnnnnnnnnnnnnnnnnnnnnnnnnnnnnnnnnnnnnnnnnnnnnnnnnnnnnnnnnnnnnnnnnnnnnnnnnnnnnnnnnnnnnnnnnnnnnnnnnnnnnnnnnnnnnnnnnnnnnnnnnnnnnnnnnnnnnnnnnnnnnnnnnnnnnnnnnnnnnnnnnnnnnnnnnnnnnnnnnnnnnnnnnnnnnnnnnnnnnnnnnnnnnnnnnnnnnnnnnnnnnnnnnnnnnnnnnnnnnnnnnnnnnnnnnnnnnnnnnnnnnnnnnnnnnnnnnnnnnnnnnnnnnnnnnnnnnnnnnnnnnnnnnnnnnnnnnnnnnnnnnnnnnnnnnnnnnnnnnnnnnnnnnnnnnnnnnnnnnnnnnnnnnnnnnnnnnnnnnnnnnnnnnnnnnnnnnnnnnnnnnnnnnnnnnnnnnnnnnnnnnnnnnnnnnnnnnnnnnnnnnnnnnnnnnnnnnnnnnnnnnnnnnnnnnnnnnnnnnnnnnnnnnnnnnnnnnnnnnnnnnnnnnnnnnnnnnnnnnnnnnnnnnnnnnnnnnnnnnnnnnnnnnnnnnnnnnnnnnnnnnnnnnnnnnnnnnnnnnnnnnnnnnnnnnnnnnnnnnnnnnnnnnnnnnnnnnnnnnnnnnnnnnnnnnnnnnnnnnnnnnnnnnnnnnnnnnnnnnnnnnnnnnnnnnnnnnnnnnnnnnnnnnnnnnnnnnnnnnnnnnnnnnnnnnnnnnnnnnnnnnnnnnnnnnnnnnnnnnnnnnnnnnnnnnnnnnnnnnnnnnnnnnnnnnnnnnnnnnnnnnnnnnnnnnnnnnnnnnnnnnnnnnnnnnnnnnnnnnnnnnnnnnnnnnnnnnnnnnnnnnnnnnnnnnnnnnnnnnnnnnnnnnnnnnnnnnnnnnnnnnnnnnnnnnnnnnnnnnnnnnnnnnnnnnnnnnnnnnnnnnnnnnnnnnnnnnnnnnnnnnnnnnnnnnnnnnnnnnnnnnnnnnnnnnnnnnnnnnnnnnnnnnnnnnnnnnnnnnnnnnnnnnnnnnnnnnnnnnnnnnnnnnnnnnnnnnnnnnnnnnnnnnnnnnnnnnnnnnnnnnnnnnnnnnnnnnnnnnnnnnnnnnnnnnnnnnnnnnnnnnnnnnnnnnnnnnnnnnnnnnnnnnnnnnnnnnnnnnnnnnnnnnnnnnnnnnnnnnnnnnnnnnnnnnnnnnnnnnnnnnnnnnnnnnnnnnnnnnnnnnnnnnnnnnnnnnnnnnnnnnnnnnnnnnnnnnnnnnnnnnnnnnnnnnnnnnnnnnnnnnnnnnnnnnnnnnnnnnnnnnnnnnnnnnnnnnnnnnnnnnnnnnnnnnnnnnnnnnnnnnnnnnnnnnnnnnnnnnnnnnnnnnnnnnnnnnnnnnnnnnnnnnnnnnnnnnnnnnnnnnnnnnnnnnnnnnnnnnnnnnnnnnnnnnnnnnnnnnnnnnnnnnnnnnnnnnnnnnnnnnnnnnnnnnnnnnnnnnnnnnnnnnnnnnnnnnnnnnnnnnnnnnnnnnnnnnnnnnnnnnnnnnnnnnnnnnnnnnnnnnnnnnnnnnnnnnnnnnnnnnnnnnnnnnnnnnnnnnnnnnnnnnnnnnnnnnnnnnnnnnnnnnnnnnnnnnnnnnnnnnnnnnnnnnnnnnnnnnnnnnnnnnnnnnnnnnnnnnnnnnnnnnnnnnnnnnnnnnnnnnnnnnnnnnnnnnnnnnnnnnnnnnnnnnnnnnnnnnnnnnnnnnnnnnnnnnnnnnnnnnnnnnnnnnnnnnnnnnnnnnnnnnnnnnnnnnnnnnnnnnnnnnnnnnnnnnnnnnnnnnnnnnnnnnnnnnnnnnnnnnnnnnnnnnnnnnnnnnnnnnnnnnnnnnnnnnnnnnnnnnnnnnnnnnnnnnnnnnnnnnnnnnnnnnnnnnnnnnnnnnnnnnnnnnnnnnnnnnnnnnnnnnnnnnnnnnnnnnnnnnnnnnnnnnnnnnnnnnnnnnnnnnnnnnnnnnnnnnnnnnnnnnnnnnnnnnnnnnnnnnnnnnnnnnnnnnnnnnnnnnnnnnnnnnnnnnnnnnnnnnnnnnnnnnnnnnnnnnnnnnnnnnnnnnnnnnnnnnnnnnnnnnnnnnnnnnnnnnnnnnnnnnnnnnnnnnnnnnnnnnnnnnnnnnnnnnnnnnnnnnnnnnnnnnnnnnnnnnnnnnnnnnnnnnnnnnnnnnnnnnnnnnnnnnnnnnnnnnnnnnnnnnnnnnnnnnnnnnnnnnnnnnnnnnnnnnnnnnnnnnnnnnnnnnnnnnnnnnnnnnnnnnnnnnnnnnnnnnnnnnnnnnnnnnnnnnnnnnnnnnnnnnnnnnnnnnnnnnnnnnnnnnnnnnnnnnnnnnnnnnnnnnnnnnnnnnnnnnnnnnnnnnnnnnnnnnnnnnnnnnnnnnnnnnnnnnnnnnnnnnnnnnnnnnnnnnnnnnnnnnnnnnnnnnnnnnnnnnnnnnnnnnnnnnnnnnnnnnnnnnnnnnnnnnnnnnnnnnnnnnnnnnnnnnnnnnnnnnnnnnnnnnnnnnnnnnnnnnnnnnnnnnnnnnnnnnnnnnnnnnnnnnnnnnnnnnnnnnnnnnnnnnnnnnnnnnnnnnnnnnnnnnnnnnnnnnnnnnnnnnnnnnnnnnnnnnnnnnnnnnnnnnnnnnnnnnnnnnnnnnnnnnnnnnnnnnnnnnnnnnnnnnnnnnnnnnnnnnnnnnnnnnnnnnnnnnnnnnnnnnnnnnnnnnnnnnnnnnnnnnnnnnnnnnnnnnnnnnnnnnnnnnnnnnnnnnnnnnnnnnnnnnnnnnnnnnnnnnnnnnnnnnnnnnnnnnnnnnnnnnnnnnnnnnnnnnnnnnnnnnnnnnnnnnnnnnnnnnnnnnnnnnnnnnnnnnnnnnnnnnnnnnnnnnnnnnnnnnnnnnnnnnnnnnnnnnnnnnnnnnnnnnnnnnnnnnnnnnnnnnnnnnnnnnnnnnnnnnnnnnnnnnnnnnnnnnnnnnnnnnnnnnnnnnnnnnnnnnnnnnnnnnnnnnnnnnnnnnnnnnnnnnnnnnnnnnnnnnnnnnnnnnnnnnnnnnnnnnnnnnnnnnnnnnnnnnnnnnnnnnnnnnnnnnnnnnnnnnnnnnnnnnnnnnnnnnnnnnnnnnnnnnnnnnnnnnnnnnnnnnnnnnnnnnnnnnnnnnnnnnnnnnnnnnnnnnnnnnnnnnnnnnnnnnnnnnnnnnnnnnnnnnnnnnnnnnnnnnnnnnnnnnnnnnnnnnnnnnnnnnnnnnnnnnnnnnnnnnnnnnnnnnnnnnnnnnnnnnnnnnnnnnnnnnnnnnnnnnnnnnnnnnnnnnnnnnnnnnnnnnnnnnnnnnnnnnnnnnnnnnnnnnnnnnnnnnnnnnnnnnnnnnnnnnnnnnnnnnnnnnnnnnnnnnnnnnnnnnnnnnnnnnnnnnnnnnnnnnnnnnnnnnnnnnnnnnnnnnnnnnnnnnnnnnnnnnnnnnnnnnnnnnnnnnnnnnnnnnnnnnnnnnnnnnnnnnnnnnnnnnnnnnnnnnnnnnnnnnnnnnnnnnnnnnnnnnnnnnnnnnnnnnnnnnnnnnnnnnnnnnnnnnnnnnnnnnnnnnnnnnnnnnnnnnnnnnnnnnnnnnnnnnnnnnnnnnnnnnnnnnnnnnnnnnnnnnnnnnnnnnnnnnnnnnnnnnnnnnnnnnnnnnnnnnnnnnnnnnnnnnnnnnnnnnnnnnnnnnnnnnnnnnnnnnnnnnnnnnnnnnnnnnnnnnnnnnnnnnnnnnnnnnnnnnnnnnnnnnnnnnnnnnnnnnnnnnnnnnnnnnnnnnnnnnnnnnnnnnnnnnnnnnnnnnnnnnnnnnnnnnnnnnnnnnnnnnnnnnnnnnnnnnnnnnnnnnnnnnnnnnnnnnnnnnnnnnnnnnnnnnnnnnnnnnnnnnnnnnnnnnnnnnnnnnnnnnnnnnnnnnnnnnnnnnnnnnnnnnnnnnnnnnnnnnnnnnnnnnnnnnnnnnnnnnnnnnnnnnnnnnnnnnnnnnnnnnnnnnnnnnnnnnnnnnnnnnnnnnnnnnnnnnnnnnnnnnnnnnnnnnnnnnnnnnnnnnnnnnnnnnnnnnnnnnnnnnnnnnnnnnnnnnnnnnnnnnnnnnnnnnnnnnnnnnnnnnnnnnnnnnnnnnnnnnnnnnnnnnnnnnnnnnnnnnnnnnnnnnnnnnnnnnnnnnnnnnnnnnnnnnnnnnnnnnnnnnnnnnnnnnnnnnnnnnnnnnnnnnnnnnnnnnnnnnnnnnnnnnnnnnnnnnnnnnnnnnnnnnnnnnnnnnnnnnnnnnnnnnnnnnnnnnnnnnnnnnnnnnnnnnnnnnnnnnnnnnnnnnnnnnnnnnnnnnnnnnnnnnnnnnnnnnnnnnnnnnnnnnnnnnnnnnnnnnnnnnnnnnnnnnnnnnnnnnnnnnnnnnnnnnnnnnnnnnnnnnnnnnnnnnnnnnnnnnnnnnnnnnnnnnnnnnnnnnnnnnnnnnnnnnnnnnnnnnnnnnnnnnnnnnnnnnnnnnnnnnnnnnnnnnnnnnnnnnnnnnnnnnnnnnnnnnnnnnnnnnnnnnnnnnnnnnnnnnnnnnnnnnnnnnnnnnnnnnnnnnnnnnnnnnnnnnnnnnnnnnnnnnnnnnnnnnnnnnnnnnnnnnnnnnnnnnnnnnnnnnnnnnnnnnnnnnnnnnnnnnnnnnnnnnnnnnnnnnnnnnnnnnnnnnnnnnnnnnnnnnnnnnnnnnnnnnnnnnnnnnnnnnnnnnnnnnnnnnnnnnnnnnnnnnnnnnnnnnnnnnnnnnnnnnnnnnnnnnnnnnnnnnnnnnnnnnnnnnnnnnnnnnnnnnnnnnnnnnnnnnnnnnnnnnnnnnnnnnnnnnnnnnnnnnnnnnnnnnnnnnnnnnnnnnnnnnnnnnnnnnnnnnnnnnnnnnnnnnnnnnnnnnnnnnnnnnnnnnnnnnnnnnnnnnnnnnnnnnnnnnnnnnnnnnnnnnnnnnnnnnnnnnnnnnnnnnnnnnnnnnnnnnnnnnnnnnnnnnnnnnnnnnnnnnnnnnnnnnnnnnnnnnnnnnnnnnnnnnnnnnnnnnnnnnnnnnnnnnnnnnnnnnnnnnnnnnnnnnnnnnnnnnnnnnnnnnnnnnnnnnnnnnnnnnnnnnnnnnnnnnnnnnnnnnnnnnnnnnnnnnnnnnnnnnnnnnnnnnnnnnnnnnnnnnnnnnnnnnnnnnnnnnnnnnnnnnnnnnnnnnnnnnnnnnnnnnnnnnnnnnnnnnnnnnnnnnnnnnnnnnnnnnnnnnnnnnnnnnnnnnnnnnnnnnnnnnnnnnnnnnnnnnnnnnnnnnnnnnnnnnnnnnnnnnnnnnnnnnnnnnnnnnnnnnnnnnnnnnnnnnnnnnnnnnnnnnnnnnnnnnnnnnnnnnnnnnnnnnnnnnnnnnnnnnnnnnnnnnnnnnnnnnnnnnnnnnnnnnnnnnnnnnnnnnnnnnnnnnnnnnnnnnnnnnnnnnnnnnnnnnnnnnnnnnnnnnnnnnnnnnnnnnnnnnnnnnnnnnnnnnnnnnnnnnnnnnnnnnnnnnnnnnnnnnnnnnnnnnnnnnnnnnnnnnnnnnnnnnnnnnnnnnnnnnnnnnnnnnnnnnnnnnnnnnnnnnnnnnnnnnnnnnnnnnnnnnnnnnnnnnnnnnnnnnnnnnnnnnnnnnnnnnnnnnnnnnnnnnnnnnnnnnnnnnnnnnnnnnnnnnnnnnnnnnnnnnnnnnnnnnnnnnnnnnnnnnnnnnnnnnnnnnnnnnnnnnnnnnnnnnnnnnnnnnnnnnnnnnnnnnnnnnnnnnnnnnnnnnnnnnnnnnnnnnnnnnnnnnnnnnnnnnnnnnnnnnnnnnnnnnnnnnnnnnnnnnnnnnnnnnnnnnnnnnnnnnnnnnnnnnnnnnnnnnnnnnnnnnnnnnnnnnnnnnnnnnnnnnnnnnnnnnnnnnnnnnnnnnnnnnnnnnnnnnnnnnnnnnnnnnnnnnnnnnnnnnnnnnnnnnnnnnnnnnnnnnnnnnnnnnnnnnnnnnnnnnnnnnnnnnnnnnnnnnnnnnnnnnnnnnnnnnnnnnnnnnnnnnnnnnnnnnnnnnnnnnnnnnnnnnnnnnnnnnnnnnnnnnnnnnnnnnnnnnnnnnnnnnnnnnnnnnnnnnnnnnnnnnnnnnnnnnnnnnnnnnnnnnnnnnnnnnnnnnnnnnnnnnnnnnnnnnnnnnnnnnnnnnnnnnnnnnnnnnnnnnnnnnnnnnnnnnnnnnnnnnnnnnnnnnnnnnnnnnnnnnnnnnnnnnnnnnnnnnnnnnnnnnnnnnnnnnnnnnnnnnnnnnnnnnnnnnnnnnnnnnnnnnnnnnnnnnnnnnnnnnnnnnnnnnnnnnnnnnnnnnnnnnnnnnnnnnnnnnnnnnnnnnnnnnnnnnnnnnnnnnnnnnnnnnnnnnnnnnnnnnnnnnnnnnnnnnnnnnnnnnnnnnnnnnnnnnnnnnnnnnnnnnnnnnnnnnnnnnnnnnnnnnnnnnnnnnnnnnnnnnnnnnnnnnnnnnnnnnnnnnnnnnnnnnnnnnnnnnnnnnnnnnnnnnnnnnnnnnnnnnnnnnnnnnnnnnnnnnnnnnnnnnnnnnnnnnnnnnnnnnnnnnnnnnnnnnnnnnnnnnnnnnnnnnnnnnnnnnnnnnnnnnnnnnnnnnnnnnnnnnnnnnnnnnnnnnnnnnnnnnnnnnnnnnnnnnnnnnnnnnnnnnnnnnnnnnnnnnnnnnnnnnnnnnnnnnnnnnnnnnnnnnnnnnnnnnnnnnnnnnnnnnnnnnnnnnnnnnnnnnnnnnnnnnnnnnnnnnnnnnnnnnnnnnnnnnnnnnnnnnnnnnnnnnnnnnnnnnnnnnnnnnnnnnnnnnnnnnnnnnnnnnnnnnnnnnnnnnnnnnnnnnnnnnnnnnnnnnnnnnnnnnnnnnnnnnnnnnnnnnnnnnnnnnnnnnnnnnnnnnnnnnnnnnnnnnnnnnnnnnnnnnnnnnnnnnnnnnnnnnnnnnnnnnnnnnnnnnnnnnnnnnnnnnnnnnnnnnnnnnnnnnnnnnnnnnnnnnnnnnnnnnnnnnnnnnnnnnnnnnnnnnnnnnnnnnnnnnnnnnnnnnnnnnnnnnnnnnnnnnnnnnnnnnnnnnnnnnnnnnnnnnnnnnnnnnnnnnnnnnnnnnnnnnnnnnnnnnnnnnnnnnnnnnnnnnnnnnnnnnnnnnnnnnnnnnnnnnnnnnnnnnnnnnnnnnnnnnnnnnnnnnnnnnnnnnnnnnnnnnnnnnnnnnnnnnnnnnnnnnnnnnnnnnnnnnnnnnnnnnnnnnnnnnnnnnnnnnnnnnnnnnnnnnnnnnnnnnnnnnnnnnnnnnnnnnnnnnnnnnnnnnnnnnnnnnnnnnnnnnnnnnnnnnnnnnnnnnnnnnnnnnnnnnnnnnnnnnnnnnnnnnnnnnnnnnnnnnnnnnnnnnnnnnnnnnnnnnnnnnnnnnnnnnnnnnnnnnnnnnnnnnnnnnnnnnnnnnnnnnnnnnnnnnnnnnnnnnnnnnnnnnnnnnnnnnnnnnnnnnnnnnnnnnnnnnnnnnnnnnnnnnnnnnnnnnnnnnnnnnnnnnnnnnnnnnnnnnnnnnnnnnnnnnnnnnnnnnnnnnnnnnnnnnnnnnnnnnnnnnnnnnnnnnnnnnnnnnnnnnnnnnnnnnnnnnnnnnnnnnnnnnnnnnnnnnnnnnnnnnnnnnnnnnnnnnnnnnnnnnnnnnnnnnnnnnnnnnnnnnnnnnnnnnnnnnnnnnnnnnnnnnnnnnnnnnnnnnnnnnnnnnnnnnnnnnnnnnnnnnnnnnnnnnnnnnnnnnnnnnnnnnnnnnnnnnnnnnnnnnnnnnnnnnnnnnnnnnnnnnnnnnnnnnnnnnnnnnnnnnnnnnnnnnnnnnnnnnnnnnnnnnnnnnnnnnnnnnnnnnnnnnnnnnnnnnnnnnnnnnnnnnnnnnnnnnnnnnnnnnnnnnnnnnnnnnnnnnnnnnnnnnnnnnnnnnnnnnnnnnnnnnnnnnnnnnnnnnnnnnnnnnnnnnnnnnnnnnnnnnnnnnnnnnnnnnnnnnnnnnnnnnnnnnnnnnnnnnnnnnnnnnnnnnnnnnnnnnnnnnnnnnnnnnnnnnnnnnnnnnnnnnnnnnnnnnnnnnnnnnnnnnnnnnnnnnnnnnnnnnnnnnnnnnnnnnnnnnnnnnnnnnnnnnnnnnnnnnnnnnnnnnnnnnnnnnnnnnnnnnnnnnnnnnnnnnnnnnnnnnnnnnnnnnnnnnnnnnnnnnnnnnnnnnnnnnnnnnnnnnnnnnnnnnnnnnnnnnnnnnnnnnnnnnnnnnnnnnnnnnnnnnnnnnnnnnnnnnnnnnnnnnnnnnnnnnnnnnnnnnnnnnnnnnnnnnnnnnnnnnnnnnnnnnnnnnnnnnnnnnnnnnnnnnnnnnnnnnnnnnnnnnnnnnnnnnnnnnnnnnnnnnnnnnnnnnnnnnnnnnnnnnnnnnnnnnnnnnnnnnnnnnnnnnnnnnnnnnnnnnnnnnnnnnnnnnnnnnnnnnnnnnnnnnnnnnnnnnnnnnnnnnnnnnnnnnnnnnnnnnnnnnnnnnnnnnnnnnnnnnnnnnnnnnnnnnnnnnnnnnnnnnnnnnnnnnnnnnnnnnnnnnnnnnnnnnnnnnnnnnnnnnnnnnnnnnnnnnnnnnnnnnnnnnnnnnnnnnnnnnnnnnnnnnnnnnnnnnnnnnnnnnnnnnnnnnnnnnnnnnnnnnnnnnnnnnnnnnnnnnnnnnnnnnnnnnnnnnnnnnnnnnnnnnnnnnnnnnnnnnnnnnnnnnnnnnnnnnnnnnnnnnnnnnnnnnnnnnnnnnnnnnnnnnnnnnnnnnnnnnnnnnnnnnnnnnnnnnnnnnnnnnnnnnnnnnnnnnnnnnnnnnnnnnnnnnnnnnnnnnnnnnnnnnnnnnnnnnnnnnnnnnnnnnnnnnnnnnnnnnnnnnnnnnnnnnnnnnnnnnnnnnnnnnnnnnnnnnnnnnnnnnnnnnnnnnnnnnnnnnnnnnnnnnnnnnnnnnnnnnnnnnnnnnnnnnnnnnnnnnnnnnnnnnnnnnnnnnnnnnnnnnnnnnnnnnnnnnnnnnnnnnnnnnnnnnnnnnnnnnnnnnnnnnnnnnnnnnnnnnnnnnnnnnnnnnnnnnnnnnnnnnnnnnnnnnnnnnnnnnnnnnnnnnnnnnnnnnnnnnnnnnnnnnnnnnnnnnnnnnnnnnnnnnnnnnnnnnnnnnnnnnnnnnnnnnnnnnnnnnnnnnnnnnnnnnnnnnnnnnnnnnnnnnnnnnnnnnnnnnnnnnnnnnnnnnnnnnnnnnnnnnnnnnnnnnnnnnnnnnnnnnnnnnnnnnnnnnnnnnnnnnnnnnnnnnnnnnnnnnnnnnnnnnnnnnnnnnnnnnnnnnnnnnnnnnnnnnnnnnnnnnnnnnnnnnnnnnnnnnnnnnnnnnnnnnnnnnnnnnnnnnnnnnnnnnnnnnnnnnnnnnnnnnnnnnnnnnnnnnnnnnnnnnnnnnnnnnnnnnnnnnnnnnnnnnnnnnnnnnnnnnnnnnnnnnnnnnnnnnnnnnnnnnnnnnnnnnnnnnnnnnnnnnnnnnnnnnnnnnnnnnnnnnnnnnnnnnnnnnnnnnnnnnnnnnnnnnnnnnnnnnnnnnnnnnnnnnnnnnnnnnnnnnnnnnnnnnnnnnnnnnnnnnnnnnnnnnnnnnnnnnnnnnnnnnnnnnnnnnnnnnnnnnnnnnnnnnnnnnnnnnnnnnnnnnnnnnnnnnnnnnnnnnnnnnnnnnnnnnnnnnnnnnnnnnnnnnnnnnnnnnnnnnnnnnnnnnnnnnnnnnnnnnnnnnnnnnnnnnnnnnnnnnnnnnnnnnnnnnnnnnnnnnnnnnnnnnnnnnnnnnnnnnnnnnnnnnnnnnnnnnnnnnnnnnnnnnnnnnnnnnnnnnnnnnnnnnnnnnnnnnnnnnnnnnnnnnnnnnnnnnnnnnnnnnnnnnnnnnnnnnnnnnnnnnnnnnnnnnnnnnnnnnnnnnnnnnnnnnnnnnnnnnnnnnnnnnnnnnnnnnnnnnnnnnnnnnnnnnnnnnnnnnnnnnnnnnnnnnnnnnnnnnnnnnnnnnnnnnnnnnnnnnnnnnnnnnnnnnnnnnnnnnnnnnnnnnnnnnnnnnnnnnnnnnnnnnnnnnnnnnnnnnnnnnnnnnnnnnnnnnnnnnnnnnnnnnnnnnnnnnnnnnnnnnnnnnnnnnnnnnnnnnnnnnnnnnnnnnnnnnnnnnnnnnnnnnnnnnnnnnnnnnnnnnnnnnnnnnnnnnnnnnnnnnnnnnnnnnnnnnnnnnnnnnnnnnnnnnnnnnnnnnnnnnnnnnnnnnnnnnnnnnnnnnnnnnnnnnnnnnnnnnnnnnnnnnnnnnnnnnnnnnnnnnnnnnnnnnnnnnnnnnnnnnnnnnnnnnnnnnnnnnnnnnnnnnnnnnnnnnnnnnnnnnnnnnnnnnnnnnnnnnnnnnnnnnnnnnnnnnnnnnnnnnnnnnnnnnnnnnnnnnnnnnnnnnnnnnnnnnnnnnnnnnnnnnnnnnnnnnnnnnnnnnnnnnnnnnnnnnnnnnnnnnnnnnnnnnnnnnnnnnnnnnnnnnnnnnnnnnnnnnnnnnnnnnnnnnnnnnnnnnnnnnnnnnnnnnnnnnnnnnnnnnnnnnnnnnnnnnnnnnnnnnnnnnnnnnnnnnnnnnnnnnnnnnnnnnnnnnnnnnnnnnnnnnnnnnnnnnnnnnnnnnnnnnnnnnnnnnnnnnnnnnnnnnnnnnnnnnnnnnnnnnnnnnnnnnnnnnnnnnnnnnnnnnnnnnnnnnnnnnnnnnnnnnnnnnnnnnnnnnnnnnnnnnnnnnnnnnnnnnnnnnnnnnnnnnnnnnnnnnnnnnnnnnnnnnnnnnnnnnnnnnnnnnnnnnnnnnnnnnnnnnnnnnnnnnnnnnnnnnnnnnnnnnnnnnnnnnnnnnnnnnnnnnnnnnnnnnnnnnnnnnnnnnnnnnnnnnnnnnnnnnnnnnnnnnnnnnnnnnnnnnnnnnnnnnnnnnnnnnnnnnnnnnnnnnnnnnnnnnnnnnnnnnnnnnnnnnnnnnnnnnnnnnnnnnnnnnnnnnnnnnnnnnnnnnnnnnnnnnnnnnnnnnnnnnnnnnnnnnnnnnnnnnnnnnnnnnnnnnnnnnnnnnnnnnnnnnnnnnnnnnnnnnnnnnnnnnnnnnnnnnnnnnnnnnnnnnnnnnnnnnnnnnnnnnnnnnnnnnnnnnnnnnnnnnnnnnnnnnnnnnnnnnnnnnnnnnnnnnnnnnnnnnnnnnnnnnnnnnnnnnnnnnnnnnnnnnnnnnnnnnnnnnnnnnnnnnnnnnnnnnnnnnnnnnnnnnnnnnnnnnnnnnnnnnnnnnnnnnnnnnnnnnnnnnnnnnnnnnnnnnnnnnnnnnnnnnnnnnnnnnnnnnnnnnnnnnnnnnnnnnnnnnnnnnnnnnnnnnnnnnnnnnnnnnnnnnnnnnnnnnnnnnnnnnnnnnnnnnnnnnnnnnnnnnnnnnnnnnnnnnnnnnnnnnnnnnnnnnnnnnnnnnnnnnnnnnnnnnnnnnnnnnnnnnnnnnnnnnnnnnnnnnnnnnnnnnnnnnnnnnnnnnnnnnnnnnnnnnnnnnnnnnnnnnnnnnnnnnnnnnnnnnnnnnnnnnnnnnnnnnnnnnnnnnnnnnnnnnnnnnnnnnnnnnnnnnnnnnnnnnnnnnnnnnnnnnnnnnnnnnnnnnnnnnnnnnnnnnnnnnnnnnnnnnnnnnnnnnnnnnnnnnnnnnnnnnnnnnnnnnnnnnnnnnnnnnnnnnnnnnnnnnnnnnnnnnnnnnnnnnnnnnnnnnnnnnnnnnnnnnnnnnnnnnnnnnnnnnnnnnnnnnnnnnnnnnnnnnnnnnnnnnnnnnnnnnnnnnnnnnnnnnnnnnnnnnnnnnnnnnnnnnnnnnnnnnnnnnnnnnnnnnnnnnnnnnnnnnnnnnnnnnnnnnnnnnnnnnnnnnnnnnnnnnnnnnnnnnnnnnnnnnnnnnnnnnnnnnnnnnnnnnnnnnnnnnnnnnnnnnnnnnnnnnnnnnnnnnnnnnnnnnnnnnnnnnnnnnnnnnnnnnnnnnnnnnnnnnnnnnnnnnnnnnnnnnnnnnnnnnnnnnnnnnnnnnnnnnnnnnnnnnnnnnnnnnnnnnnnnnnnnnnnnnnnnnnnnnnnnnnnnnnnnnnnnnnnnnnnnnnnnnnnnnnnnnnnnnnnnnnnnnnnnnnnnnnnnnnnnnnnnnnnnnnnnnnnnnnnnnnnnnnnnnnnnnnnnnnnnnnnnnnnnnnnnnnnnnnnnnnnnnnnnnnnnnnnnnnnnnnnnnnnnnnnnnnnnnnnnnnnnnnnnnnnnnnnnnnnnnnnnnnnnnnnnnnnnnnnnnnnnnnnnnnnnnnnnnnnnnnnnnnnnnnnnnnnnnnnnnnnnnnnnnnnnnnnnnnnnnnnnnnnnnnnnnnnnnnnnnnnnnnnnnnnntgccgtttgcgacagtgacccaaaaggtcaaagccgggcaaaacaagcatatccggatgtgcaggttacctccgacgcatctgaaatcttgcattcaccatccgttgatgcagtggccatcgtcactcccgtctggacgcatttcgagctggcaatggctgccctggaaaacggcaagcacgttttccttgaaaagccccttacttcgaatgcgatccaggctgagaggctgatcgaattggcagagaagagaaacctcaagattatggtggaccacacgttcctgtttaccggagcggtgaagaagatccgccaactgatcgatcaaggtgaactgggcaacatctactatttcgactccacgagggtccaactgggccttttccaacacgaccttgacgtgatttgggatctcgcgcctcatgatttgtccataatggaccacctcatccgaaaggaacccgaggctgtcgtcgcgaccggccaggctcacttgaacgtccatgccgacgtggcatttatcactgtgtatttcccgtccaacactattgctcacatcaacgttaactggttatctcccgtgaagatccgaaccacgctggtcgggggagagaaaaagatgctggtgtggaacgacttggaagccgtcgagaaaattaaggtctacgacaggggcgtgcaaatggccagcagggaaggagtctatgaattgcttgtcagctaccgctcgggagacatgtgggcgcccaagatcgagcagacagaagcactgaaggtcgaactggagtacttcttggagtgtatcgaaaccaaccaaacgccccttaacgacggtttggctggattgcgtgttgtcaaattgctggaagcggcaacagaatcactaaagctgagaggggcgtccgtttcggtatgaacatctaccacctcctcagcagtcacgattgtcttgccacaagcggggcactttagctcttcctcttcgcccacttcgatgatcgcgggaccgctcgtttgaatcgttgaggtaatacgagatcagaagaccggtgtccgcgtagaggatcatgcgggcttagtagctctcctcgtcccgcgccagcagaactaaattgggcagaattttgtcgccacaaattcgacgccgccgagcggcagcgtcgggccagcgaatcgggcgtccccgtctagccgccggccccacttccggcgccgtttccagttcgtgaacgccttcaaagaatttccggcgctcccgaggcggcaaggccttcacgtactccaatacttcattcgcgcccatcatcgaaaaatatcacgcacggggcgcgcagcgcaagttcggcgggctgccgcagggcgagcacagctctacgattcaccgtctcgccaaaacgcagagttgcactctgcgccagccagccttttttcttcgcggcacaaaggggcgctacagttctgctcccggacttgcctttcatccctcccaggtgtataccttcgtcatgtttatcctgtggtagccacctggcgggcggccgggtcgcgatcacccaacggccccaccacccgcctcttgccccgtgaaggaggaagcagtgaagtataacctgctcgaagaaaagtggattcccgttctatacaaggacgggatcagcacacgtgtgaatgtcattgaggcgtttacggaagccggccgcatccgcgaaatcgcggccagcaaccctatggaccgcttggccatcctgcgtttcctgctcgcgcttctctattggtgcaaggggaatcctccagacgaaaccgactcgatctcttcgtttccctcggattggttcaagaggctcgatgacaataaggactgtttcaacctgctgggcgatgggaggcgtttttaccaacagaagcctaagcgtcttgagaagaaactctcggccgactatctcatgcaggaggtgcccaccggcacaaacttctggcacttccggcatgggacagatttgagagacggcttatgtccggcgtgctgtgcaatgggcctgttgcgcctgccgctctttgctacctcggccgggcgcggcaagcccccgggcgtcaatcaaaaaccgccgacctacatcgtgccgatgggcgactcgctttccgaaaccctgcgtctctcgtggcggaaaagaccggagccgaacctgggcacgcccacatgggaaaagccggacataaccctccctcaacacggcaatgttcccctattaacgggattaacgtgggtgccgcgccgcgtgtggttggacgctcccgaggaaccccagtccaactgcatcgcctgcgggcgcagagaggctctgatccgtcgatgtgtctttgcgggtatcggcagcacaagaacagacgaagggagtccggcacgagtgtggaacgacccgcacaccatcagggaaggcgacgagattgtgaagcctttcagcgcgcttggcccggccgatgctgcggctgggaagtggacgaaagtcgtggctggaatcctgtgcggggaaaagccgaaggaaaaacaaaggttgtgggtcgtcagctttgcgacagtgcagaatgacaaatacctggaagcaaccgagtgggagattccgttcctgaccgcgcttgacgacatgaaggttcaggagagtatagaaagcatcggggcgtggcagagggaaggctggaagctccctggcaaaaccaaaccgcgagagatttcccaaacaaggggacaccttgaaattctctccgccgtcgccgcggttcgtccccaagccgaaagaacggtttccggaagaattgaccaattgatcgcccaaggcggcgacgcatggcaagaagccgcccaggagtatcgtccgctgatggccgcagtcgccaaatcgctttcacccggttacacaagcgcgtctctccgaagtcggcaagaaattgccgcagtaaagccggacatgcggccgaagaaaaaccacaaaaacgaagggagggacaagtgactgcaacggagcagtacgtcgaagttctgagtcggctgaaacccggtgagctcgggctcttgcgcaaccatgccggacaagggctcgacgaatcggtggagggctttgaccttttcgcaggactctggtggccactgcgggcgcaaacccagcgggcgcctcgccgtgaggtggcgtggcttgtcgccaaactctacgccttccggcccctcgagcattcacccggggagacgctcgctcgccaactcgcgcgctcccggcccggcgacaaaacagagcgaaagcgtttcgagcaacgcttcgataggatgctgacgctgccgcttgctgaaatcgaacccgccctacaatgggcaatcgacctcatcgctgccaagcaccccaaactcgactgggtacggctgacgaacgatctttccatctgggaacgcgaatccacccggctcaaatgggccacggaattcttgagctgttcaataggaggagaatcatgttgatccagattcacgccattcaaaatcacagcccggccaacctgaaccgggatgacctgggcgcgcccaagacttgcttttttggcggagtcttgcgctcccgtatttccagccagtgtctcaagcgcagcatccgcatgagtgaggagttcagccaattgcgcggcggagtgcgcacccgccagttagcgaaagagattgccgaaaaggtgacgggcaaagacgtcaggaagcgcgccgagaacattctcaaggcctgcggcctggagcctaaaaaggcaaaaaagcaggaaggagagggtgaacaagaaagtgccgagaggagcaagatgttggtttacaccacgcaaggggcgattgtacggatggccgaactcctccagaaggaagacggaaaaacggacgaggccttagcagcggagttcgggaagctgatcagtgaatccgtcgccgtgccggacatggccctgtgcggcaggatgcttgaaacgggagtactcgaaaacaccactgtcgaggcatcgcttcaggtggcccatgcgatttccacccatgaggcccgcccggaggtggactactatgtggccgctgatgatgtccccggcgaggacgcgggcgcagcttacgtggatgaagccatgtttggctcagcatgtttttacaagtatttctccattcattgggaaacgctggtcaggaacctcgagcccttcggcgcggatcacgaaaagttggcggcccataccgtcggcgagttcattcgcgcagcggcgttggtcaaccccacgggaaaacaaaacagttttgccgcgcacaatcctcctgacggaatgttggtggaagtcagaaacactccaatcagctacgccaacgccttcgccaaaccggcggctcctcagggcgaacgggacatcatctcgcagagcgtggcggagcttgcccattatgtgaacgacatggatacgggatacggcaagcccacgaagcggttctggttctctcccaatctccgctatccgttgacggctaccaccacggaaagcgaaaacggaaaacagaaacagcgtgaggtcccgcttgccgacaaagatgtcaagtctcttgacgaactgatagcggccgtactcaaccaaatcggccacgactggcaggaggtcgagaaagtggtcctgaatccggaggtgccccgtgagcccaaacacgctgttcattcggcttgaagggcctcttcaggcttggggcgatcagcaatcgaagtttgtcatccggcggacggctgaggccccgaccaaatcgggcgtaatcggcatgctgtgcgcggccttgggcgcctcccggtcagaggccgctgaggagtggcttccaaggctaagccggctgctcatgggcgtacgcatcgacgcgcccggagtccgctggtgggattatcacaccgtgggcgccggcatgccgatgcgcactgccgagggtggaagcaagcccggggccatgctcacccgccgcgagtacctttgcgatgcgtcgttcttggttgcactccagggtgaaccgggcctgatcgctgaaattgacgccgcggtcaagtcgccccgatggactctgtacctcggcagaaagtgctgcccgccctcgcgccctttgctggagcatccgccaggggaattttccgatttgctctccgccctcgaatcggtaccttggcgcaaacggctggagggagacccacagccccaaacgctggaatgtctgctcgactggcacccaaccgcagaccagccggacgctcccgatgattcgctcgtttggtacgacgtgcctcggagtctcgacccgccctcgcacgaagctcgattcgtcattcgcaagcaattacgcgtcggggctgaaggcggcgtgaccgttgcacctctgcccgcacagagcgccacgccggcgcctccccgcccaagggcggattacaccaataccgagtacaaaaaccggcgcaaagagcggctcgacgatgaccatcacttatgcgttttttgcaagtctcccgccaccaccgtgcagcacatcacctaccgtcgcgcgggtggcggcgagttgaaggacgatttgcgctccctctgccgcctctgccacgacgccgtgaccatgcttgaatacggcctgggcatgggactcgaccgcatcaatcccgaggacccgcaatggcgtgaccggattatcgacaagcgggacgagatcgtcaggttccgctcggaggaaacccgcaggcgattgctcgccgaggaggtggaataggatgtacatttcctgtctcctaatcaacgtcggtgacaaccccgaccgtccccgccccgggcggctctggctgcgcaacctttatcacgttcatcagcgcctctgcatggcctttccctcccatccccaaaaagatccccacttcctcgcgcccttcaagcccgcggactttgacgggaagcaagtccatgtggagcgcggtgcggattccggctttctctttcgcatcgacccgcaactgggcggccgggccatgattgtggtgcagtccgccaccaaacccgattgggactatgcctttcaaaatgcgggccatcttctggtgaattccttcgccgctccccctcaggtaaaagaactcgatccctgtttcagcgccggtcagcagcttcgctttcgaatccgcgtcaacctgagcaaaaagataaagaccagcacagcgggcatcgatcttaccaggccgcgagtggggacggatccccagggccgaccgaaggcccaaagcaaacgcgtggcgctcacctgggataaggaccaggacccgcaggacgccatacgggagtggttcgctaaaaaggcccagaacggcggcttcaagctgggagccttgcgcgctctgcacatcggctggggcgctggaaatgacccggactccacgcctgccgtccaggacagccgctcgggggacaggcgcatgaaattccgctccgccttgctcgaaggaacgctcacggttgaggaccctgctaaatttcgtgaagccgtcgttcacggcatcgggcccggcaaggccttcggtttcggcctgctttcagtagcccccgaagcccgctcagcgggcggcgacgtgtagcccacggcgcaagccagacccgtggtggtgacatgcgaactcaagatctgcatattctaccgaagttcagcgacggatggagttacctgtacgtcgagcgctgcaaggtggatcaggaagaccgggccattgccctgcacaatgaagcggggaagacgcccgtgccttgcgcaaatctggccttgctcatgctgggaccgggcgtctccatcactcacgccgccatttccgtgctggcggaccatgggtgcctagtggcgtggtgcggagaagagggggtccgcttctacgccacgggcatgggcgagacgcgcaacgccgccaattttctccatcaggcgcgcctgtgggcgcacgagggttttcgcatgcaggtggtgcgccgcctctatcagttgcgttttgccgagaagttcgaccccgccttgaccctgcaacagatacgtggcatggagggcgtacgggttcgagacgcctacgcgaaggccgccaaggaggccggcatcgcctgggaaggccgaaactatcagcgccaggagtggagccaggcggaccccgctaaccgggccttgtccgccgccaattcctgcctttacggtatctgccatgcggccgtcgtctcggctgggttttcccccgccctcgggtttatccatacgggcaagatgctctcctttgtgtacgatgtggccgacttgtacaaaactgaaatcaccgttccgatggcctttcgcgccgccgccgaagcgcaagatcaactcgagcggcgggtgcgcatcacctgccgcgacaggtttgtatccacacggcttttggaaaggatcatcccggatatccaatctgccctgatgctgtcaaaagcggcggcgcccgactctgaatttgaccttgatgccgccgcccccggctccctctgggacgatttgcagggcgccgtggaaggcggccacttgcacgccgtagaagaggaagaaacggagcccaaccatggtggttctgattcttgagcgcgtcccgccagcattgcgaggcgagctcactcggtggtttctcgaacctcaggcaggggtgtttgtgggacgcgtctccgctctggttcgcgatcggttatgggaaaaggcttgcgcccaagccaaaggaggcggatgcctgattctccactcaagcgataatgagcagggattccgtgtccgaacatggggcagaacagcgcgctgcatcgatgacttcgagggcctttttctcgtgcgtatgccgcagaatcaatagcttgggaagtgttgtccccacgcgcgtgggggtgaaccgtgggatgcg

SEQ ID NO: 1095 - DNA, 104605 bp, Artificial Sequence
  Synthetic Oligonucleotide
  misc_feature (1)..(96648): n is a, c, g, or t
nnnnnnnnnnnnnnnnnnnnnnnnnnnnnnnnnnnnnnnnnnnnnnnnnnnnnnnnnnnnnnnnnnnnnnnnnnnnnnnnnnnnnnnnnnnnnnnnnnnnnnnnnnnnnnnnnnnnnnnnnnnnnnnnnnnnnnnnnnnnnnnnnnnnnnnnnnnnnnnnnnnnnnnnnnnnnnnnnnnnnnnnnnnnnnnnnnnnnnnnnnnnnnnnnnnnnnnnnnnnnnnnnnnnnnnnnnnnnnnnnnnnnnnnnnnnnnnnnnnnnnnnnnnnnnnnnnnnnnnnnnnnnnnnnnnnnnnnnnnnnnnnnnnnnnnnnnnnnnnnnnnnnnnnnnnnnnnnnnnnnnnnnnnnnnnnnnnnnnnnnnnnnnnnnnnnnnnnnnnnnnnnnnnnnnnnnnnnnnnnnnnnnnnnnnnnnnnnnnnnnnnnnnnnnnnnnnnnnnnnnnnnnnnnnnnnnnnnnnnnnnnnnnnnnnnnnnnnnnnnnnnnnnnnnnnnnnnnnnnnnnnnnnnnnnnnnnnnnnnnnnnnnnnnnnnnnnnnnnnnnnnnnnnnnnnnnnnnnnnnnnnnnnnnnnnnnnnnnnnnnnnnnnnnnnnnnnnnnnnnnnnnnnnnnnnnnnnnnnnnnnnnnnnnnnnnnnnnnnnnnnnnnnnnnnnnnnnnnnnnnnnnnnnnnnnnnnnnnnnnnnnnnnnnnnnnnnnnnnnnnnnnnnnnnnnnnnnnnnnnnnnnnnnnnnnnnnnnnnnnnnnnnnnnnnnnnnnnnnnnnnnnnnnnnnnnnnnnnnnnnnnnnnnnnnnnnnnnnnnnnnnnnnnnnnnnnnnnnnnnnnnnnnnnnnnnnnnnnnnnnnnnnnnnnnnnnnnnnnnnnnnnnnnnnnnnnnnnnnnnnnnnnnnnnnnnnnnnnnnnnnnnnnnnnnnnnnnnnnnnnnnnnnnnnnnnnnnnnnnnnnnnnnnnnnnnnnnnnnnnnnnnnnnnnnnnnnnnnnnnnnnnnnnnnnnnnnnnnnnnnnnnnnnnnnnnnnnnnnnnnnnnnnnnnnnnnnnnnnnnnnnnnnnnnnnnnnnnnnnnnnnnnnnnnnnnnnnnnnnnnnnnnnnnnnnnnnnnnnnnnnnnnnnnnnnnnnnnnnnnnnnnnnnnnnnnnnnnnnnnnnnnnnnnnnnnnnnnnnnnnnnnnnnnnnnnnnnnnnnnnnnnnnnnnnnnnnnnnnnnnnnnnnnnnnnnnnnnnnnnnnnnnnnnnnnnnnnnnnnnnnnnnnnnnnnnnnnnnnnnnnnnnnnnnnnnnnnnnnnnnnnnnnnnnnnnnnnnnnnnnnnnnnnnnnnnnnnnnnnnnnnnnnnnnnnnnnnnnnnnnnnnnnnnnnnnnnnnnnnnnnnnnnnnnnnnnnnnnnnnnnnnnnnnnnnnnnnnnnnnnnnnnnnnnnnnnnnnnnnnnnnnnnnnnnnnnnnnnnnnnnnnnnnnnnnnnnnnnnnnnnnnnnnnnnnnnnnnnnnnnnnnnnnnnnnnnnnnnnnnnnnnnnnnnnnnnnnnnnnnnnnnnnnnnnnnnnnnnnnnnnnnnnnnnnnnnnnnnnnnnnnnnnnnnnnnnnnnnnnnnnnnnnnnnnnnnnnnnnnnnnnnnnnnnnnnnnnnnnnnnnnnnnnnnnnnnnnnnnnnnnnnnnnnnnnnnnnnnnnnnnnnnnnnnnnnnnnnnnnnnnnnnnnnnnnnnnnnnnnnnnnnnnnnnnnnnnnnnnnnnnnnnnnnnnnnnnnnnnnnnnnnnnnnnnnnnnnnnnnnnnnnnnnnnnnnnnnnnnnnnnnnnnnnnnnnnnnnnnnnnnnnnnnnnnnnnnnnnnnnnnnnnnnnnnnnnnnnnnnnnnnnnnnnnnnnnnnnnnnnnnnnnnnnnnnnnnnnnnnnnnnnnnnnnnnnnnnnnnnnnnnnnnnnnnnnnnnnnnnnnnnnnnnnnnnnnnnnnnnnnnnnnnnnnnnnnnnnnnnnnnnnnnnnnnnnnnnnnnnnnnnnnnnnnnnnnnnnnnnnnnnnnnnnnnnnnnnnnnnnnnnnnnnnnnnnnnnnnnnnnnnnnnnnnnnnnnnnnnnnnnnnnnnnnnnnnnnnnnnnnnnnnnnnnnnnnnnnnnnnnnnnnnnnnnnnnnnnnnnnnnnnnnnnnnnnnnnnnnnnnnnnnnnnnnnnnnnnnnnnnnnnnnnnnnnnnnnnnnnnnnnnnnnnnnnnnnnnnnnnnnnnnnnnnnnnnnnnnnnnnnnnnnnnnnnnnnnnnnnnnnnnnnnnnnnnnnnnnnnnnnnnnnnnnnnnnnnnnnnnnnnnnnnnnnnnnnnnnnnnnnnnnnnnnnnnnnnnnnnnnnnnnnnnnnnnnnnnnnnnnnnnnnnnnnnnnnnnnnnnnnnnnnnnnnnnnnnnnnnnnnnnnnnnnnnnnnnnnnnnnnnnnnnnnnnnnnnnnnnnnnnnnnnnnnnnnnnnnnnnnnnnnnnnnnnnnnnnnnnnnnnnnnnnnnnnnnnnnnnnnnnnnnnnnnnnnnnnnnnnnnnnnnnnnnnnnnnnnnnnnnnnnnnnnnnnnnnnnnnnnnnnnnnnnnnnnnnnnnnnnnnnnnnnnnnnnnnnnnnnnnnnnnnnnnnnnnnnnnnnnnnnnnnnnnnnnnnnnnnnnnnnnnnnnnnnnnnnnnnnnnnnnnnnnnnnnnnnnnnnnnnnnnnnnnnnnnnnnnnnnnnnnnnnnnnnnnnnnnnnnnnnnnnnnnnnnnnnnnnnnnnnnnnnnnnnnnnnnnnnnnnnnnnnnnnnnnnnnnnnnnnnnnnnnnnnnnnnnnnnnnnnnnnnnnnnnnnnnnnnnnnnnnnnnnnnnnnnnnnnnnnnnnnnnnnnnnnnnnnnnnnnnnnnnnnnnnnnnnnnnnnnnnnnnnnnnnnnnnnnnnnnnnnnnnnnnnnnnnnnnnnnnnnnnnnnnnnnnnnnnnnnnnnnnnnnnnnnnnnnnnnnnnnnnnnnnnnnnnnnnnnnnnnnnnnnnnnnnnnnnnnnnnnnnnnnnnnnnnnnnnnnnnnnnnnnnnnnnnnnnnnnnnnnnnnnnnnnnnnnnnnnnnnnnnnnnnnnnnnnnnnnnnnnnnnnnnnnnnnnnnnnnnnnnnnnnnnnnnnnnnnnnnnnnnnnnnnnnnnnnnnnnnnnnnnnnnnnnnnnnnnnnnnnnnnnnnnnnnnnnnnnnnnnnnnnnnnnnnnnnnnnnnnnnnnnnnnnnnnnnnnnnnnnnnnnnnnnnnnnnnnnnnnnnnnnnnnnnnnnnnnnnnnnnnnnnnnnnnnnnnnnnnnnnnnnnnnnnnnnnnnnnnnnnnnnnnnnnnnnnnnnnnnnnnnnnnnnnnnnnnnnnnnnnnnnnnnnnnnnnnnnnnnnnnnnnnnnnnnnnnnnnnnnnnnnnnnnnnnnnnnnnnnnnnnnnnnnnnnnnnnnnnnnnnnnnnnnnnnnnnnnnnnnnnnnnnnnnnnnnnnnnnnnnnnnnnnnnnnnnnnnnnnnnnnnnnnnnnnnnnnnnnnnnnnnnnnnnnnnnnnnnnnnnnnnnnnnnnnnnnnnnnnnnnnnnnnnnnnnnnnnnnnnnnnnnnnnnnnnnnnnnnnnnnnnnnnnnnnnnnnnnnnnnnnnnnnnnnnnnnnnnnnnnnnnnnnnnnnnnnnnnnnnnnnnnnnnnnnnnnnnnnnnnnnnnnnnnnnnnnnnnnnnnnnnnnnnnnnnnnnnnnnnnnnnnnnnnnnnnnnnnnnnnnnnnnnnnnnnnnnnnnnnnnnnnnnnnnnnnnnnnnnnnnnnnnnnnnnnnnnnnnnnnnnnnnnnnnnnnnnnnnnnnnnnnnnnnnnnnnnnnnnnnnnnnnnnnnnnnnnnnnnnnnnnnnnnnnnnnnnnnnnnnnnnnnnnnnnnnnnnnnnnnnnnnnnnnnnnnnnnnnnnnnnnnnnnnnnnnnnnnnnnnnnnnnnnnnnnnnnnnnnnnnnnnnnnnnnnnnnnnnnnnnnnnnnnnnnnnnnnnnnnnnnnnnnnnnnnnnnnnnnnnnnnnnnnnnnnnnnnnnnnnnnnnnnnnnnnnnnnnnnnnnnnnnnnnnnnnnnnnnnnnnnnnnnnnnnnnnnnnnnnnnnnnnnnnnnnnnnnnnnnnnnnnnnnnnnnnnnnnnnnnnnnnnnnnnnnnnnnnnnnnnnnnnnnnnnnnnnnnnnnnnnnnnnnnnnnnnnnnnnnnnnnnnnnnnnnnnnnnnnnnnnnnnnnnnnnnnnnnnnnnnnnnnnnnnnnnnnnnnnnnnnnnnnnnnnnnnnnnnnnnnnnnnnnnnnnnnnnnnnnnnnnnnnnnnnnnnnnnnnnnnnnnnnnnnnnnnnnnnnnnnnnnnnnnnnnnnnnnnnnnnnnnnnnnnnnnnnnnnnnnnnnnnnnnnnnnnnnnnnnnnnnnnnnnnnnnnnnnnnnnnnnnnnnnnnnnnnnnnnnnnnnnnnnnnnnnnnnnnnnnnnnnnnnnnnnnnnnnnnnnnnnnnnnnnnnnnnnnnnnnnnnnnnnnnnnnnnnnnnnnnnnnnnnnnnnnnnnnnnnnnnnnnnnnnnnnnnnnnnnnnnnnnnnnnnnnnnnnnnnnnnnnnnnnnnnnnnnnnnnnnnnnnnnnnnnnnnnnnnnnnnnnnnnnnnnnnnnnnnnnnnnnnnnnnnnnnnnnnnnnnnnnnnnnnnnnnnnnnnnnnnnnnnnnnnnnnnnnnnnnnnnnnnnnnnnnnnnnnnnnnnnnnnnnnnnnnnnnnnnnnnnnnnnnnnnnnnnnnnnnnnnnnnnnnnnnnnnnnnnnnnnnnnnnnnnnnnnnnnnnnnnnnnnnnnnnnnnnnnnnnnnnnnnnnnnnnnnnnnnnnnnnnnnnnnnnnnnnnnnnnnnnnnnnnnnnnnnnnnnnnnnnnnnnnnnnnnnnnnnnnnnnnnnnnnnnnnnnnnnnnnnnnnnnnnnnnnnnnnnnnnnnnnnnnnnnnnnnnnnnnnnnnnnnnnnnnnnnnnnnnnnnnnnnnnnnnnnnnnnnnnnnnnnnnnnnnnnnnnnnnnnnnnnnnnnnnnnnnnnnnnnnnnnnnnnnnnnnnnnnnnnnnnnnnnnnnnnnnnnnnnnnnnnnnnnnnnnnnnnnnnnnnnnnnnnnnnnnnnnnnnnnnnnnnnnnnnnnnnnnnnnnnnnnnnnnnnnnnnnnnnnnnnnnnnnnnnnnnnnnnnnnnnnnnnnnnnnnnnnnnnnnnnnnnnnnnnnnnnnnnnnnnnnnnnnnnnnnnnnnnnnnnnnnnnnnnnnnnnnnnnnnnnnnnnnnnnnnnnnnnnnnnnnnnnnnnnnnnnnnnnnnnnnnnnnnnnnnnnnnnnnnnnnnnnnnnnnnnnnnnnnnnnnnnnnnnnnnnnnnnnnnnnnnnnnnnnnnnnnnnnnnnnnnnnnnnnnnnnnnnnnnnnnnnnnnnnnnnnnnnnnnnnnnnnnnnnnnnnnnnnnnnnnnnnnnnnnnnnnnnnnnnnnnnnnnnnnnnnnnnnnnnnnnnnnnnnnnnnnnnnnnnnnnnnnnnnnnnnnnnnnnnnnnnnnnnnnnnnnnnnnnnnnnnnnnnnnnnnnnnnnnnnnnnnnnnnnnnnnnnnnnnnnnnnnnnnnnnnnnnnnnnnnnnnnnnnnnnnnnnnnnnnnnnnnnnnnnnnnnnnnnnnnnnnnnnnnnnnnnnnnnnnnnnnnnnnnnnnnnnnnnnnnnnnnnnnnnnnnnnnnnnnnnnnnnnnnnnnnnnnnnnnnnnnnnnnnnnnnnnnnnnnnnnnnnnnnnnnnnnnnnnnnnnnnnnnnnnnnnnnnnnnnnnnnnnnnnnnnnnnnnnnnnnnnnnnnnnnnnnnnnnnnnnnnnnnnnnnnnnnnnnnnnnnnnnnnnnnnnnnnnnnnnnnnnnnnnnnnnnnnnnnnnnnnnnnnnnnnnnnnnnnnnnnnnnnnnnnnnnnnnnnnnnnnnnnnnnnnnnnnnnnnnnnnnnnnnnnnnnnnnnnnnnnnnnnnnnnnnnnnnnnnnnnnnnnnnnnnnnnnnnnnnnnnnnnnnnnnnnnnnnnnnnnnnnnnnnnnnnnnnnnnnnnnnnnnnnnnnnnnnnnnnnnnnnnnnnnnnnnnnnnnnnnnnnnnnnnnnnnnnnnnnnnnnnnnnnnnnnnnnnnnnnnnnnnnnnnnnnnnnnnnnnnnnnnnnnnnnnnnnnnnnnnnnnnnnnnnnnnnnnnnnnnnnnnnnnnnnnnnnnnnnnnnnnnnnnnnnnnnnnnnnnnnnnnnnnnnnnnnnnnnnnnnnnnnnnnnnnnnnnnnnnnnnnnnnnnnnnnnnnnnnnnnnnnnnnnnnnnnnnnnnnnnnnnnnnnnnnnnnnnnnnnnnnnnnnnnnnnnnnnnnnnnnnnnnnnnnnnnnnnnnnnnnnnnnnnnnnnnnnnnnnnnnnnnnnnnnnnnnnnnnnnnnnnnnnnnnnnnnnnnnnnnnnnnnnnnnnnnnnnnnnnnnnnnnnnnnnnnnnnnnnnnnnnnnnnnnnnnnnnnnnnnnnnnnnnnnnnnnnnnnnnnnnnnnnnnnnnnnnnnnnnnnnnnnnnnnnnnnnnnnnnnnnnnnnnnnnnnnnnnnnnnnnnnnnnnnnnnnnnnnnnnnnnnnnnnnnnnnnnnnnnnnnnnnnnnnnnnnnnnnnnnnnnnnnnnnnnnnnnnnnnnnnnnnnnnnnnnnnnnnnnnnnnnnnnnnnnnnnnnnnnnnnnnnnnnnnnnnnnnnnnnnnnnnnnnnnnnnnnnnnnnnnnnnnnnnnnnnnnnnnnnnnnnnnnnnnnnnnnnnnnnnnnnnnnnnnnnnnnnnnnnnnnnnnnnnnnnnnnnnnnnnnnnnnnnnnnnnnnnnnnnnnnnnnnnnnnnnnnnnnnnnnnnnnnnnnnnnnnnnnnnnnnnnnnnnnnnnnnnnnnnnnnnnnnnnnnnnnnnnnnnnnnnnnnnnnnnnnnnnnnnnnnnnnnnnnnnnnnnnnnnnnnnnnnnnnnnnnnnnnnnnnnnnnnnnnnnnnnnnnnnnnnnnnnnnnnnnnnnnnnnnnnnnnnnnnnnnnnnnnnnnnnnnnnnnnnnnnnnnnnnnnnnnnnnnnnnnnnnnnnnnnnnnnnnnnnnnnnnnnnnnnnnnnnnnnnnnnnnnnnnnnnnnnnnnnnnnnnnnnnnnnnnnnnnnnnnnnnnnnnnnnnnnnnnnnnnnnnnnnnnnnnnnnnnnnnnnnnnnnnnnnnnnnnnnnnnnnnnnnnnnnnnnnnnnnnnnnnnnnnnnnnnnnnnnnnnnnnnnnnnnnnnnnnnnnnnnnnnnnnnnnnnnnnnnnnnnnnnnnnnnnnnnnnnnnnnnnnnnnnnnnnnnnnnnnnnnnnnnnnnnnnnnnnnnnnnnnnnnnnnnnnnnnnnnnnnnnnnnnnnnnnnnnnnnnnnnnnnnnnnnnnnnnnnnnnnnnnnnnnnnnnnnnnnnnnnnnnnnnnnnnnnnnnnnnnnnnnnnnnnnnnnnnnnnnnnnnnnnnnnnnnnnnnnnnnnnnnnnnnnnnnnnnnnnnnnnnnnnnnnnnnnnnnnnnnnnnnnnnnnnnnnnnnnnnnnnnnnnnnnnnnnnnnnnnnnnnnnnnnnnnnnnnnnnnnnnnnnnnnnnnnnnnnnnnnnnnnnnnnnnnnnnnnnnnnnnnnnnnnnnnnnnnnnnnnnnnnnnnnnnnnnnnnnnnnnnnnnnnnnnnnnnnnnnnnnnnnnnnnnnnnnnnnnnnnnnnnnnnnnnnnnnnnnnnnnnnnnnnnnnnnnnnnnnnnnnnnnnnnnnnnnnnnnnnnnnnnnnnnnnnnnnnnnnnnnnnnnnnnnnnnnnnnnnnnnnnnnnnnnnnnnnnnnnnnnnnnnnnnnnnnnnnnnnnnnnnnnnnnnnnnnnnnnnnnnnnnnnnnnnnnnnnnnnnnnnnnnnnnnnnnnnnnnnnnnnnnnnnnnnnnnnnnnnnnnnnnnnnnnnnnnnnnnnnnnnnnnnnnnnnnnnnnnnnnnnnnnnnnnnnnnnnnnnnnnnnnnnnnnnnnnnnnnnnnnnnnnnnnnnnnnnnnnnnnnnnnnnnnnnnnnnnnnnnnnnnnnnnnnnnnnnnnnnnnnnnnnnnnnnnnnnnnnnnnnnnnnnnnnnnnnnnnnnnnnnnnnnnnnnnnnnnnnnnnnnnnnnnnnnnnnnnnnnnnnnnnnnnnnnnnnnnnnnnnnnnnnnnnnnnnnnnnnnnnnnnnnnnnnnnnnnnnnnnnnnnnnnnnnnnnnnnnnnnnnnnnnnnnnnnnnnnnnnnnnnnnnnnnnnnnnnnnnnnnnnnnnnnnnnnnnnnnnnnnnnnnnnnnnnnnnnnnnnnnnnnnnnnnnnnnnnnnnnnnnnnnnnnnnnnnnnnnnnnnnnnnnnnnnnnnnnnnnnnnnnnnnnnnnnnnnnnnnnnnnnnnnnnnnnnnnnnnnnnnnnnnnnnnnnnnnnnnnnnnnnnnnnnnnnnnnnnnnnnnnnnnnnnnnnnnnnnnnnnnnnnnnnnnnnnnnnnnnnnnnnnnnnnnnnnnnnnnnnnnnnnnnnnnnnnnnnnnnnnnnnnnnnnnnnnnnnnnnnnnnnnnnnnnnnnnnnnnnnnnnnnnnnnnnnnnnnnnnnnnnnnnnnnnnnnnnnnnnnnnnnnnnnnnnnnnnnnnnnnnnnnnnnnnnnnnnnnnnnnnnnnnnnnnnnnnnnnnnnnnnnnnnnnnnnnnnnnnnnnnnnnnnnnnnnnnnnnnnnnnnnnnnnnnnnnnnnnnnnnnnnnnnnnnnnnnnnnnnnnnnnnnnnnnnnnnnnnnnnnnnnnnnnnnnnnnnnnnnnnnnnnnnnnnnnnnnnnnnnnnnnnnnnnnnnnnnnnnnnnnnnnnnnnnnnnnnnnnnnnnnnnnnnnnnnnnnnnnnnnnnnnnnnnnnnnnnnnnnnnnnnnnnnnnnnnnnnnnnnnnnnnnnnnnnnnnnnnnnnnnnnnnnnnnnnnnnnnnnnnnnnnnnnnnnnnnnnnnnnnnnnnnnnnnnnnnnnnnnnnnnnnnnnnnnnnnnnnnnnnnnnnnnnnnnnnnnnnnnnnnnnnnnnnnnnnnnnnnnnnnnnnnnnnnnnnnnnnnnnnnnnnnnnnnnnnnnnnnnnnnnnnnnnnnnnnnnnnnnnnnnnnnnnnnnnnnnnnnnnnnnnnnnnnnnnnnnnnnnnnnnnnnnnnnnnnnnnnnnnnnnnnnnnnnnnnnnnnnnnnnnnnnnnnnnnnnnnnnnnnnnnnnnnnnnnnnnnnnnnnnnnnnnnnnnnnnnnnnnnnnnnnnnnnnnnnnnnnnnnnnnnnnnnnnnnnnnnnnnnnnnnnnnnnnnnnnnnnnnnnnnnnnnnnnnnnnnnnnnnnnnnnnnnnnnnnnnnnnnnnnnnnnnnnnnnnnnnnnnnnnnnnnnnnnnnnnnnnnnnnnnnnnnnnnnnnnnnnnnnnnnnnnnnnnnnnnnnnnnnnnnnnnnnnnnnnnnnnnnnnnnnnnnnnnnnnnnnnnnnnnnnnnnnnnnnnnnnnnnnnnnnnnnnnnnnnnnnnnnnnnnnnnnnnnnnnnnnnnnnnnnnnnnnnnnnnnnnnnnnnnnnnnnnnnnnnnnnnnnnnnnnnnnnnnnnnnnnnnnnnnnnnnnnnnnnnnnnnnnnnnnnnnnnnnnnnnnnnnnnnnnnnnnnnnnnnnnnnnnnnnnnnnnnnnnnnnnnnnnnnnnnnnnnnnnnnnnnnnnnnnnnnnnnnnnnnnnnnnnnnnnnnnnnnnnnnnnnnnnnnnnnnnnnnnnnnnnnnnnnnnnnnnnnnnnnnnnnnnnnnnnnnnnnnnnnnnnnnnnnnnnnnnnnnnnnnnnnnnnnnnnnnnnnnnnnnnnnnnnnnnnnnnnnnnnnnnnnnnnnnnnnnnnnnnnnnnnnnnnnnnnnnnnnnnnnnnnnnnnnnnnnnnnnnnnnnnnnnnnnnnnnnnnnnnnnnnnnnnnnnnnnnnnnnnnnnnnnnnnnnnnnnnnnnnnnnnnnnnnnnnnnnnnnnnnnnnnnnnnnnnnnnnnnnnnnnnnnnnnnnnnnnnnnnnnnnnnnnnnnnnnnnnnnnnnnnnnnnnnnnnnnnnnnnnnnnnnnnnnnnnnnnnnnnnnnnnnnnnnnnnnnnnnnnnnnnnnnnnnnnnnnnnnnnnnnnnnnnnnnnnnnnnnnnnnnnnnnnnnnnnnnnnnnnnnnnnnnnnnnnnnnnnnnnnnnnnnnnnnnnnnnnnnnnnnnnnnnnnnnnnnnnnnnnnnnnnnnnnnnnnnnnnnnnnnnnnnnnnnnnnnnnnnnnnnnnnnnnnnnnnnnnnnnnnnnnnnnnnnnnnnnnnnnnnnnnnnnnnnnnnnnnnnnnnnnnnnnnnnnnnnnnnnnnnnnnnnnnnnnnnnnnnnnnnnnnnnnnnnnnnnnnnnnnnnnnnnnnnnnnnnnnnnnnnnnnnnnnnnnnnnnnnnnnnnnnnnnnnnnnnnnnnnnnnnnnnnnnnnnnnnnnnnnnnnnnnnnnnnnnnnnnnnnnnnnnnnnnnnnnnnnnnnnnnnnnnnnnnnnnnnnnnnnnnnnnnnnnnnnnnnnnnnnnnnnnnnnnnnnnnnnnnnnnnnnnnnnnnnnnnnnnnnnnnnnnnnnnnnnnnnnnnnnnnnnnnnnnnnnnnnnnnnnnnnnnnnnnnnnnnnnnnnnnnnnnnnnnnnnnnnnnnnnnnnnnnnnnnnnnnnnnnnnnnnnnnnnnnnnnnnnnnnnnnnnnnnnnnnnnnnnnnnnnnnnnnnnnnnnnnnnnnnnnnnnnnnnnnnnnnnnnnnnnnnnnnnnnnnnnnnnnnnnnnnnnnnnnnnnnnnnnnnnnnnnnnnnnnnnnnnnnnnnnnnnnnnnnnnnnnnnnnnnnnnnnnnnnnnnnnnnnnnnnnnnnnnnnnnnnnnnnnnnnnnnnnnnnnnnnnnnnnnnnnnnnnnnnnnnnnnnnnnnnnnnnnnnnnnnnnnnnnnnnnnnnnnnnnnnnnnnnnnnnnnnnnnnnnnnnnnnnnnnnnnnnnnnnnnnnnnnnnnnnnnnnnnnnnnnnnnnnnnnnnnnnnnnnnnnnnnnnnnnnnnnnnnnnnnnnnnnnnnnnnnnnnnnnnnnnnnnnnnnnnnnnnnnnnnnnnnnnnnnnnnnnnnnnnnnnnnnnnnnnnnnnnnnnnnnnnnnnnnnnnnnnnnnnnnnnnnnnnnnnnnnnnnnnnnnnnnnnnnnnnnnnnnnnnnnnnnnnnnnnnnnnnnnnnnnnnnnnnnnnnnnnnnnnnnnnnnnnnnnnnnnnnnnnnnnnnnnnnnnnnnnnnnnnnnnnnnnnnnnnnnnnnnnnnnnnnnnnnnnnnnnnnnnnnnnnnnnnnnnnnnnnnnnnnnnnnnnnnnnnnnnnnnnnnnnnnnnnnnnnnnnnnnnnnnnnnnnnnnnnnnnnnnnnnnnnnnnnnnnnnnnnnnnnnnnnnnnnnnnnnnnnnnnnnnnnnnnnnnnnnnnnnnnnnnnnnnnnnnnnnnnnnnnnnnnnnnnnnnnnnnnnnnnnnnnnnnnnnnnnnnnnnnnnnnnnnnnnnnnnnnnnnnnnnnnnnnnnnnnnnnnnnnnnnnnnnnnnnnnnnnnnnnnnnnnnnnnnnnnnnnnnnnnnnnnnnnnnnnnnnnnnnnnnnnnnnnnnnnnnnnnnnnnnnnnnnnnnnnnnnnnnnnnnnnnnnnnnnnnnnnnnnnnnnnnnnnnnnnnnnnnnnnnnnnnnnnnnnnnnnnnnnnnnnnnnnnnnnnnnnnnnnnnnnnnnnnnnnnnnnnnnnnnnnnnnnnnnnnnnnnnnnnnnnnnnnnnnnnnnnnnnnnnnnnnnnnnnnnnnnnnnnnnnnnnnnnnnnnnnnnnnnnnnnnnnnnnnnnnnnnnnnnnnnnnnnnnnnnnnnnnnnnnnnnnnnnnnnnnnnnnnnnnnnnnnnnnnnnnnnnnnnnnnnnnnnnnnnnnnnnnnnnnnnnnnnnnnnnnnnnnnnnnnnnnnnnnnnnnnnnnnnnnnnnnnnnnnnnnnnnnnnnnnnnnnnnnnnnnnnnnnnnnnnnnnnnnnnnnnnnnnnnnnnnnnnnnnnnnnnnnnnnnnnnnnnnnnnnnnnnnnnnnnnnnnnnnnnnnnnnnnnnnnnnnnnnnnnnnnnnnnnnnnnnnnnnnnnnnnnnnnnnnnnnnnnnnnnnnnnnnnnnnnnnnnnnnnnnnnnnnnnnnnnnnnnnnnnnnnnnnnnnnnnnnnnnnnnnnnnnnnnnnnnnnnnnnnnnnnnnnnnnnnnnnnnnnnnnnnnnnnnnnnnnnnnnnnnnnnnnnnnnnnnnnnnnnnnnnnnnnnnnnnnnnnnnnnnnnnnnnnnnnnnnnnnnnnnnnnnnnnnnnnnnnnnnnnnnnnnnnnnnnnnnnnnnnnnnnnnnnnnnnnnnnnnnnnnnnnnnnnnnnnnnnnnnnnnnnnnnnnnnnnnnnnnnnnnnnnnnnnnnnnnnnnnnnnnnnnnnnnnnnnnnnnnnnnnnnnnnnnnnnnnnnnnnnnnnnnnnnnnnnnnnnnnnnnnnnnnnnnnnnnnnnnnnnnnnnnnnnnnnnnnnnnnnnnnnnnnnnnnnnnnnnnnnnnnnnnnnnnnnnnnnnnnnnnnnnnnnnnnnnnnnnnnnnnnnnnnnnnnnnnnnnnnnnnnnnnnnnnnnnnnnnnnnnnnnnnnnnnnnnnnnnnnnnnnnnnnnnnnnnnnnnnnnnnnnnnnnnnnnnnnnnnnnnnnnnnnnnnnnnnnnnnnnnnnnnnnnnnnnnnnnnnnnnnnnnnnnnnnnnnnnnnnnnnnnnnnnnnnnnnnnnnnnnnnnnnnnnnnnnnnnnnnnnnnnnnnnnnnnnnnnnnnnnnnnnnnnnnnnnnnnnnnnnnnnnnnnnnnnnnnnnnnnnnnnnnnnnnnnnnnnnnnnnnnnnnnnnnnnnnnnnnnnnnnnnnnnnnnnnnnnnnnnnnnnnnnnnnnnnnnnnnnnnnnnnnnnnnnnnnnnnnnnnnnnnnnnnnnnnnnnnnnnnnnnnnnnnnnnnnnnnnnnnnnnnnnnnnnnnnnnnnnnnnnnnnnnnnnnnnnnnnnnnnnnnnnnnnnnnnnnnnnnnnnnnnnnnnnnnnnnnnnnnnnnnnnnnnnnnnnnnnnnnnnnnnnnnnnnnnnnnnnnnnnnnnnnnnnnnnnnnnnnnnnnnnnnnnnnnnnnnnnnnnnnnnnnnnnnnnnnnnnnnnnnnnnnnnnnnnnnnnnnnnnnnnnnnnnnnnnnnnnnnnnnnnnnnnnnnnnnnnnnnnnnnnnnnnnnnnnnnnnnnnnnnnnnnnnnnnnnnnnnnnnnnnnnnnnnnnnnnnnnnnnnnnnnnnnnnnnnnnnnnnnnnnnnnnnnnnnnnnnnnnnnnnnnnnnnnnnnnnnnnnnnnnnnnnnnnnnnnnnnnnnnnnnnnnnnnnnnnnnnnnnnnnnnnnnnnnnnnnnnnnnnnnnnnnnnnnnnnnnnnnnnnnnnnnnnnnnnnnnnnnnnnnnnnnnnnnnnnnnnnnnnnnnnnnnnnnnnnnnnnnnnnnnnnnnnnnnnnnnnnnnnnnnnnnnnnnnnnnnnnnnnnnnnnnnnnnnnnnnnnnnnnnnnnnnnnnnnnnnnnnnnnnnnnnnnnnnnnnnnnnnnnnnnnnnnnnnnnnnnnnnnnnnnnnnnnnnnnnnnnnnnnnnnnnnnnnnnnnnnnnnnnnnnnnnnnnnnnnnnnnnnnnnnnnnnnnnnnnnnnnnnnnnnnnnnnnnnnnnnnnnnnnnnnnnnnnnnnnnnnnnnnnnnnnnnnnnnnnnnnnnnnnnnnnnnnnnnnnnnnnnnnnnnnnnnnnnnnnnnnnnnnnnnnnnnnnnnnnnnnnnnnnnnnnnnnnnnnnnnnnnnnnnnnnnnnnnnnnnnnnnnnnnnnnnnnnnnnnnnnnnnnnnnnnnnnnnnnnnnnnnnnnnnnnnnnnnnnnnnnnnnnnnnnnnnnnnnnnnnnnnnnnnnnnnnnnnnnnnnnnnnnnnnnnnnnnnnnnnnnnnnnnnnnnnnnnnnnnnnnnnnnnnnnnnnnnnnnnnnnnnnnnnnnnnnnnnnnnnnnnnnnnnnnnnnnnnnnnnnnnnnnnnnnnnnnnnnnnnnnnnnnnnnnnnnnnnnnnnnnnnnnnnnnnnnnnnnnnnnnnnnnnnnnnnnnnnnnnnnnnnnnnnnnnnnnnnnnnnnnnnnnnnnnnnnnnnnnnnnnnnnnnnnnnnnnnnnnnnnnnnnnnnnnnnnnnnnnnnnnnnnnnnnnnnnnnnnnnnnnnnnnnnnnnnnnnnnnnnnnnnnnnnnnnnnnnnnnnnnnnnnnnnnnnnnnnnnnnnnnnnnnnnnnnnnnnnnnnnnnnnnnnnnnnnnnnnnnnnnnnnnnnnnnnnnnnnnnnnnnnnnnnnnnnnnnnnnnnnnnnnnnnnnnnnnnnnnnnnnnnnnnnnnnnnnnnnnnnnnnnnnnnnnnnnnnnnnnnnnnnnnnnnnnnnnnnnnnnnnnnnnnnnnnnnnnnnnnnnnnnnnnnnnnnnnnnnnnnnnnnnnnnnnnnnnnnnnnnnnnnnnnnnnnnnnnnnnnnnnnnnnnnnnnnnnnnnnnnnnnnnnnnnnnnnnnnnnnnnnnnnnnnnnnnnnnnnnnnnnnnnnnnnnnnnnnnnnnnnnnnnnnnnnnnnnnnnnnnnnnnnnnnnnnnnnnnnnnnnnnnnnnnnnnnnnnnnnnnnnnnnnnnnnnnnnnnnnnnnnnnnnnnnnnnnnnnnnnnnnnnnnnnnnnnnnnnnnnnnnnnnnnnnnnnnnnnnnnnnnnnnnnnnnnnnnnnnnnnnnnnnnnnnnnnnnnnnnnnnnnnnnnnnnnnnnnnnnnnnnnnnnnnnnnnnnnnnnnnnnnnnnnnnnnnnnnnnnnnnnnnnnnnnnnnnnnnnnnnnnnnnnnnnnnnnnnnnnnnnnnnnnnnnnnnnnnnnnnnnnnnnnnnnnnnnnnnnnnnnnnnnnnnnnnnnnnnnnnnnnnnnnnnnnnnnnnnnnnnnnnnnnnnnnnnnnnnnnnnnnnnnnnnnnnnnnnnnnnnnnnnnnnnnnnnnnnnnnnnnnnnnnnnnnnnnnnnnnnnnnnnnnnnnnnnnnnnnnnnnnnnnnnnnnnnnnnnnnnnnnnnnnnnnnnnnnnnnnnnnnnnnnnnnnnnnnnnnnnnnnnnnnnnnnnnnnnnnnnnnnnnnnnnnnnnnnnnnnnnnnnnnnnnnnnnnnnnnnnnnnnnnnnnnnnnnnnnnnnnnnnnnnnnnnnnnnnnnnnnnnnnnnnnnnnnnnnnnnnnnnnnnnnnnnnnnnnnnnnnnnnnnnnnnnnnnnnnnnnnnnnnnnnnnnnnnnnnnnnnnnnnnnnnnnnnnnnnnnnnnnnnnnnnnnnnnnnnnnnnnnnnnnnnnnnnnnnnnnnnnnnnnnnnnnnnnnnnnnnnnnnnnnnnnnnnnnnnnnnnnnnnnnnnnnnnnnnnnnnnnnnnnnnnnnnnnnnnnnnnnnnnnnnnnnnnnnnnnnnnnnnnnnnnnnnnnnnnnnnnnnnnnnnnnnnnnnnnnnnnnnnnnnnnnnnnnnnnnnnnnnnnnnnnnnnnnnnnnnnnnnnnnnnnnnnnnnnnnnnnnnnnnnnnnnnnnnnnnnnnnnnnnnnnnnnnnnnnnnnnnnnnnnnnnnnnnnnnnnnnnnnnnnnnnnnnnnnnnnnnnnnnnnnnnnnnnnnnnnnnnnnnnnnnnnnnnnnnnnnnnnnnnnnnnnnnnnnnnnnnnnnnnnnnnnnnnnnnnnnnnnnnnnnnnnnnnnnnnnnnnnnnnnnnnnnnnnnnnnnnnnnnnnnnnnnnnnnnnnnnnnnnnnnnnnnnnnnnnnnnnnnnnnnnnnnnnnnnnnnnnnnnnnnnnnnnnnnnnnnnnnnnnnnnnnnnnnnnnnnnnnnnnnnnnnnnnnnnnnnnnnnnnnnnnnnnnnnnnnnnnnnnnnnnnnnnnnnnnnnnnnnnnnnnnnnnnnnnnnnnnnnnnnnnnnnnnnnnnnnnnnnnnnnnnnnnnnnnnnnnnnnnnnnnnnnnnnnnnnnnnnnnnnnnnnnnnnnnnnnnnnnnnnnnnnnnnnnnnnnnnnnnnnnnnnnnnnnnnnnnnnnnnnnnnnnnnnnnnnnnnnnnnnnnnnnnnnnnnnnnnnnnnnnnnnnnnnnnnnnnnnnnnnnnnnnnnnnnnnnnnnnnnnnnnnnnnnnnnnnnnnnnnnnnnnnnnnnnnnnnnnnnnnnnnnnnnnnnnnnnnnnnnnnnnnnnnnnnnnnnnnnnnnnnnnnnnnnnnnnnnnnnnnnnnnnnnnnnnnnnnnnnnnnnnnnnnnnnnnnnnnnnnnnnnnnnnnnnnnnnnnnnnnnnnnnnnnnnnnnnnnnnnnnnnnnnnnnnnnnnnnnnnnnnnnnnnnnnnnnnnnnnnnnnnnnnnnnnnnnnnnnnnnnnnnnnnnnnnnnnnnnnnnnnnnnnnnnnnnnnnnnnnnnnnnnnnnnnnnnnnnnnnnnnnnnnnnnnnnnnnnnnnnnnnnnnnnnnnnnnnnnnnnnnnnnnnnnnnnnnnnnnnnnnnnnnnnnnnnnnnnnnnnnnnnnnnnnnnnnnnnnnnnnnnnnnnnnnnnnnnnnnnnnnnnnnnnnnnnnnnnnnnnnnnnnnnnnnnnnnnnnnnnnnnnnnnnnnnnnnnnnnnnnnnnnnnnnnnnnnnnnnnnnnnnnnnnnnnnnnnnnnnnnnnnnnnnnnnnnnnnnnnnnnnnnnnnnnnnnnnnnnnnnnnnnnnnnnnnnnnnnnnnnnnnnnnnnnnnnnnnnnnnnnnnnnnnnnnnnnnnnnnnnnnnnnnnnnnnnnnnnnnnnnnnnnnnnnnnnnnnnnnnnnnnnnnnnnnnnnnnnnnnnnnnnnnnnnnnnnnnnnnnnnnnnnnnnnnnnnnnnnnnnnnnnnnnnnnnnnnnnnnnnnnnnnnnnnnnnnnnnnnnnnnnnnnnnnnnnnnnnnnnnnnnnnnnnnnnnnnnnnnnnnnnnnnnnnnnnnnnnnnnnnnnnnnnnnnnnnnnnnnnnnnnnnnnnnnnnnnnnnnnnnnnnnnnnnnnnnnnnnnnnnnnnnnnnnnnnnnnnnnnnnnnnnnnnnnnnnnnnnnnnnnnnnnnnnnnnnnnnnnnnnnnnnnnnnnnnnnnnnnnnnnnnnnnnnnnnnnnnnnnnnnnnnnnnnnnnnnnnnnnnnnnnnnnnnnnnnnnnnnnnnnnnnnnnnnnnnnnnnnnnnnnnnnnnnnnnnnnnnnnnnnnnnnnnnnnnnnnnnnnnnnnnnnnnnnnnnnnnnnnnnnnnnnnnnnnnnnnnnnnnnnnnnnnnnnnnnnnnnnnnnnnnnnnnnnnnnnnnnnnnnnnnnnnnnnnnnnnnnnnnnnnnnnnnnnnnnnnnnnnnnnnnnnnnnnnnnnnnnnnnnnnnnnnnnnnnnnnnnnnnnnnnnnnnnnnnnnnnnnnnnnnnnnnnnnnnnnnnnnnnnnnnnnnnnnnnnnnnnnnnnnnnnnnnnnnnnnnnnnnnnnnnnnnnnnnnnnnnnnnnnnnnnnnnnnnnnnnnnnnnnnnnnnnnnnnnnnnnnnnnnnnnnnnnnnnnnnnnnnnnnnnnnnnnnnnnnnnnnnnnnnnnnnnnnnnnnnnnnnnnnnnnnnnnnnnnnnnnnnnnnnnnnnnnnnnnnnnnnnnnnnnnnnnnnnnnnnnnnnnnnnnnnnnnnnnnnnnnnnnnnnnnnnnnnnnnnnnnnnnnnnnnnnnnnnnnnnnnnnnnnnnnnnnnnnnnnnnnnnnnnnnnnnnnnnnnnnnnnnnnnnnnnnnnnnnnnnnnnnnnnnnnnnnnnnnnnnnnnnnnnnnnnnnnnnnnnnnnnnnnnnnnnnnnnnnnnnnnnnnnnnnnnnnnnnnnnnnnnnnnnnnnnnnnnnnnnnnnnnnnnnnnnnnnnnnnnnnnnnnnnnnnnnnnnnnnnnnnnnnnnnnnnnnnnnnnnnnnnnnnnnnnnnnnnnnnnnnnnnnnnnnnnnnnnnnnnnnnnnnnnnnnnnnnnnnnnnnnnnnnnnnnnnnnnnnnnnnnnnnnnnnnnnnnnnnnnnnnnnnnnnnnnnnnnnnnnnnnnnnnnnnnnnnnnnnnnnnnnnnnnnnnnnnnnnnnnnnnnnnnnnnnnnnnnnnnnnnnnnnnnnnnnnnnnnnnnnnnnnnnnnnnnnnnnnnnnnnnnnnnnnnnnnnnnnnnnnnnnnnnnnnnnnnnnnnnnnnnnnnnnnnnnnnnnnnnnnnnnnnnnnnnnnnnnnnnnnnnnnnnnnnnnnnnnnnnnnnnnnnnnnnnnnnnnnnnnnnnnnnnnnnnnnnnnnnnnnnnnnnnnnnnnnnnnnnnnnnnnnnnnnnnnnnnnnnnnnnnnnnnnnnnnnnnnnnnnnnnnnnnnnnnnnnnnnnnnnnnnnnnnnnnnnnnnnnnnnnnnnnnnnnnnnnnnnnnnnnnnnnnnnnnnnnnnnnnnnnnnnnnnnnnnnnnnnnnnnnnnnnnnnnnnnnnnnnnnnnnnnnnnnnnnnnnnnnnnnnnnnnnnnnnnnnnnnnnnnnnnnnnnnnnnnnnnnnnnnnnnnnnnnnnnnnnnnnnnnnnnnnnnnnnnnnnnnnnnnnnnnnnnnnnnnnnnnnnnnnnnnnnnnnnnnnnnnnnnnnnnnnnnnnnnnnnnnnnnnnnnnnnnnnnnnnnnnnnnnnnnnnnnnnnnnnnnnnnnnnnnnnnnnnnnnnnnnnnnnnnnnnnnnnnnnnnnnnnnnnnnnnnnnnnnnnnnnnnnnnnnnnnnnnnnnnnnnnnnnnnnnnnnnnnnnnnnnnnnnnnnnnnnnnnnnnnnnnnnnnnnnnnnnnnnnnnnnnnnnnnnnnnnnnnnnnnnnnnnnnnnnnnnnnnnnnnnnnnnnnnnnnnnnnnnnnnnnnnnnnnnnnnnnnnnnnnnnnnnnnnnnnnnnnnnnnnnnnnnnnnnnnnnnnnnnnnnnnnnnnnnnnnnnnnnnnnnnnnnnnnnnnnnnnnnnnnnnnnnnnnnnnnnnnnnnnnnnnnnnnnnnnnnnnnnnnnnnnnnnnnnnnnnnnnnnnnnnnnnnnnnnnnnnnnnnnnnnnnnnnnnnnnnnnnnnnnnnnnnnnnnnnnnnnnnnnnnnnnnnnnnnnnnnnnnnnnnnnnnnnnnnnnnnnnnnnnnnnnnnnnnnnnnnnnnnnnnnnnnnnnnnnnnnnnnnnnnnnnnnnnnnnnnnnnnnnnnnnnnnnnnnnnnnnnnnnnnnnnnnnnnnnnnnnnnnnnnnnnnnnnnnnnnnnnnnnnnnnnnnnnnnnnnnnnnnnnnnnnnnnnnnnnnnnnnnnnnnnnnnnnnnnnnnnnnnnnnnnnnnnnnnnnnnnnnnnnnnnnnnnnnnnnnnnnnnnnnnnnnnnnnnnnnnnnnnnnnnnnnnnnnnnnnnnnnnnnnnnnnnnnnnnnnnnnnnnnnnnnnnnnnnnnnnnnnnnnnnnnnnnnnnnnnnnnnnnnnnnnnnnnnnnnnnnnnnnnnnnnnnnnnnnnnnnnnnnnnnnnnnnnnnnnnnnnnnnnnnnnnnnnnnnnnnnnnnnnnnnnnnnnnnnnnnnnnnnnnnnnnnnnnnnnnnnnnnnnnnnnnnnnnnnnnnnnnnnnnnnnnnnnnnnnnnnnnnnnnnnnnnnnnnnnnnnnnnnnnnnnnnnnnnnnnnnnnnnnnnnnnnnnnnnnnnnnnnnnnnnnnnnnnnnnnnnnnnnnnnnnnnnnnnnnnnnnnnnnnnnnnnnnnnnnnnnnnnnnnnnnnnnnnnnnnnnnnnnnnnnnnnnnnnnnnnnnnnnnnnnnnnnnnnnnnnnnnnnnnnnnnnnnnnnnnnnnnnnnnnnnnnnnnnnnnnnnnnnnnnnnnnnnnnnnnnnnnnnnnnnnnnnnnnnnnnnnnnnnnnnnnnnnnnnnnnnnnnnnnnnnnnnnnnnnnnnnnnnnnnnnnnnnnnnnnnnnnnnnnnnnnnnnnnnnnnnnnnnnnnnnnnnnnnnnnnnnnnnnnnnnnnnnnnnnnnnnnnnnnnnnnnnnnnnnnnnnnnnnnnnnnnnnnnnnnnnnnnnnnnnnnnnnnnnnnnnnnnnnnnnnnnnnnnnnnnnnnnnnnnnnnnnnnnnnnnnnnnnnnnnnnnnnnnnnnnnnnnnnnnnnnnnnnnnnnnnnnnnnnnnnnnnnnnnnnnnnnnnnnnnnnnnnnnnnnnnnnnnnnnnnnnnnnnnnnnnnnnnnnnnnnnnnnnnnnnnnnnnnnnnnnnnnnnnnnnnnnnnnnnnnnnnnnnnnnnnnnnnnnnnnnnnnnnnnnnnnnnnnnnnnnnnnnnnnnnnnnnnnnnnnnnnnnnnnnnnnnnnnnnnnnnnnnnnnnnnnnnnnnnnnnnnnnnnnnnnnnnnnnnnnnnnnnnnnnnnnnnnnnnnnnnnnnnnnnnnnnnnnnnnnnnnnnnnnnnnnnnnnnnnnnnnnnnnnnnnnnnnnnnnnnnnnnnnnnnnnnnnnnnnnnnnnnnnnnnnnnnnnnnnnnnnnnnnnnnnnnnnnnnnnnnnnnnnnnnnnnnnnnnnnnnnnnnnnnnnnnnnnnnnnnnnnnnnnnnnnnnnnnnnnnnnnnnnnnnnnnnnnnnnnnnnnnnnnnnnnnnnnnnnnnnnnnnnnnnnnnnnnnnnnnnnnnnnnnnnnnnnnnnnnnnnnnnnnnnnnnnnnnnnnnnnnnnnnnnnnnnnnnnnnnnnnnnnnnnnnnnnnnnnnnnnnnnnnnnnnnnnnnnnnnnnnnnnnnnnnnnnnnnnnnnnnnnnnnnnnnnnnnnnnnnnnnnnnnnnnnnnnnnnnnnnnnnnnnnnnnnnnnnnnnnnnnnnnnnnnnnnnnnnnnnnnnnnnnnnnnnnnnnnnnnnnnnnnnnnnnnnnnnnnnnnnnnnnnnnnnnnnnnnnnnnnnnnnnnnnnnnnnnnnnnnnnnnnnnnnnnnnnnnnnnnnnnnnnnnnnnnnnnnnnnnnnnnnnnnnnnnnnnnnnnnnnnnnnnnnnnnnnnnnnnnnnnnnnnnnnnnnnnnnnnnnnnnnnnnnnnnnnnnnnnnnnnnnnnnnnnnnnnnnnnnnnnnnnnnnnnnnnnnnnnnnnnnnnnnnnnnnnnnnnnnnnnnnnnnnnnnnnnnnnnnnnnnnnnnnnnnnnnnnnnnnnnnnnnnnnnnnnnnnnnnnnnnnnnnnnnnnnnnnnnnnnnnnnnnnnnnnnnnnnnnnnnnnnnnnnnnnnnnnnnnnnnnnnnnnnnnnnnnnnnnnnnnnnnnnnnnnnnnnnnnnnnnnnnnnnnnnnnnnnnnnnnnnnnnnnnnnnnnnnnnnnnnnnnnnnnnnnnnnnnnnnnnnnnnnnnnnnnnnnnnnnnnnnnnnnnnnnnnnnnnnnnnnnnnnnnnnnnnnnnnnnnnnnnnnnnnnnnnnnnnnnnnnnnnnnnnnnnnnnnnnnnnnnnnnnnnnnnnnnnnnnnnnnnnnnnnnnnnnnnnnnnnnnnnnnnnnnnnnnnnnnnnnnnnnnnnnnnnnnnnnnnnnnnnnnnnnnnnnnnnnnnnnnnnnnnnnnnnnnnnnnnnnnnnnnnnnnnnnnnnnnnnnnnnnnnnnnnnnnnnnnnnnnnnnnnnnnnnnnnnnnnnnnnnnnnnnnnnnnnnnnnnnnnnnnnnnnnnnnnnnnnnnnnnnnnnnnnnnnnnnnnnnnnnnnnnnnnnnnnnnnnnnnnnnnnnnnnnnnnnnnnnnnnnnnnnnnnnnnnnnnnnnnnnnnnnnnnnnnnnnnnnnnnnnnnnnnnnnnnnnnnnnnnnnnnnnnnnnnnnnnnnnnnnnnnnnnnnnnnnnnnnnnnnnnnnnnnnnnnnnnnnnnnnnnnnnnnnnnnnnnnnnnnnnnnnnnnnnnnnnnnnnnnnnnnnnnnnnnnnnnnnnnnnnnnnnnnnnnnnnnnnnnnnnnnnnnnnnnnnnnnnnnnnnnnnnnnnnnnnnnnnnnnnnnnnnnnnnnnnnnnnnnnnnnnnnnnnnnnnnnnnnnnnnnnnnnnnnnnnnnnnnnnnnnnnnnnnnnnnnnnnnnnnnnnnnnnnnnnnnnnnnnnnnnnnnnnnnnnnnnnnnnnnnnnnnnnnnnnnnnnnnnnnnnnnnnnnnnnnnnnnnnnnnnnnnnnnnnnnnnnnnnnnnnnnnnnnnnnnnnnnnnnnnnnnnnnnnnnnnnnnnnnnnnnnnnnnnnnnnnnnnnnnnnnnnnnnnnnnnnnnnnnnnnnnnnnnnnnnnnnnnnnnnnnnnnnnnnnnnnnnnnnnnnnnnnnnnnnnnnnnnnnnnnnnnnnnnnnnnnnnnnnnnnnnnnnnnnnnnnnnnnnnnnnnnnnnnnnnnnnnnnnnnnnnnnnnnnnnnnnnnnnnnnnnnnnnnnnnnnnnnnnnnnnnnnnnnnnnnnnnnnnnnnnnnnnnnnnnnnnnnnnnnnnnnnnnnnnnnnnnnnnnnnnnnnnnnnnnnnnnnnnnnnnnnnnnnnnnnnnnnnnnnnnnnnnnnnnnnnnnnnnnnnnnnnnnnnnnnnnnnnnnnnnnnnnnnnnnnnnnnnnnnnnnnnnnnnnnnnnnnnnnnnnnnnnnnnnnnnnnnnnnnnnnnnnnnnnnnnnnnnnnnnnnnnnnnnnnnnnnnnnnnnnnnnnnnnnnnnnnnnnnnnnnnnnnnnnnnnnnnnnnnnnnnnnnnnnnnnnnnnnnnnnnnnnnnnnnnnnnnnnnnnnnnnnnnnnnnnnnnnnnnnnnnnnnnnnnnnnnnnnnnnnnnnnnnnnnnnnnnnnnnnnnnnnnnnnnnnnnnnnnnnnnnnnnnnnnnnnnnnnnnnnnnnnnnnnnnnnnnnnnnnnnnnnnnnnnnnnnnnnnnnnnnnnnnnnnnnnnnnnnnnnnnnnnnnnnnnnnnnnnnnnnnnnnnnnnnnnnnnnnnnnnnnnnnnnnnnnnnnnnnnnnnnnnnnnnnnnnnnnnnnnnnnnnnnnnnnnnnnnnnnnnnnnnnnnnnnnnnnnnnnnnnnnnnnnnnnnnnnnnnnnnnnnnnnnnnnnnnnnnnnnnnnnnnnnnnnnnnnnnnnnnnnnnnnnnnnnnnnnnnnnnnnnnnnnnnnnnnnnnnnnnnnnnnnnnnnnnnnnnnnnnnnnnnnnnnnnnnnnnnnnnnnnnnnnnnnnnnnnnnnnnnnnnnnnnnnnnnnnnnnnnnnnnnnnnnnnnnnnnnnnnnnnnnnnnnnnnnnnnnnnnnnnnnnnnnnnnnnnnnnnnnnnnnnnnnnnnnnnnnnnnnnnnnnnnnnnnnnnnnnnnnnnnnnnnnnnnnnnnnnnnnnnnnnnnnnnnnnnnnnnnnnnnnnnnnnnnnnnnnnnnnnnnnnnnnnnnnnnnnnnnnnnnnnnnnnnnnnnnnnnnnnnnnnnnnnnnnnnnnnnnnnnnnnnnnnnnnnnnnnnnnnnnnnnnnnnnnnnnnnnnnnnnnnnnnnnnnnnnnnnnnnnnnnnnnnnnnnnnnnnnnnnnnnnnnnnnnnnnnnnnnnnnnnnnnnnnnnnnnnnnnnnnnnnnnnnnnnnnnnnnnnnnnnnnnnnnnnnnnnnnnnnnnnnnnnnnnnnnnnnnnnnnnnnnnnnnnnnnnnnnnnnnnnnnnnnnnnnnnnnnnnnnnnnnnnnnnnnnnnnnnnnnnnnnnnnnnnnnnnnnnnnnnnnnnnnnnnnnnnnnnnnnnnnnnnnnnnnnnnnnnnnnnnnnnnnnnnnnnnnnnnnnnnnnnnnnnnnnnnnnnnnnnnnnnnnnnnnnnnnnnnnnnnnnnnnnnnnnnnnnnnnnnnnnnnnnnnnnnnnnnnnnnnnnnnnnnnnnnnnnnnnnnnnnnnnnnnnnnnnnnnnnnnnnnnnnnnnnnnnnnnnnnnnnnnnnnnnnnnnnnnnnnnnnnnnnnnnnnnnnnnnnnnnnnnnnnnnnnnnnnnnnnnnnnnnnnnnnnnnnnnnnnnnnnnnnnnnnnnnnnnnnnnnnnnnnnnnnnnnnnnnnnnnnnnnnnnnnnnnnnnnnnnnnnnnnnnnnnnnnnnnnnnnnnnnnnnnnnnnnnnnnnnnnnnnnnnnnnnnnnnnnnnnnnnnnnnnnnnnnnnnnnnnnnnnnnnnnnnnnnnnnnnnnnnnnnnnnnnnnnnnnnnnnnnnnnnnnnnnnnnnnnnnnnnnnnnnnnnnnnnnnnnnnnnnnnnnnnnnnnnnnnnnnnnnnnnnnnnnnnnnnnnnnnnnnnnnnnnnnnnnnnnnnnnnnnnnnnnnnnnnnnnnnnnnnnnnnnnnnnnnnnnnnnnnnnnnnnnnnnnnnnnnnnnnnnnnnnnnnnnnnnnnnnnnnnnnnnnnnnnnnnnnnnnnnnnnnnnnnnnnnnnnnnnnnnnnnnnnnnnnnnnnnnnnnnnnnnnnnnnnnnnnnnnnnnnnnnnnnnnnnnnnnnnnnnnnnnnnnnnnnnnnnnnnnnnnnnnnnnnnnnnnnnnnnnnnnnnnnnnnnnnnnnnnnnnnnnnnnnnnnnnnnnnnnnnnnnnnnnnnnnnnnnnnnnnnnnnnnnnnnnnnnnnnnnnnnnnnnnnnnnnnnnnnnnnnnnnnnnnnnnnnnnnnnnnnnnnnnnnnnnnnnnnnnnnnnnnnnnnnnnnnnnnnnnnnnnnnnnnnnnnnnnnnnnnnnnnnnnnnnnnnnnnnnnnnnnnnnnnnnnnnnnnnnnnnnnnnnnnnnnnnnnnnnnnnnnnnnnnnnnnnnnnnnnnnnnnnnnnnnnnnnnnnnnnnnnnnnnnnnnnnnnnnnnnnnnnnnnnnnnnnnnnnnnnnnnnnnnnnnnnnnnnnnnnnnnnnnnnnnnnnnnnnnnnnnnnnnnnnnnnnnnnnnnnnnnnnnnnnnnnnnnnnnnnnnnnnnnnnnnnnnnnnnnnnnnnnnnnnnnnnnnnnnnnnnnnnnnnnnnnnnnnnnnnnnnnnnnnnnnnnnnnnnnnnnnnnnnnnnnnnnnnnnnnnnnnnnnnnnnnnnnnnnnnnnnnnnnnnnnnnnnnnnnnnnnnnnnnnnnnnnnnnnnnnnnnnnnnnnnnnnnnnnnnnnnnnnnnnnnnnnnnnnnnnnnnnnnnnnnnnnnnnnnnnnnnnnnnnnnnnnnnnnnnnnnnnnnnnnnnnnnnnnnnnnnnnnnnnnnnnnnnnnnnnnnnnnnnnnnnnnnnnnnnnnnnnnnnnnnnnnnnnnnnnnnnnnnnnnnnnnnnnnnnnnnnnnnnnnnnnnnnnnnnnnnnnnnnnnnnnnnnnnnnnnnnnnnnnnnnnnnnnnnnnnnnnnnnnnnnnnnnnnnnnnnnnnnnnnnnnnnnnnnnnnnnnnnnnnnnnnnnnnnnnnnnnnnnnnnnnnnnnnnnnnnnnnnnnnnnnnnnnnnnnnnnnnnnnnnnnnnnnnnnnnnnnnnnnnnnnnnnnnnnnnnnnnnnnnnnnnnnnnnnnnnnnnnnnnnnnnnnnnnnnnnnnnnnnnnnnnnnnnnnnnnnnnnnnnnnnnnnnnnnnnnnnnnnnnnnnnnnnnnnnnnnnnnnnnnnnnnnnnnnnnnnnnnnnnnnnnnnnnnnnnnnnnnnnnnnnnnnnnnnnnnnnnnnnnnnnnnnnnnnnnnnnnnnnnnnnnnnnnnnnnnnnnnnnnnnnnnnnnnnnnnnnnnnnnnnnnnnnnnnnnnnnnnnnnnnnnnnnnnnnnnnnnnnnnnnnnnnnnnnnnnnnnnnnnnnnnnnnnnnnnnnnnnnnnnnnnnnnnnnnnnnnnnnnnnnnnnnnnnnnnnnnnnnnnnnnnnnnnnnnnnnnnnnnnnnnnnnnnnnnnnnnnnnnnnnnnnnnnnnnnnnnnnnnnnnnnnnnnnnnnnnnnnnnnnnnnnnnnnnnnnnnnnnnnnnnnnnnnnnnnnnnnnnnnnnnnnnnnnnnnnnnnnnnnnnnnnnnnnnnnnnnnnnnnnnnnnnnnnnnnnnnnnnnnnnnnnnnnnnnnnnnnnnnnnnnnnnnnnnnnnnnnnnnnnnnnnnnnnnnnnnnnnnnnnnnnnnnnnnnnnnnnnnnnnnnnnnnnnnnnnnnnnnnnnnnnnnnnnnnnnnnnnnnnnnnnnnnnnnnnnnnnnnnnnnnnnnnnnnnnnnnnnnnnnnnnnnnnnnnnnnnnnnnnnnnnnnnnnnnnnnnnnnnnnnnnnnnnnnnnnnnnnnnnnnnnnnnnnnnnnnnnnnnnnnnnnnnnnnnnnnnnnnnnnnnnnnnnnnnnnnnnnnnnnnnnnnnnnnnnnnnnnnnnnnnnnnnnnnnnnnnnnnnnnnnnnnnnnnnnnnnnnnnnnnnnnnnnnnnnnnnnnnnnnnnnnnnnnnnnnnnnnnnnnnnnnnnnnnnnnnnnnnnnnnnnnnnnnnnnnnnnnnnnnnnnnnnnnnnnnnnnnnnnnnnnnnnnnnnnnnnnnnnnnnnnnnnnnnnnnnnnnnnnnnnnnnnnnnnnnnnnnnnnnnnnnnnnnnnnnnnnnnnnnnnnnnnnnnnnnnnnnnnnnnnnnnnnnnnnnnnnnnnnnnnnnnnnnnnnnnnnnnnnnnnnnnnnnnnnnnnnnnnnnnnnnnnnnnnnnnnnnnnnnnnnnnnnnnnnnnnnnnnnnnnnnnnnnnnnnnnnnnnnnnnnnnnnnnnnnnnnnnnnnnnnnnnnnnnnnnnnnnnnnnnnnnnnnnnnnnnnnnnnnnnnnnnnnnnnnnnnnnnnnnnnnnnnnnnnnnnnnnnnnnnnnnnnnnnnnnnnnnnnnnnnnnnnnnnnnnnnnnnnnnnnnnnnnnnnnnnnnnnnnnnnnnnnnnnnnnnnnnnnnnnnnnnnnnnnnnnnnnnnnnnnnnnnnnnnnnnnnnnnnnnnnnnnnnnnnnnnnnnnnnnnnnnnnnnnnnnnnnnnnnnnnnnnnnnnnnnnnnnnnnnnnnnnnnnnnnnnnnnnnnnnnnnnnnnnnnnnnnnnnnnnnnnnnnnnnnnnnnnnnnnnnnnnnnnnnnnnnnnnnnnnnnnnnnnnnnnnnnnnnnnnnnnnnnnnnnnnnnnnnnnnnnnnnnnnnnnnnnnnnnnnnnnnnnnnnnnnnnnnnnnnnnnnnnnnnnnnnnnnnnnnnnnnnnnnnnnnnnnnnnnnnnnnnnnnnnnnnnnnnnnnnnnnnnnnnnnnnnnnnnnnnnnnnnnnnnnnnnnnnnnnnnnnnnnnnnnnnnnnnnnnnnnnnnnnnnnnnnnnnnnnnnnnnnnnnnnnnnnnnnnnnnnnnnnnnnnnnnnnnnnnnnnnnnnnnnnnnnnnnnnnnnnnnnnnnnnnnnnnnnnnnnnnnnnnnnnnnnnnnnnnnnnnnnnnnnnnnnnnnnnnnnnnnnnnnnnnnnnnnnnnnnnnnnnnnnnnnnnnnnnnnnnnnnnnnnnnnnnnnnnnnnnnnnnnnnnnnnnnnnnnnnnnnnnnnnnnnnnnnnnnnnnnnnnnnnnnnnnnnnnnnnnnnnnnnnnnnnnnnnnnnnnnnnnnnnnnnnnnnnnnnnnnnnnnnnnnnnnnnnnnnnnnnnnnnnnnnnnnnnnnnnnnnnnnnnnnnnnnnnnnnnnnnnnnnnnnnnnnnnnnnnnnnnnnnnnnnnnnnnnnnnnnnnnnnnnnnnnnnnnnnnnnnnnnnnnnnnnnnnnnnnnnnnnnnnnnnnnnnnnnnnnnnnnnnnnnnnnnnnnnnnnnnnnnnnnnnnnnnnnnnnnnnnnnnnnnnnnnnnnnnnnnnnnnnnnnnnnnnnnnnnnnnnnnnnnnnnnnnnnnnnnnnnnnnnnnnnnnnnnnnnnnnnnnnnnnnnnnnnnnnnnnnnnnnnnnnnnnnnnnnnnnnnnnnnnnnnnnnnnnnnnnnnnnnnnnnnnnnnnnnnnnnnnnnnnnnnnnnnnnnnnnnnnnnnnnnnnnnnnnnnnnnnnnnnnnnnnnnnnnnnnnnnnnnnnnnnnnnnnnnnnnnnnnnnnnnnnnnnnnnnnnnnnnnnnnnnnnnnnnnnnnnnnnnnnnnnnnnnnnnnnnnnnnnnnnnnnnnnnnnnnnnnnnnnnnnnnnnnnnnnnnnnnnnnnnnnnnnnnnnnnnnnnnnnnnnnnnnnnnnnnnnnnnnnnnnnnnnnnnnnnnnnnnnnnnnnnnnnnnnnnnnnnnnnnnnnnnnnnnnnnnnnnnnnnnnnnnnnnnnnnnnnnnnnnnnnnnnnnnnnnnnnnnnnnnnnnnnnnnnnnnnnnnnnnnnnnnnnnnnnnnnnnnnnnnnnnnnnnnnnnnnnnnnnnnnnnnnnnnnnnnnnnnnnnnnnnnnnnnnnnnnnnnnnnnnnnnnnnnnnnnnnnnnnnnnnnnnnnnnnnnnnnnnnnnnnnnnnnnnnnnnnnnnnnnnnnnnnnnnnnnnnnnnnnnnnnnnnnnnnnnnnnnnnnnnnnnnnnnnnnnnnnnnnnnnnnnnnnnnnnnnnnnnnnnnnnnnnnnnnnnnnnnnnnnnnnnnnnnnnnnnnnnnnnnnnnnnnnnnnnnnnnnnnnnnnnnnnnnnnnnnnnnnnnnnnnnnnnnnnnnnnnnnnnnnnnnnnnnnnnnnnnnnnnnnnnnnnnnnnnnnnnnnnnnnnnnnnnnnnnnnnnnnnnnnnnnnnnnnnnnnnnnnnnnnnnnnnnnnnnnnnnnnnnnnnnnnnnnnnnnnnnnnnnnnnnnnnnnnnnnnnnnnnnnnnnnnnnnnnnnnnnnnnnnnnnnnnnnnnnnnnnnnnnnnnnnnnnnnnnnnnnnnnnnnnnnnnnnnnnnnnnnnnnnnnnnnnnnnnnnnnnnnnnnnnnnnnnnnnnnnnnnnnnnnnnnnnnnnnnnnnnnnnnnnnnnnnnnnnnnnnnnnnnnnnnnnnnnnnnnnnnnnnnnnnnnnnnnnnnnnnnnnnnnnnnnnnnnnnnnnnnnnnnnnnnnnnnnnnnnnnnnnnnnnnnnnnnnnnnnnnnnnnnnnnnnnnnnnnnnnnnnnnnnnnnnnnnnnnnnnnnnnnnnnnnnnnnnnnnnnnnnnnnnnnnnnnnnnnnnnnnnnnnnnnnnnnnnnnnnnnnnnnnnnnnnnnnnnnnnnnnnnnnnnnnnnnnnnnnnnnnnnnnnnnnnnnnnnnnnnnnnnnnnnnnnnnnnnnnnnnnnnnnnnnnnnnnnnnnnnnnnnnnnnnnnnnnnnnnnnnnnnnnnnnnnnnnnnnnnnnnnnnnnnnnnnnnnnnnnnnnnnnnnnnnnnnnnnnnnnnnnnnnnnnnnnnnnnnnnnnnnnnnnnnnnnnnnnnnnnnnnnnnnnnnnnnnnnnnnnnnnnnnnnnnnnnnnnnnnnnnnnnnnnnnnnnnnnnnnnnnnnnnnnnnnnnnnnnnnnnnnnnnnnnnnnnnnnnnnnnnnnnnnnnnnnnnnnnnnnnnnnnnnnnnnnnnnnnnnnnnnnnnnnnnnnnnnnnnnnnnnnnnnnnnnnnnnnnnnnnnnnnnnnnnnnnnnnnnnnnnnnnnnnnnnnnnnnnnnnnnnnnnnnnnnnnnnnnnnnnnnnnnnnnnnnnnnnnnnnnnnnnnnnnnnnnnnnnnnnnnnnnnnnnnnnnnnnnnnnnnnnnnnnnnnnnnnnnnnnnnnnnnnnnnnnnnnnnnnnnnnnnnnnnnnnnnnnnnnnnnnnnnnnnnnnnnnnnnnnnnnnnnnnnnnnnnnnnnnnnnnnnnnnnnnnnnnnnnnnnnnnnnnnnnnnnnnnnnnnnnnnnnnnnnnnnnnnnnnnnnnnnnnnnnnnnnnnnnnnnnnnnnnnnnnnnnnnnnnnnnnnnnnnnnnnnnnnnnnnnnnnnnnnnnnnnnnnnnnnnnnnnnnnnnnnnnnnnnnnnnnnnnnnnnnnnnnnnnnnnnnnnnnnnnnnnnnnnnnnnnnnnnnnnnnnnnnnnnnnnnnnnnnnnnnnnnnnnnnnnnnnnnnnnnnnnnnnnnnnnnnnnnnnnnnnnnnnnnnnnnnnnnnnnnnnnnnnnnnnnnnnnnnnnnnnnnnnnnnnnnnnnnnnnnnnnnnnnnnnnnnnnnnnnnnnnnnnnnnnnnnnnnnnnnnnnnnnnnnnnnnnnnnnnnnnnnnnnnnnnnnnnnnnnnnnnnnnnnnnnnnnnnnnnnnnnnnnnnnnnnnnnnnnnnnnnnnnnnnnnnnnnnnnnnnnnnnnnnnnnnnnnnnnnnnnnnnnnnnnnnnnnnnnnnnnnnnnnnnnnnnnnnnnnnnnnnnnnnnnnnnnnnnnnnnnnnnnnnnnnnnnnnnnnnnnnnnnnnnnnnnnnnnnnnnnnnnnnnnnnnnnnnnnnnnnnnnnnnnnnnnnnnnnnnnnnnnnnnnnnnnnnnnnnnnnnnnnnnnnnnnnnnnnnnnnnnnnnnnnnnnnnnnnnnnnnnnnnnnnnnnnnnnnnnnnnnnnnnnnnnnnnnnnnnnnnnnnnnnnnnnnnnnnnnnnnnnnnnnnnnnnnnnnnnnnnnnnnnnnnnnnnnnnnnnnnnnnnnnnnnnnnnnnnnnnnnnnnnnnnnnnnnnnnnnnnnnnnnnnnnnnnnnnnnnnnnnnnnnnnnnnnnnnnnnnnnnnnnnnnnnnnnnnnnnnnnnnnnnnnnnnnnnnnnnnnnnnnnnnnnnnnnnnnnnnnnnnnnnnnnnnnnnnnnnnnnnnnnnnnnnnnnnnnnnnnnnnnnnnnnnnnnnnnnnnnnnnnnnnnnnnnnnnnnnnnnnnnnnnnnnnnnnnnnnnnnnnnnnnnnnnnnnnnnnnnnnnnnnnnnnnnnnnnnnnnnnnnnnnnnnnnnnnnnnnnnnnnnnnnnnnnnnnnnnnnnnnnnnnnnnnnnnnnnnnnnnnnnnnnnnnnnnnnnnnnnnnnnnnnnnnnnnnnnnnnnnnnnnnnnnnnnnnnnnnnnnnnnnnnnnnnnnnnnnnnnnnnnnnnnnnnnnnnnnnnnnnnnnnnnnnnnnnnnnnnnnnnnnnnnnnnnnnnnnnnnnnnnnnnnnnnnnnnnnnnnnnnnnnnnnnnnnnnnnnnnnnnnnnnnnnnnnnnnnnnnnnnnnnnnnnnnnnnnnnnnnnnnnnnnnnnnnnnnnnnnnnnnnnnnnnnnnnnnnnnnnnnnnnnnnnnnnnnnnnnnnnnnnnnnnnnnnnnnnnnnnnnnnnnnnnnnnnnnnnnnnnnnnnnnnnnnnnnnnnnnnnnnnnnnnnnnnnnnnnnnnnnnnnnnnnnnnnnnnnnnnnnnnnnnnnnnnnnnnnnnnnnnnnnnnnnnnnnnnnnnnnnnnnnnnnnnnnnnnnnnnnnnnnnnnnnnnnnnnnnnnnnnnnnnnnnnnnnnnnnnnnnnnnnnnnnnnnnnnnnnnnnnnnnnnnnnnnnnnnnnnnnnnnnnnnnnnnnnnnnnnnnnnnnnnnnnnnnnnnnnnnnnnnnnnnnnnnnnnnnnnnnnnnnnnnnnnnnnnnnnnnnnnnnnnnnnnnnnnnnnnnnnnnnnnnnnnnnnnnnnnnnnnnnnnnnnnnnnnnnnnnnnnnnnnnnnnnnnnnnnnnnnnnnnnnnnnnnnnnnnnnnnnnnnnnnnnnnnnnnnnnnnnnnnnnnnnnnnnnnnnnnnnnnnnnnnnnnnnnnnnnnnnnnnnnnnnnnnnnnnnnnnnnnnnnnnnnnnnnnnnnnnnnnnnnnnnnnnnnnnnnnnnnnnnnnnnnnnnnnnnnnnnnnnnnnnnnnnnnnnnnnnnnnnnnnnnnnnnnnnnnnnnnnnnnnnnnnnnnnnnnnnnnnnnnnnnnnnnnnnnnnnnnnnnnnnnnnnnnnnnnnnnnnnnnnnnnnnnnnnnnnnnnnnnnnnnnnnnnnnnnnnnnnnnnnnnnnnnnnnnnnnnnnnnnnnnnnnnnnnnnnnnnnnnnnnnnnnnnnnnnnnnnnnnnnnnnnnnnnnnnnnnnnnnnnnnnnnnnnnnnnnnnnnnnnnnnnnnnnnnnnnnnnnnnnnnnnnnnnnnnnnnnnnnnnnnnnnnnnnnnnnnnnnnnnnnnnnnnnnnnnnnnnnnnnnnnnnnnnnnnnnnnnnnnnnnnnnnnnnnnnnnnnnnnnnnnnnnnnnnnnnnnnnnnnnnnnnnnnnnnnnnnnnnnnnnnnnnnnnnnnnnnnnnnnnnnnnnnnnnnnnnnnnnnnnnnnnnnnnnnnnnnnnnnnnnnnnnnnnnnnnnnnnnnnnnnnnnnnnnnnnnnnnnnnnnnnnnnnnnnnnnnnnnnnnnnnnnnnnnnnnnnnnnnnnnnnnnnnnnnnnnnnnnnnnnnnnnnnnnnnnnnnnnnnnnnnnnnnnnnnnnnnnnnnnnnnnnnnnnnnnnnnnnnnnnnnnnnnnnnnnnnnnnnnnnnnnnnnnnnnnnnnnnnnnnnnnnnnnnnnnnnnnnnnnnnnnnnnnnnnnnnnnnnnnnnnnnnnnnnnnnnnnnnnnnnnnnnnnnnnnnnnnnnnnnnnnnnnnnnnnnnnnnnnnnnnnnnnnnnnnnnnnnnnnnnnnnnnnnnnnnnnnnnnnnnnnnnnnnnnnnnnnnnnnnnnnnnnnnnnnnnnnnnnnnnnnnnnnnnnnnnnnnnnnnnnnnnnnnnnnnnnnnnnnnnnnnnnnnnnnnnnnnnnnnnnnnnnnnnnnnnnnnnnnnnnnnnnnnnnnnnnnnnnnnnnnnnnnnnnnnnnnnnnnnnnnnnnnnnnnnnnnnnnnnnnnnnnnnnnnnnnnnnnnnnnnnnnnnnnnnnnnnnnnnnnnnnnnnnnnnnnnnnnnnnnnnnnnnnnnnnnnnnnnnnnnnnnnnnnnnnnnnnnnnnnnnnnnnnnnnnnnnnnnnnnnnnnnnnnnnnnnnnnnnnnnnnnnnnnnnnnnnnnnnnnnnnnnnnnnnnnnnnnnnnnnnnnnnnnnnnnnnnnnnnnnnnnnnnnnnnnnnnnnnnnnnnnnnnnnnnnnnnnnnnnnnnnnnnnnnnnnnnnnnnnnnnnnnnnnnnnnnnnnnnnnnnnnnnnnnnnnnnnnnnnnnnnnnnnnnnnnnnnnnnnnnnnnnnnnnnnnnnnnnnnnnnnnnnnnnnnnnnnnnnnnnnnnnnnnnnnnnnnnnnnnnnnnnnnnnnnnnnnnnnnnnnnnnnnnnnnnnnnnnnnnnnnnnnnnnnnnnnnnnnnnnnnnnnnnnnnnnnnnnnnnnnnnnnnnnnnnnnnnnnnnnnnnnnnnnnnnnnnnnnnnnnnnnnnnnnnnnnnnnnnnnnnnnnnnnnnnnnnnnnnnnnnnnnnnnnnnnnnnnnnnnnnnnnnnnnnnnnnnnnnnnnnnnnnnnnnnnnnnnnnnnnnnnnnnnnnnnnnnnnnnnnnnnnnnnnnnnnnnnnnnnnnnnnnnnnnnnnnnnnnnnnnnnnnnnnnnnnnnnnnnnnnnnnnnnnnnnnnnnnnnnnnnnnnnnnnnnnnnnnnnnnnnnnnnnnnnnnnnnnnnnnnnnnnnnnnnnnnnnnnnnnnnnnnnnnnnnnnnnnnnnnnnnnnnnnnnnnnnnnnnnnnnnnnnnnnnnnnnnnnnnnnnnnnnnnnnnnnnnnnnnnnnnnnnnnnnnnnnnnnnnnnnnnnnnnnnnnnnnnnnnnnnnnnnnnnnnnnnnnnnnnnnnnnnnnnnnnnnnnnnnnnnnnnnnnnnnnnnnnnnnnnnnnnnnnnnnnnnnnnnnnnnnnnnnnnnnnnnnnnnnnnnnnnnnnnnnnnnnnnnnnnnnnnnnnnnnnnnnnnnnnnnnnnnnnnnnnnnnnnnnnnnnnnnnnnnnnnnnnnnnnnnnnnnnnnnnnnnnnnnnnnnnnnnnnnnnnnnnnnnnnnnnnnnnnnnnnnnnnnnnnnnnnnnnnnnnnnnnnnnnnnnnnnnnnnnnnnnnnnnnnnnnnnnnnnnnnnnnnnnnnnnnnnnnnnnnnnnnnnnnnnnnnnnnnnnnnnnnnnnnnnnnnnnnnnnnnnnnnnnnnnnnnnnnnnnnnnnnnnnnnnnnnnnnnnnnnnnnnnnnnnnnnnnnnnnnnnnnnnnnnnnnnnnnnnnnnnnnnnnnnnnnnnnnnnnnnnnnnnnnnnnnnnnnnnnnnnnnnnnnnnnnnnnnnnnnnnnnnnnnnnnnnnnnnnnnnnnnnnnnnnnnnnnnnnnnnnnnnnnnnnnnnnnnnnnnnnnnnnnnnnnnnnnnnnnnnnnnnnnnnnnnnnnnnnnnnnnnnnnnnnnnnnnnnnnnnnnnnnnnnnnnnnnnnnnnnnnnnnnnnnnnnnnnnnnnnnnnnnnnnnnnnnnnnnnnnnnnnnnnnnnnnnnnnnnnnnnnnnnnnnnnnnnnnnnnnnnnnnnnnnnnnnnnnnnnnnnnnnnnnnnnnnnnnnnnnnnnnnnnnnnnnnnnnnnnnnnnnnnnnnnnnnnnnnnnnnnnnnnnnnnnnnnnnnnnnnnnnnnnnnnnnnnnnnnnnnnnnnnnnnnnnnnnnnnnnnnnnnnnnnnnnnnnnnnnnnnnnnnnnnnnnnnnnnnnnnnnnnnnnnnnnnnnnnnnnnnnnnnnnnnnnnnnnnnnnnnnnnnnnnnnnnnnnnnnnnnnnnnnnnnnnnnnnnnnnnnnnnnnnnnnnnnnnnnnnnnnnnnnnnnnnnnnnnnnnnnnnnnnnnnnnnnnnnnnnnnnnnnnnnnnnnnnnnnnnnnnnnnnnnnnnnnnnnnnnnnnnnnnnnnnnnnnnnnnnnnnnnnnnnnnnnnnnnnnnnnnnnnnnnnnnnnnnnnnnnnnnnnnnnnnnnnnnnnnnnnnnnnnnnnnnnnnnnnnnnnnnnnnnnnnnnnnnnnnnnnnnnnnnnnnnnnnnnnnnnnnnnnnnnnnnnnnnnnnnnnnnnnnnnnnnnnnnnnnnnnnnnnnnnnnnnnnnnnnnnnnnnnnnnnnnnnnnnnnnnnnnnnnnnnnnnnnnnnnnnnnnnnnnnnnnnnnnnnnnnnnnnnnnnnnnnnnnnnnnnnnnnnnnnnnnnnnnnnnnnnnnnnnnnnnnnnnnnnnnnnnnnnnnnnnnnnnnnnnnnnnnnnnnnnnnnnnnnnnnnnnnnnnnnnnnnnnnnnnnnnnnnnnnnnnnnnnnnnnnnnnnnnnnnnnnnnnnnnnnnnnnnnnnnnnnnnnnnnnnnnnnnnnnnnnnnnnnnnnnnnnnnnnnnnnnnnnnnnnnnnnnnnnnnnnnnnnnnnnnnnnnnnnnnnnnnnnnnnnnnnnnnnnnnnnnnnnnnnnnnnnnnnnnnnnnnnnnnnnnnnnnnnnnnnnnnnnnnnnnnnnnnnnnnnnnnnnnnnnnnnnnnnnnnnnnnnnnnnnnnnnnnnnnnnnnnnnnnnnnnnnnnnnnnnnnnnnnnnnnnnnnnnnnnnnnnnnnnnnnnnnnnnnnnnnnnnnnnnnnnnnnnnnnnnnnnnnnnnnnnnnnnnnnnnnnnnnnnnnnnnnnnnnnnnnnnnnnnnnnnnnnnnnnnnnnnnnnnnnnnnnnnnnnnnnnnnnnnnnnnnnnnnnnnnnnnnnnnnnnnnnnnnnnnnnnnnnnnnnnnnnnnnnnnnnnnnnnnnnnnnnnnnnnnnnnnnnnnnnnnnnnnnnnnnnnnnnnnnnnnnnnnnnnnnnnnnnnnnnnnnnnnnnnnnnnnnnnnnnnnnnnnnnnnnnnnnnnnnnnnnnnnnnnnnnnnnnnnnnnnnnnnnnnnnnnnnnnnnnnnnnnnnnnnnnnnnnnnnnnnnnnnnnnnnnnnnnnnnnnnnnnnnnnnnnnnnnnnnnnnnnnnnnnnnnnnnnnnnnnnnnnnnnnnnnnnnnnnnnnnnnnnnnnnnnnnnnnnnnnnnnnnnnnnnnnnnnnnnnnnnnnnnnnnnnnnnnnnnnnnnnnnnnnnnnnnnnnnnnnnnnnnnnnnnnnnnnnnnnnnnnnnnnnnnnnnnnnnnnnnnnnnnnnnnnnnnnnnnnnnnnnnnnnnnnnnnnnnnnnnnnnnnnnnnnnnnnnnnnnnnnnnnnnnnnnnnnnnnnnnnnnnnnnnnnnnnnnnnnnnnnnnnnnnnnnnnnnnnnnnnnnnnnnnnnnnnnnnnnnnnnnnnnnnnnnnnnnnnnnnnnnnnnnnnnnnnnnnnnnnnnnnnnnnnnnnnnnnnnnnnnnnnnnnnnnnnnnnnnnnnnnnnnnnnnnnnnnnnnnnnnnnnnnnnnnnnnnnnnnnnnnnnnnnnnnnnnnnnnnnnnnnnnnnnnnnnnnnnnnnnnnnnnnnnnnnnnnnnnnnnnnnnnnnnnnnnnnnnnnnnnnnnnnnnnnnnnnnnnnnnnnnnnnnnnnnnnnnnnnnnnnnnnnnnnnnnnnnnnnnnnnnnnnnnnnnnnnnnnnnnnnnnnnnnnnnnnnnnnnnnnnnnnnnnnnnnnnnnnnnnnnnnnnnnnnnnnnnnnnnnnnnnnnnnnnnnnnnnnnnnnnnnnnnnnnnnnnnnnnnnnnnnnnnnnnnnnnnnnnnnnnnnnnnnnnnnnnnnnnnnnnnnnnnnnnnnnnnnnnnnnnnnnnnnnnnnnnnnnnnnnnnnnnnnnnnnnnnnnnnnnnnnnnnnnnnnnnnnnnnnnnnnnnnnnnnnnnnnnnnnnnnnnnnnnnnnnnnnnnnnnnnnnnnnnnnnnnnnnnnnnnnnnnnnnnnnnnnnnnnnnnnnnnnnnnnnnnnnnnnnnnnnnnnnnnnnnnnnnnnnnnnnnnnnnnnnnnnnnnnnnnnnnnnnnnnnnnnnnnnnnnnnnnnnnnnnnnnnnnnnnnnnnnnnnnnnnnnnnnnnnnnnnnnnnnnnnnnnnnnnnnnnnnnnnnnnnnnnnnnnnnnnnnnnnnnnnnnnnnnnnnnnnnnnnnnnnnnnnnnnnnnnnnnnnnnnnnnnnnnnnnnnnnnnnnnnnnnnnnnnnnnnnnnnnnnnnnnnnnnnnnnnnnnnnnnnnnnnnnnnnnnnnnnnnnnnnnnnnnnnnnnnnnnnnnnnnnnnnnnnnnnnnnnnnnnnnnnnnnnnnnnnnnnnnnnnnnnnnnnnnnnnnnnnnnnnnnnnnnnnnnnnnnnnnnnnnnnnnnnnnnnnnnnnnnnnnnnnnnnnnnnnnnnnnnnnnnnnnnnnnnnnnnnnnnnnnnnnnnnnnnnnnnnnnnnnnnnnnnnnnnnnnnnnnnnnnnnnnnnnnnnnnnnnnnnnnnnnnnnnnnnnnnnnnnnnnnnnnnnnnnnnnnnnnnnnnnnnnnnnnnnnnnnnnnnnnnnnnnnnnnnnnnnnnnnnnnnnnnnnnnnnnnnnnnnnnnnnnnnnnnnnnnnnnnnnnnnnnnnnnnnnnnnnnnnnnnnnnnnnnnnnnnnnnnnnnnnnnnnnnnnnnnnnnnnnnnnnnnnnnnnnnnnnnnnnnnnnnnnnnnnnnnnnnnnnnnnnnnnnnnnnnnnnnnnnnnnnnnnnnnnnnnnnnnnnnnnnnnnnnnnnnnnnnnnnnnnnnnnnnnnnnnnnnnnnnnnnnnnnnnnnnnnnnnnnnnnnnnnnnnnnnnnnnnnnnnnnnnnnnnnnnnnnnnnnnnnnnnnnnnnnnnnnnnnnnnnnnnnnnnnnnnnnnnnnnnnnnnnnnnnnnnnnnnnnnnnnnnnnnnnnnnnnnnnnnnnnnnnnnnnnnnnnnnnnnnnnnnnnnnnnnnnnnnnnnnnnnnnnnnnnnnnnnnnnnnnnnnnnnnnnnnnnnnnnnnnnnnnnnnnnnnnnnnnnnnnnnnnnnnnnnnnnnnnnnnnnnnnnnnnnnnnnnnnnnnnnnnnnnnnnnnnnnnnnnnnnnnnnnnnnnnnnnnnnnnnnnnnnnnnnnnnnnnnnnnnnnnnnnnnnnnnnnnnnnnnnnnnnnnnnnnnnnnnnnnnnnnnnnnnnnnnnnnnnnnnnnnnnnnnnnnnnnnnnnnnnnnnnnnnnnnnnnnnnnnnnnnnnnnnnnnnnnnnnnnnnnnnnnnnnnnnnnnnnnnnnnnnnnnnnnnnnnnnnnnnnnnnnnnnnnnnnnnnnnnnnnnnnnnnnnnnnnnnnnnnnnnnnnnnnnnnnnnnnnnnnnnnnnnnnnnnnnnnnnnnnnnnnnnnnnnnnnnnnnnnnnnnnnnnnnnnnnnnnnnnnnnnnnnnnnnnnnnnnnnnnnnnnnnnnnnnnnnnnnnnnnnnnnnnnnnnnnnnnnnnnnnnnnnnnnnnnnnnnnnnnnnnnnnnnnnnnnnnnnnnnnnnnnnnnnnnnnnnnnnnnnnnnnnnnnnnnnnnnnnnnnnnnnnnnnnnnnnnnnnnnnnnnnnnnnnnnnnnnnnnnnnnnnnnnnnnnnnnnnnnnnnnnnnnnnnnnnnnnnnnnnnnnnnnnnnnnnnnnnnnnnnnnnnnnnnnnnnnnnnnnnnnnnnnnnnnnnnnnnnnnnnnnnnnnnnnnnnnnnnnnnnnnnnnnnnnnnnnnnnnnnnnnnnnnnnnnnnnnnnnnnnnnnnnnnnnnnnnnnnnnnnnnnnnnnnnnnnnnnnnnnnnnnnnnnnnnnnnnnnnnnnnnnnnnnnnnnnnnnnnnnnnnnnnnnnnnnnnnnnnnnnnnnnnnnnnnnnnnnnnnnnnnnnnnnnnnnnnnnnnnnnnnnnnnnnnnnnnnnnnnnnnnnnnnnnnnnnnnnnnnnnnnnnnnnnnnnnnnnnnnnnnnnnnnnnnnnnnnnnnnnnnnnnnnnnnnnnnnnnnnnnnnnnnnnnnnnnnnnnnnnnnnnnnnnnnnnnnnnnnnnnnnnnnnnnnnnnnnnnnnnnnnnnnnnnnnnnnnnnnnnnnnnnnnnnnnnnnnnnnnnnnnnnnnnnnnnnnnnnnnnnnnnnnnnnnnnnnnnnnnnnnnnnnnnnnnnnnnnnnnnnnnnnnnnnnnnnnnnnnnnnnnnnnnnnnnnnnnnnnnnnnnnnnnnnnnnnnnnnnnnnnnnnnnnnnnnnnnnnnnnnnnnnnnnnnnnnnnnnnnnnnnnnnnnnnnnnnnnnnnnnnnnnnnnnnnnnnnnnnnnnnnnnnnnnnnnnnnnnnnnnnnnnnnnnnnnnnnnnnnnnnnnnnnnnnnnnnnnnnnnnnnnnnnnnnnnnnnnnnnnnnnnnnnnnnnnnnnnnnnnnnnnnnnnnnnnnnnnnnnnnnnnnnnnnnnnnnnnnnnnnnnnnnnnnnnnnnnnnnnnnnnnnnnnnnnnnnnnnnnnnnnnnnnnnnnnnnnnnnnnnnnnnnnnnnnnnnnnnnnnnnnnnnnnnnnnnnnnnnnnnnnnnnnnnnnnnnnnnnnnnnnnnnnnnnnnnnnnnnnnnnnnnnnnnnnnnnnnnnnnnnnnnnnnnnnnnnnnnnnnnnnnnnnnnnnnnnnnnnnnnnnnnnnnnnnnnnnnnnnnnnnnnnnnnnnnnnnnnnnnnnnnnnnnnnnnnnnnnnnnnnnnnnnnnnnnnnnnnnnnnnnnnnnnnnnnnnnnnnnnnnnnnnnnnnnnnnnnnnnnnnnnnnnnnnnnnnnnnnnnnnnnnnnnnnnnnnnnnnnnnnnnnnnnnnnnnnnnnnnnnnnnnnnnnnnnnnnnnnnnnnnnnnnnnnnnnnnnnnnnnnnnnnnnnnnnnnnnnnnnnnnnnnnnnnnnnnnnnnnnnnnnnnnnnnnnnnnnnnnnnnnnnnnnnnnnnnnnnnnnnnnnnnnnnnnnnnnnnnnnnnnnnnnnnnnnnnnnnnnnnnnnnnnnnnnnnnnnnnnnnnnnnnnnnnnnnnnnnnnnnnnnnnnnnnnnnnnnnnnnnnnnnnnnnnnnnnnnnnnnnnnnnnnnnnnnnnnnnnnnnnnnnnnnnnnnnnnnnnnnnnnnnnnnnnnnnnnnnnnnnnnnnnnnnnnnnnnnnnnnnnnnnnnnnnnnnnnnnnnnnnnnnnnnnnnnnnnnnnnnnnnnnnnnnnnnnnnnnnnnnnnnnnnnnnnnnnnnnnnnnnnnnnnnnnnnnnnnnnnnnnnnnnnnnnnnnnnnnnnnnnnnnnnnnnnnnnnnnnnnnnnnnnnnnnnnnnnnnnnnnnnnnnnnnnnnnnnnnnnnnnnnnnnnnnnnnnnnnnnnnnnnnnnnnnnnnnnnnnnnnnnnnnnnnnnnnnnnnnnnnnnnnnnnnnnnnnnnnnnnnnnnnnnnnnnnnnnnnnnnnnnnnnnnnnnnnnnnnnnnnnnnnnnnnnnnnnnnnnnnnnnnnnnnnnnnnnnnnnnnnnnnnnnnnnnnnnnnnnnnnnnnnnnnnnnnnnnnnnnnnnnnnnnnnnnnnnnnnnnnnnnnnnnnnnnnnnnnnnnnnnnnnnnnnnnnnnnnnnnnnnnnnnnnnnnnnnnnnnnnnnnnnnnnnnnnnnnnnnnnnnnnnnnnnnnnnnnnnnnnnnnnnnnnnnnnnnnnnnnnnnnnnnnnnnnnnnnnnnnnnnnnnnnnnnnnnnnnnnnnnnnnnnnnnnnnnnnnnnnnnnnnnnnnnnnnnnnnnnnnnnnnnnnnnnnnnnnnnnnnnnnnnnnnnnnnnnnnnnnnnnnnnnnnnnnnnnnnnnnnnnnnnnnnnnnnnnnnnnnnnnnnnnnnnnnnnnnnnnnnnnnnnnnnnnnnnnnnnnnnnnnnnnnnnnnnnnnnnnnnnnnnnnnnnnnnnnnnnnnnnnnnnnnnnnnnnnnnnnnnnnnnnnnnnnnnnnnnnnnnnnnnnnnnnnnnnnnnnnnnnnnnnnnnnnnnnnnnnnnnnnnnnnnnnnnnnnnnnnnnnnnnnnnnnnnnnnnnnnnnnnnnnnnnnnnnnnnnnnnnnnnnnnnnnnnnnnnnnnnnnnnnnnnnnnnnnnnnnnnnnnnnnnnnnnnnnnnnnnnnnnnnnnnnnnnnnnnnnnnnnnnnnnnnnnnnnnnnnnnnnnnnnnnnnnnnnnnnnnnnnnnnnnnnnnnnnnnnnnnnnnnnnnnnnnnnnnnnnnnnnnnnnnnnnnnnnnnnnnnnnnnnnnnnnnnnnnnnnnnnnnnnnnnnnnnnnnnnnnnnnnnnnnnnnnnnnnnnnnnnnnnnnnnnnnnnnnnnnnnnnnnnnnnnnnnnnnnnnnnnnnnnnnnnnnnnnnnnnnnnnnnnnnnnnnnnnnnnnnnnnnnnnnnnnnnnnnnnnnnnnnnnnnnnnnnnnnnnnnnnnnnnnnnnnnnnnnnnnnnnnnnnnnnnnnnnnnnnnnnnnnnnnnnnnnnnnnnnnnnnnnnnnnnnnnnnnnnnnnnnnnnnnnnnnnnnnnnnnnnnnnnnnnnnnnnnnnnnnnnnnnnnnnnnnnnnnnnnnnnnnnnnnnnnnnnnnnnnnnnnnnnnnnnnnnnnnnnnnnnnnnnnnnnnnnnnnnnnnnnnnnnnnnnnnnnnnnnnnnnnnnnnnnnnnnnnnnnnnnnnnnnnnnnnnnnnnnnnnnnnnnnnnnnnnnnnnnnnnnnnnnnnnnnnnnnnnnnnnnnnnnnnnnnnnnnnnnnnnnnnnnnnnnnnnnnnnnnnnnnnnnnnnnnnnnnnnnnnnnnnnnnnnnnnnnnnnnnnnnnnnnnnnnnnnnnnnnnnnnnnnnnnnnnnnnnnnnnnnnnnnnnnnnnnnnnnnnnnnnnnnnnnnnnnnnnnnnnnnnnnnnnnnnnnnnnnnnnnnnnnnnnnnnnnnnnnnnnnnnnnnnnnnnnnnnnnnnnnnnnnnnnnnnnnnnnnnnnnnnnnnnnnnnnnnnnnnnnnnnnnnnnnnnnnnnnnnnnnnnnnnnnnnnnnnnnnnnnnnnnnnnnnnnnnnnnnnnnnnnnnnnnnnnnnnnnnnnnnnnnnnnnnnnnnnnnnnnnnnnnnnnnnnnnnnnnnnnnnnnnnnnnnnnnnnnnnnnnnnnnnnnnnnnnnnnnnnnnnnnnnnnnnnnnnnnnnnnnnnnnnnnnnnnnnnnnnnnnnnnnnnnnnnnnnnnnnnnnnnnnnnnnnnnnnnnnnnnnnnnnnnnnnnnnnnnnnnnnnnnnnnnnnnnnnnnnnnnnnnnnnnnnnnnnnnnnnnnnnnnnnnnnnnnnnnnnnnnnnnnnnnnnnnnnnnnnnnnnnnnnnnnnnnnnnnnnnnnnnnnnnnnnnnnnnnnnnnnnnnnnnnnnnnnnnnnnnnnnnnnnnnnnnnnnnnnnnnnnnnnnnnnnnnnnnnnnnnnnnnnnnnnnnnnnnnnnnnnnnnnnnnnnnnnnnnnnnnnnnnnnnnnnnnnnnnnnnnnnnnnnnnnnnnnnnnnnnnnnnnnnnnnnnnnnnnnnnnnnnnnnnnnnnnnnnnnnnnnnnnnnnnnnnnnnnnnnnnnnnnnnnnnnnnnnnnnnnnnnnnnnnnnnnnnnnnnnnnnnnnnnnnnnnnnnnnnnnnnnnnnnnnnnnnnnnnnnnnnnnnnnnnnnnnnnnnnnnnnnnnnnnnnnnnnnnnnnnnnnnnnnnnnnnnnnnnnnnnnnnnnnnnnnnnnnnnnnnnnnnnnnnnnnnnnnnnnnnnnnnnnnnnnnnnnnnnnnnnnnnnnnnnnnnnnnnnnnnnnnnnnnnnnnnnnnnnnnnnnnnnnnnnnnnnnnnnnnnnnnnnnnnnnnnnnnnnnnnnnnnnnnnnnnnnnnnnnnnnnnnnnnnnnnnnnnnnnnnnnnnnnnnnnnnnnnnnnnnnnnnnnnnnnnnnnnnnnnnnnnnnnnnnnnnnnnnnnnnnnnnnnnnnnnnnnnnnnnnnnnnnnnnnnnnnnnnnnnnnnnnnnnnnnnnnnnnnnnnnnnnnnnnnnnnnnnnnnnnnnnnnnnnnnnnnnnnnnnnnnnnnnnnnnnnnnnnnnnnnnnnnnnnnnnnnnnnnnnnnnnnnnnnnnnnnnnnnnnnnnnnnnnnnnnnnnnnnnnnnnnnnnnnnnnnnnnnnnnnnnnnnnnnnnnnnnnnnnnnnnnnnnnnnnnnnnnnnnnnnnnnnnnnnnnnnnnnnnnnnnnnnnnnnnnnnnnnnnnnnnnnnnnnnnnnnnnnnnnnnnnnnnnnnnnnnnnnnnnnnnnnnnnnnnnnnnnnnnnnnnnnnnnnnnnnnnnnnnnnnnnnnnnnnnnnnnnnnnnnnnnnnnnnnnnnnnnnnnnnnnnnnnnnnnnnnnnnnnnnnnnnnnnnnnnnnnnnnnnnnnnnnnnnnnnnnnnnnnnnnnnnnnnnnnnnnnnnnnnnnnnnnnnnnnnnnnnnnnnnnnnnnnnnnnnnnnnnnnnnnnnnnnnnnnnnnnnnnnnnnnnnnnnnnnnnnnnnnnnnnnnnnnnnnnnnnnnnnnnnnnnnnnnnnnnnnnnnnnnnnnnnnnnnnnnnnnnnnnnnnnnnnnnnnnnnnnnnnnnnnnnnnnnnnnnnnnnnnnnnnnnnnnnnnnnnnnnnnnnnnnnnnnnnnnnnnnnnnnnnnnnnnnnnnnnnnnnnnnnnnnnnnnnnnnnnnnnnnnnnnnnnnnnnnnnnnnnnnnnnnnnnnnnnnnnnnnnnnnnnnnnnnnnnnnnnnnnnnnnnnnnnnnnnnnnnnnnnnnnnnnnnnnnnnnnnnnnnnnnnnnnnnnnnnnnnnnnnnnnnnnnnnnnnnnnnnnnnnnnnnnnnnnnnnnnnnnnnnnnnnnnnnnnnnnnnnnnnnnnnnnnnnnnnnnnnnnnnnnnnnnnnnnnnnnnnnnnnnnnnnnnnnnnnnnnnnnnnnnnnnnnnnnnnnnnnnnnnnnnnnnnnnnnnnnnnnnnnnnnnnnnnnnnnnnnnnnnnnnnnnnnnnnnnnnnnnnnnnnnnnnnnnnnnnnnnnnnnnnnnnnnnnnnnnnnnnnnnnnnnnnnnnnnnnnnnnnnnnnnnnnnnnnnnnnnnnnnnnnnnnnnnnnnnnnnnnnnnnnnnnnnnnnnnnnnnnnnnnnnnnnnnnnnnnnnnnnnnnnnnnnnnnnnnnnnnnnnnnnnnnnnnnnnnnnnnnnnnnnnnnnnnnnnnnnnnnnnnnnnnnnnnnnnnnnnnnnnnnnnnnnnnnnnnnnnnnnnnnnnnnnnnnnnnnnnnnnnnnnnnnnnnnnnnnnnnnnnnnnnnnnnnnnnnnnnnnnnnnnnnnnnnnnnnnnnnnnnnnnnnnnnnnnnnnnnnnnnnnnnnnnnnnnnnnnnnnnnnnnnnnnnnnnnnnnnnnnnnnnnnnnnnnnnnnnnnnnnnnnnnnnnnnnnnnnnnnnnnnnnnnnnnnnnnnnnnnnnnnnnnnnnnnnnnnnnnnnnnnnnnnnnnnnnnnnnnnnnnnnnnnnnnnnnnnnnnnnnnnnnnnnnnnnnnnnnnnnnnnnnnnnnnnnnnnnnnnnnnnnnnnnnnnnnnnnnnnnnnnnnnnnnnnnnnnnnnnnnnnnnnnnnnnnnnnnnnnnnnnnnnnnnnnnnnnnnnnnnnnnnnnnnnnnnnnnnnnnnnnnnnnnnnnnnnnnnnnnnnnnnnnnnnnnnnnnnnnnnnnnnnnnnnnnnnnnnnnnnnnnnnnnnnnnnnnnnnnnnnnnnnnnnnnnnnnnnnnnnnnnnnnnnnnnnnnnnnnnnnnnnnnnnnnnnnnnnnnnnnnnnnnnnnnnnnnnnnnnnnnnnnnnnnnnnnnnnnnnnnnnnnnnnnnnnnnnnnnnnnnnnnnnnnnnnnnnnnnnnnnnnnnnnnnnnnnnnnnnnnnnnnnnnnnnnnnnnnnnnnnnnnnnnnnnnnnnnnnnnnnnnnnnnnnnnnnnnnnnnnnnnnnnnnnnnnnnnnnnnnnnnnnnnnnnnnnnnnnnnnnnnnnnnnnnnnnnnnnnnnnnnnnnnnnnnnnnnnnnnnnnnnnnnnnnnnnnnnnnnnnnnnnnnnnnnnnnnnnnnnnnnnnnnnnnnnnnnnnnnnnnnnnnnnnnnnnnnnnnnnnnnnnnnnnnnnnnnnnnnnnnnnnnnnnnnnnnnnnnnnnnnnnnnnnnnnnnnnnnnnnnnnnnnnnnnnnnnnnnnnnnnnnnnnnnnnnnnnnnnnnnnnnnnnnnnnnnnnnnnnnnnnnnnnnnnnnnnnnnnnnnnnnnnnnnnnnnnnnnnnnnnnnnnnnnnnnnnnnnnnnnnnnnnnnnnnnnnnnnnnnnnnnnnnnnnnnnnnnnnnnnnnnnnnnnnnnnnnnnnnnnnnnnnnnnnnnnnnnnnnnnnnnnnnnnnnnnnnnnnnnnnnnnnnnnnnnnnnnnnnnnnnnnnnnnnnnnnnnnnnnnnnnnnnnnnnnnnnnnnnnnnnnnnnnnnnnnnnnnnnnnnnnnnnnnnnnnnnnnnnnnnnnnnnnnnnnnnnnnnnnnnnnnnnnnnnnnnnnnnnnnnnnnnnnnnnnnnnnnnnnnnnnnnnnnnnnnnnnnnnnnnnnnnnnnnnnnnnnnnnnnnnnnnnnnnnnnnnnnnnnnnnnnnnnnnnnnnnnnnnnnnnnnnnnnnnnnnnnnnnnnnnnnnnnnnnnnnnnnnnnnnnnnnnnnnnnnnnnnnnnnnnnnnnnnnnnnnnnnnnnnnnnnnnnnnnnnnnnnnnnnnnnnnnnnnnnnnnnnnnnnnnnnnnnnnnnnnnnnnnnnnnnnnnnnnnnnnnnnnnnnnnnnnnnnnnnnnnnnnnnnnnnnnnnnnnnnnnnnnnnnnnnnnnnnnnnnnnnnnnnnnnnnnnnnnnnnnnnnnnnnnnnnnnnnnnnnnnnnnnnnnnnnnnnnnnnnnnnnnnnnnnnnnnnnnnnnnnnnnnnnnnnnnnnnnnnnnnnnnnnnnnnnnnnnnnnnnnnnnnnnnnnnnnnnnnnnnnnnnnnnnnnnnnnnnnnnnnnnnnnnnnnnnnnnnnnnnnnnnnnnnnnnnnnnnnnnnnnnnnnnnnnnnnnnnnnnnnnnnnnnnnnnnnnnnnnnnnnnnnnnnnnnnnnnnnnnnnnnnnnnnnnnnnnnnnnnnnnnnnnnnnnnnnnnnnnnnnnnnnnnnnnnnnnnnnnnnnnnnnnnnnnnnnnnnnnnnnnnnnnnnnnnnnnnnnnnnnnnnnnnnnnnnnnnnnnnnnnnnnnnnnnnnnnnnnnnnnnnnnnnnnnnnnnnnnnnnnnnnnnnnnnnnnnnnnnnnnnnnnnnnnnnnnnnnnnnnnnnnnnnnnnnnnnnnnnnnnnnnnnnnnnnnnnnnnnnnnnnnnnnnnnnnnnnnnnnnnnnnnnnnnnnnnnnnnnnnnnnnnnnnnnnnnnnnnnnnnnnnnnnnnnnnnnnnnnnnnnnnnnnnnnnnnnnnnnnnnnnnnnnnnnnnnnnnnnnnnnnnnnnnnnnnnnnnnnnnnnnnnnnnnnnnnnnnnnnnnnnnnnnnnnnnnnnnnnnnnnnnnnnnnnnnnnnnnnnnnnnnnnnnnnnnnnnnnnnnnnnnnnnnnnnnnnnnnnnnnnnnnnnnnnnnnnnnnnnnnnnnnnnnnnnnnnnnnnnnnnnnnnnnnnnnnnnnnnnnnnnnnnnnnnnnnnnnnnnnnnnnnnnnnnnnnnnnnnnnnnnnnnnnnnnnnnnnnnnnnnnnnnnnnnnnnnnnnnnnnnnnnnnnnnnnnnnnnnnnnnnnnnnnnnnnnnnnnnnnnnnnnnnnnnnnnnnnnnnnnnnnnnnnnnnnnnnnnnnnnnnnnnnnnnnnnnnnnnnnnnnnnnnnnnnnnnnnnnnnnnnnnnnnnnnnnnnnnnnnnnnnnnnnnnnnnnnnnnnnnnnnnnnnnnnnnnnnnnnnnnnnnnnnnnnnnnnnnnnnnnnnnnnnnnnnnnnnnnnnnnnnnnnnnnnnnnnnnnnnnnnnnnnnnnnnnnnnnnnnnnnnnnnnnnnnnnnnnnnnnnnnnnnnnnnnnnnnnnnnnnnnnnnnnnnnnnnnnnnnnnnnnnnnnnnnnnnnnnnnnnnnnnnnnnnnnnnnnnnnnnnnnnnnnnnnnnnnnnnnnnnnnnnnnnnnnnnnnnnnnnnnnnnnnnnnnnnnnnnnnnnnnnnnnnnnnnnnnnnnnnnnnnnnnnnnnnnnnnnnnnnnnnnnnnnnnnnnnnnnnnnnnnnnnnnnnnnnnnnnnnnnnnnnnnnnnnnnnnnnnnnnnnnnnnnnnnnnnnnnnnnnnnnnnnnnnnnnnnnnnnnnnnnnnnnnnnnnnnnnnnnnnnnnnnnnnnnnnnnnnnnnnnnnnnnnnnnnnnnnnnnnnnnnnnnnnnnnnnnnnnnnnnnnnnnnnnnnnnnnnnnnnnnnnnnnnnnnnnnnnnnnnnnnnnnnnnnnnnnnnnnnnnnnnnnnnnnnnnnnnnnnnnnnnnnnnnnnnnnnnnnnnnnnnnnnnnnnnnnnnnnnnnnnnnnnnnnnnnnnnnnnnnnnnnnnnnnnnnnnnnnnnnnnnnnnnnnnnnnnnnnnnnnnnnnnnnnnnnnnnnnnnnnnnnnnnnnnnnnnnnnnnnnnnnnnnnnnnnnnnnnnnnnnnnnnnnnnnnnnnnnnnnnnnnnnnnnnnnnnnnnnnnnnnnnnnnnnnnnnnnnnnnnnnnnnnnnnnnnnnnnnnnnnnnnnnnnnnnnnnnnnnnnnnnnnnnnnnnnnnnnnnnnnnnnnnnnnnnnnnnnnnnnnnnnnnnnnnnnnnnnnnnnnnnnnnnnnnnnnnnnnnnnnnnnnnnnnnnnnnnnnnnnnnnnnnnnnnnnnnnnnnnnnnnnnnnnnnnnnnnnnnnnnnnnnnnnnnnnnnnnnnnnnnnnnnnnnnnnnnnnnnnnnnnnnnnnnnnnnnnnnnnnnnnnnnnnnnnnnnnnnnnnnnnnnnnnnnnnnnnnnnnnnnnnnnnnnnnnnnnnnnnnnnnnnnnnnnnnnnnnnnnnnnnnnnnnnnnnnnnnnnnnnnnnnnnnnnnnnnnnnnnnnnnnnnnnnnnnnnnnnnnnnnnnnnnnnnnnnnnnnnnnnnnnnnnnnnnnnnnnnnnnnnnnnnnnnnnnnnnnnnnnnnnnnnnnnnnnnnnnnnnnnnnnnnnnnnnnnnnnnnnnnnnnnnnnnnnnnnnnnnnnnnnnnnnnnnnnnnnnnnnnnnnnnnnnnnnnnnnnnnnnnnnnnnnnnnnnnnnnnnnnnnnnnnnnnnnnnnnnnnnnnnnnnnnnnnnnnnnnnnnnnnnnnnnnnnnnnnnnnnnnnnnnnnnnnnnnnnnnnnnnnnnnnnnnnnnnnnnnnnnnnnnnnnnnnnnnnnnnnnnnnnnnnnnnnnnnnnnnnnnnnnnnnnnnnnnnnnnnnnnnnnnnnnnnnnnnnnnnnnnnnnnnnnnnnnnnnnnnnnnnnnnnnnnnnnnnnnnnnnnnnnnnnnnnnnnnnnnnnnnnnnnnnnnnnnnnnnnnnnnnnnnnnnnnnnnnnnnnnnnnnnnnnnnnnnnnnnnnnnnnnnnnnnnnnnnnnnnnnnnnnnnnnnnnnnnnnnnnnnnnnnnnnnnnnnnnnnnnnnnnnnnnnnnnnnnnnnnnnnnnnnnnnnnnnnnnnnnnnnnnnnnnnnnnnnnnnnnnnnnnnnnnnnnnnnnnnnnnnnnnnnnnnnnnnnnnnnnnnnnnnnnnnnnnnnnnnnnnnnnnnnnnnnnnnnnnnnnnnnnnnnnnnnnnnnnnnnnnnnnnnnnnnnnnnnnnnnnnnnnnnnnnnnnnnnnnnnnnnnnnnnnnnnnnnnnnnnnnnnnnnnnnnnnnnnnnnnnnnnnnnnnnnnnnnnnnnnnnnnnnnnnnnnnnnnnnnnnnnnnnnnnnnnnnnnnnnnnnnnnnnnnnnnnnnnnnnnnnnnnnnnnnnnnnnnnnnnnnnnnnnnnnnnnnnnnnnnnnnnnnnnnnnnnnnnnnnnnnnnnnnnnnnnnnnnnnnnnnnnnnnnnnnnnnnnnnnnnnnnnnnnnnnnnnnnnnnnnnnnnnnnnnnnnnnnnnnnnnnnnnnnnnnnnnnnnnnnnnnnnnnnnnnnnnnnnnnnnnnnnnnnnnnnnnnnnnnnnnnnnnnnnnnnnnnnnnnnnnnnnnnnnnnnnnnnnnnnnnnnnnnnnnnnnnnnnnnnnnnnnnnnnnnnnnnnnnnnnnnnnnnnnnnnnnnnnnnnnnnnnnnnnnnnnnnnnnnnnnnnnnnnnnnnnnnnnnnnnnnnnnnnnnnnnnnnnnnnnnnnnnnnnnnnnnnnnnnnnnnnnnnnnnnnnnnnnnnnnnnnnnnnnnnnnnnnnnnnnnnnnnnnnnnnnnnnnnnnnnnnnnnnnnnnnnnnnnnnnnnnnnnnnnnnnnnnnnnnnnnnnnnnnnnnnnnnnnnnnnnnnnnnnnnnnnnnnnnnnnnnnnnnnnnnnnnnnnnnnnnnnnnnnnnnnnnnnnnnnnnnnnnnnnnnnnnnnnnnnnnnnnnnnnnnnnnnnnnnnnnnnnnnnnnnnnnnnnnnnnnnnnnnnnnnnnnnnnnnnnnnnnnnnnnnnnnnnnnnnnnnnnnnnnnnnnnnnnnnnnnnnnnnnnnnnnnnnnnnnnnnnnnnnnnnnnnnnnnnnnnnnnnnnnnnnnnnnnnnnnnnnnnnnnnnnnnnnnnnnnnnnnnnnnnnnnnnnnnnnnnnnnnnnnnnnnnnnnnnnnnnnnnnnnnnnnnnnnnnnnnnnnnnnnnnnnnnnnnnnnnnnnnnnnnnnnnnnnnnnnnnnnnnnnnnnnnnnnnnnnnnnnnnnnnnnnnnnnnnnnnnnnnnnnnnnnnnnnnnnnnnnnnnnnnnnnnnnnnnnnnnnnnnnnnnnnnnnnnnnnnnnnnnnnnnnnnnnnnnnnnnnnnnnnnnnnnnnnnnnnnnnnnnnnnnnnnnnnnnnnnnnnnnnnnnnnnnnnnnnnnnnnnnnnnnnnnnnnnnnnnnnnnnnnnnnnnnnnnnnnnnnnnnnnnnnnnnnnnnnnnnnnnnnnnnnnnnnnnnnnnnnnnnnnnnnnnnnnnnnnnnnnnnnnnnnnnnnnnnnnnnnnnnnnnnnnnnnnnnnnnnnnnnnnnnnnnnnnnnnnnnnnnnnnnnnnnnnnnnnnnnnnnnnnnnnnnnnnnnnnnnnnnnnnnnnnnnnnnnnnnnnnnnnnnnnnnnnnnnnnnnnnnnnnnnnnnnnnnnnnnnnnnnnnnnnnnnnnnnnnnnnnnnnnnnnnnnnnnnnnnnnnnnnnnnnnnnnnnnnnnnnnnnnnnnnnnnnnnnnnnnnnnnnnnnnnnnnnnnnnnnnnnnnnnnnnnnnnnnnnnnnnnnnnnnnnnnnnnnnnnnnnnnnnnnnnnnnnnnnnnnnnnnnnnnnnnnnnnnnnnnnnnnnnnnnnnnnnnnnnnnnnnnnnnnnnnnnnnnnnnnnnnnnnnnnnnnnnnnnnnnnnnnnnnnnnnnnnnnnnnnnnnnnnnnnnnnnnnnnnnnnnnnnnnnnnnnnnnnnnnnnnnnnnnnnnnnnnnnnnnnnnnnnnnnnnnnnnnnnnnnnnnnnnnnnnnnnnnnnnnnnnnnnnnnnnnnnnnnnnnnnnnnnnnnnnnnnnnnnnnnnnnnnnnnnnnnnnnnnnnnnnnnnnnnnnnnnnnnnnnnnnnnnnnnnnnnnnnnnnnnnnnnnnnnnnnnnnnnnnnnnnnnnnnnnnnnnnnnnnnnnnnnnnnnnnnnnnnnnnnnnnnnnnnnnnnnnnnnnnnnnnnnnnnnnnnnnnnnnnnnnnnnnnnnnnnnnnnnnnnnnnnnnnnnnnnnnnnnnnnnnnnnnnnnnnnnnnnnnnnnnnnnnnnnnnnnnnnnnnnnnnnnnnnnnnnnnnnnnnnnnnnnnnnnnnnnnnnnnnnnnnnnnnnnnnnnnnnnnnnnnnnnnnnnnnnnnnnnnnnnnnnnnnnnnnnnnnnnnnnnnnnnnnnnnnnnnnnnnnnnnnnnnnnnnnnnnnnnnnnnnnnnnnnnnnnnnnnnnnnnnnnnnnnnnnnnnnnnnnnnnnnnnnnnnnnnnnnnnnnnnnnnnnnnnnnnnnnnnnnnnnnnnnnnnnnnnnnnnnnnnnnnnnnnnnnnnnnnnnnnnnnnnnnnnnnnnnnnnnnnnnnnnnnnnnnnnnnnnnnnnnnnnnnnnnnnnnnnnnnnnnnnnnnnnnnnnnnnnnnnnnnnnnnnnnnnnnnnnnnnnnnnnnnnnnnnnnnnnnnnnnnnnnnnnnnnnnnnnnnnnnnnnnnnnnnnnnnnnnnnnnnnnnnnnnnnnnnnnnnnnnnnnnnnnnnnnnnnnnnnnnnnnnnnnnnnnnnnnnnnnnnnnnnnnnnnnnnnnnnnnnnnnnnnnnnnnnnnnnnnnnnnnnnnnnnnnnnnnnnnnnnnnnnnnnnnnnnnnnnnnnnnnnnnnnnnnnnnnnnnnnnnnnnnnnnnnnnnnnnnnnnnnnnnnnnnnnnnnnnnnnnnnnnnnnnnnnnnnnnnnnnnnnnnnnnnnnnnnnnnnnnnnnnnnnnnnnnnnnnnnnnnnnnnnnnnnnnnnnnnnnnnnnnnnnnnnnnnnnnnnnnnnnnnnnnnnnnnnnnnnnnnnnnnnnnnnnnnnnnnnnnnnnnnnnnnnnnnnnnnnnnnnnnnnnnnnnnnnnnnnnnnnnnnnnnnnnnnnnnnnnnnnnnnnnnnnnnnnnnnnnnnnnnnnnnnnnnnnnnnnnnnnnnnnnnnnnnnnnnnnnnnnnnnnnnnnnnnnnnnnnnnnnnnnnnnnnnnnnnnnnnnnnnnnnnnnnnnnnnnnnnnnnnnnnnnnnnnnnnnnnnnnnnnnnnnnnnnnnnnnnnnnnnnnnnnnnnnnnnnnnnnnnnnnnnnnnnnnnnnnnnnnnnnnnnnnnnnnnnnnnnnnnnnnnnnnnnnnnnnnnnnnnnnnnnnnnnnnnnnnnnnnnnnnnnnnnnnnnnnnnnnnnnnnnnnnnnnnnnnnnnnnnnnnnnnnnnnnnnnnnnnnnnnnnnnnnnnnnnnnnnnnnnnnnnnnnnnnnnnnnnnnnnnnnnnnnnnnnnnnnnnnnnnnnnnnnnnnnnnnnnnnnnnnnnnnnnnnnnnnnnnnnnnnnnnnnnnnnnnnnnnnnnnnnnnnnnnnnnnnnnnnnnnnnnnnnnnnnnnnnnnnnnnnnnnnnnnnnnnnnnnnnnnnnnnnnnnnnnnnnnnnnnnnnnnnnnnnnnnnnnnnnnnnnnnnnnnnnnnnnnnnnnnnnnnnnnnnnnnnnnnnnnnnnnnnnnnnnnnnnnnnnnnnnnnnnnnnnnnnnnnnnnnnnnnnnnnnnnnnnnnnnnnnnnnnnnnnnnnnnnnnnnnnnnnnnnnnnnnnnnnnnnnnnnnnnnnnnnnnnnnnnnnnnnnnnnnnnnnnnnnnnnnnnnnnnnnnnnnnnnnnnnnnnnnnnnnnnnnnnnnnnnnnnnnnnnnnnnnnnnnnnnnnnnnnnnnnnnnnnnnnnnnnnnnnnnnnnnnnnnnnnnnnnnnnnnnnnnnnnnnnnnnnnnnnnnnnnnnnnnnnnnnnnnnnnnnnnnnnnnnnnnnnnnnnnnnnnnnnnnnnnnnnnnnnnnnnnnnnnnnnnnnnnnnnnnnnnnnnnnnnnnnnnnnnnnnnnnnnnnnnnnnnnnnnnnnnnnnnnnnnnnnnnnnnnnnnnnnnnnnnnnnnnnnnnnnnnnnnnnnnnnnnnnnnnnnnnnnnnnnnnnnnnnnnnnnnnnnnnnnnnnnnnnnnnnnnnnnnnnnnnnnnnnnnnnnnnnnnnnnnnnnnnnnnnnnnnnnnnnnnnnnnnnnnnnnnnnnnnnnnnnnnnnnnnnnnnnnnnnnnnnnnnnnnnnnnnnnnnnnnnnnnnnnnnnnnnnnnnnnnnnnnnnnnnnnnnnnnnnnnnnnnnnnnnnnnnnnnnnnnnnnnnnnnnnnnnnnnnnnnnnnnnnnnnnnnnnnnnnnnnnnnnnnnnnnnnnnnnnnnnnnnnnnnnnnnnnnnnnnnnnnnnnnnnnnnnnnnnnnnnnnnnnnnnnnnnnnnnnnnnnnnnnnnnnnnnnnnnnnnnnnnnnnnnnnnnnnnnnnnnnnnnnnnnnnnnnnnnnnnnnnnnnnnnnnnnnnnnnnnnnnnnnnnnnnnnnnnnnnnnnnnnnnnnnnnnnnnnnnnnnnnnnnnnnnnnnnnnnnnnnnnnnnnnnnnnnnnnnnnnnnnnnnnnnnnnnnnnnnnnnnnnnnnnnnnnnnnnnnnnnnnnnnnnnnnnnnnnnnnnnnnnnnnnnnnnnnnnnnnnnnnnnnnnnnnnnnnnnnnnnnnnnnnnnnnnnnnnnnnnnnnnnnnnnnnnnnnnnnnnnnnnnnnnnnnnnnnnnnnnnnnnnnnnnnnnnnnnnnnnnnnnnnnnnnnnnnnnnnnnnnnnnnnnnnnnnnnnnnnnnnnnnnnnnnnnnnnnnnnnnnnnnnnnnnnnnnnnnnnnnnnnnnnnnnnnnnnnnnnnnnnnnnnnnnnnnnnnnnnnnnnnnnnnnnnnnnnnnnnnnnnnnnnnnnnnnnnnnnnnnnnnnnnnnnnnnnnnnnnnnnnnnnnnnnnnnnnnnnnnnnnnnnnnnnnnnnnnnnnnnnnnnnnnnnnnnnnnnnnnnnnnnnnnnnnnnnnnnnnnnnnnnnnnnnnnnnnnnnnnnnnnnnnnnnnnnnnnnnnnnnnnnnnnnnnnnnnnnnnnnnnnnnnnnnnnnnnnnnnnnnnnnnnnnnnnnnnnnnnnnnnnnnnnnnnnnnnnnnnnnnnnnnnnnnnnnnnnnnnnnnnnnnnnnnnnnnnnnnnnnnnnnnnnnnnnnnnnnnnnnnnnnnnnnnnnnnnnnnnnnnnnnnnnnnnnnnnnnnnnnnnnnnnnnnnnnnnnnnnnnnnnnnnnnnnnnnnnnnnnnnnnnnnnnnnnnnnnnnnnnnnnnnnnnnnnnnnnnnnnnnnnnnnnnnnnnnnnnnnnnnnnnnnnnnnnnnnnnnnnnnnnnnnnnnnnnnnnnnnnnnnnnnnnnnnnnnnnnnnnnnnnnnnnnnnnnnnnnnnnnnnnnnnnnnnnnnnnnnnnnnnnnnnnnnnnnnnnnnnnnnnnnnnnnnnnnnnnnnnnnnnnnnnnnnnnnnnnnnnnnnnnnnnnnnnnnnnnnnnnnnnnnnnnnnnnnnnnnnnnnnnnnnnnnnnnnnnnnnnnnnnnnnnnnnnnnnnnnnnnnnnnnnnnnnnnnnnnnnnnnnnnnnnnnnnnnnnnnnnnnnnnnnnnnnnnnnnnnnnnnnnnnnnnnnnnnnnnnnnnnnnnnnnnnnnnnnnnnnnnnnnnnnnnnnnnnnnnnnnnnnnnnnnnnnnnnnnnnnnnnnnnnnnnnnnnnnnnnnnnnnnnnnnnnnnnnnnnnnnnnnnnnnnnnnnnnnnnnnnnnnnnnnnnnnnnnnnnnnnnnnnnnnnnnnnnnnnnnnnnnnnnnnnnnnnnnnnnnnnnnnnnnnnnnnnnnnnnnnnnnnnnnnnnnnnnnnnnnnnnnnnnnnnnnnnnnnnnnnnnnnnnnnnnnnnnnnnnnnnnnnnnnnnnnnnnnnnnnnnnnnnnnnnnnnnnnnnnnnnnnnnnnnnnnnnnnnnnnnnnnnnnnnnnnnnnnnnnnnnnnnnnnnnnnnnnnnnnnnnnnnnnnnnnnnnnnnnnnnnnnnnnnnnnnnnnnnnnnnnnnnnnnnnnnnnnnnnnnnnnnnnnnnnnnnnnnnnnnnnnnnnnnnnnnnnnnnnnnnnnnnnnnnnnnnnnnnnnnnnnnnnnnnnnnnnnnnnnnnnnnnnnnnnnnnnnnnnnnnnnnnnnnnnnnnnnnnnnnnnnnnnnnnnnnnnnnnnnnnnnnnnnnnnnnnnnnnnnnnnnnnnnnnnnnnnnnnnnnnnnnnnnnnnnnnnnnnnnnnnnnnnnnnnnnnnnnnnnnnnnnnnnnnnnnnnnnnnnnnnnnnnnnnnnnnnnnnnnnnnnnnnnnnnnnnnnnnnnnnnnnnnnnnnnnnnnnnnnnnnnnnnnnnnnnnnnnnnnnnnnnnnnnnnnnnnnnnnnnnnnnnnnnnnnnnnnnnnnnnnnnnnnnnnnnnnnnnnnnnnnnnnnnnnnnnnnnnnnnnnnnnnnnnnnnnnnnnnnnnnnnnnnnnnnnnnnnnnnnnnnnnnnnnnnnnnnnnnnnnnnnnnnnnnnnnnnnnnnnnnnnnnnnnnnnnnnnnnnnnnnnnnnnnnnnnnnnnnnnnnnnnnnnnnnnnnnnnnnnnnnnnnnnnnnnnnnnnnnnnnnnnnnnnnnnnnnnnnnnnnnnnnnnnnnnnnnnnnnnnnnnnnnnnnnnnnnnnnnnnnnnnnnnnnnnnnnnnnnnnnnnnnnnnnnnnnnnnnnnnnnnnnnnnnnnnnnnnnnnnnnnnnnnnnnnnnnnnnnnnnnnnnnnnnnnnnnnnnnnnnnnnnnnnnnnnnnnnnnnnnnnnnnnnnnnnnnnnnnnnnnnnnnnnnnnnnnnnnnnnnnnnnnnnnnnnnnnnnnnnnnnnnnnnnnnnnnnnnnnnnnnnnnnnnnnnnnnnnnnnnnnnnnnnnnnnnnnnnnnnnnnnnnnnnnnnnnnnnnnnnnnnnnnnnnnnnnnnnnnnnnnnnnnnnnnnnnnnnnnnnnnnnnnnnnnnnnnnnnnnnnnnnnnnnnnnnnnnnnnnnnnnnnnnnnnnnnnnnnnnnnnnnnnnnnnnnnnnnnnnnnnnnnnnnnnnnnnnnnnnnnnnnnnnnnnnnnnnnnnnnnnnnnnnnnnnnnnnnnnnnnnnnnnnnnnnnnnnnnnnnnnnnnnnnnnnnnnnnnnnnnnnnnnnnnnnnnnnnnnnnnnnnnnnnnnnnnnnnnnnnnnnnnnnnnnnnnnnnnnnnnnnnnnnnnnnnnnnnnnnnnnnnnnnnnnnnnnnnnnnnnnnnnnnnnnnnnnnnnnnnnnnnnnnnnnnnnnnnnnnnnnnnnnnnnnnnnnnnnnnnnnnnnnnnnnnnnnnnnnnnnnnnnnnnnnnnnnnnnnnnnnnnnnnnnnnnnnnnnnnnnnnnnnnnnnnnnnnnnnnnnnnnnnnnnnnnnnnnnnnnnnnnnnnnnnnnnnnnnnnnnnnnnnnnnnnnnnnnnnnnnnnnnnnnnnnnnnnnnnnnnnnnnnnnnnnnnnnnnnnnnnnnnnnnnnnnnnnnnnnnnnnnnnnnnnnnnnnnnnnnnnnnnnnnnnnnnnnnnnnnnnnnnnnnnnnnnnnnnnnnnnnnnnnnnnnnnnnnnnnnnnnnnnnnnnnnnnnnnnnnnnnnnnnnnnnnnnnnnnnnnnnnnnnnnnnnnnnnnnnnnnnnnnnnnnnnnnnnnnnnnnnnnnnnnnnnnnnnnnnnnnnnnnnnnnnnnnnnnnnnnnnnnnnnnnnnnnnnnnnnnnnnnnnnnnnnnnnnnnnnnnnnnnnnnnnnnnnnnnnnnnnnnnnnnnnnnnnnnnnnnnnnnnnnnnnnnnnnnnnnnnnnnnnnnnnnnnnnnnnnnnnnnnnnnnnnnnnnnnnnnnnnnnnnnnnnnnnnnnnnnnnnnnnnnnnnnnnnnnnnnnnnnnnnnnnnnnnnnnnnnnnnnnnnnnnnnnnnnnnnnnnnnnnnnnnnnnnnnnnnnnnnnnnnnnnnnnnnnnnnnnnnnnnnnnnnnnnnnnnnnnnnnnnnnnnnnnnnnnnnnnnnnnnnnnnnnnnnnnnnnnnnnnnnnnnnnnnnnnnnnnnnnnnnnnnnnnnnnnnnnnnnnnnnnnnnnnnnnnnnnnnnnnnnnnnnnnnnnnnnnnnnnnnnnnnnnnnnnnnnnnnnnnnnnnnnnnnnnnnnnnnnnnnnnnnnnnnnnnnnnnnnnnnnnnnnnnnnnnnnnnnnnnnnnnnnnnnnnnnnnnnnnnnnnnnnnnnnnnnnnnnnnnnnnnnnnnnnnnnnnnnnnnnnnnnnnnnnnnnnnnnnnnnnnnnnnnnnnnnnnnnnnnnnnnnnnnnnnnnnnnnnnnnnnnnnnnnnnnnnnnnnnnnnnnnnnnnnnnnnnnnnnnnnnnnnnnnnnnnnnnnnnnnnnnnnnnnnnnnnnnnnnnnnnnnnnnnnnnnnnnnnnnnnnnnnnnnnnnnnnnnnnnnnnnnnnnnnnnnnnnnnnnnnnnnnnnnnnnnnnnnnnnnnnnnnnnnnnnnnnnnnnnnnnnnnnnnnnnnnnnnnnnnnnnnnnnnnnnnnnnnnnnnnnnnnnnnnnnnnnnnnnnnnnnnnnnnnnnnnnnnnnnnnnnnnnnnnnnnnnnnnnnnnnnnnnnnnnnnnnnnnnnnnnnnnnnnnnnnnnnnnnnnnnnnnnnnnnnnnnnnnnnnnnnnnnnnnnnnnnnnnnnnnnnnnnnnnnnnnnnnnnnnnnnnnnnnnnnnnnnnnnnnnnnnnnnnnnnnnnnnnnnnnnnnnnnnnnnnnnnnnnnnnnnnnnnnnnnnnnnnnnnnnnnnnnnnnnnnnnnnnnnnnnnnnnnnnnnnnnnnnnnnnnnnnnnnnnnnnnnnnnnnnnnnnnnnnnnnnnnnnnnnnnnnnnnnnnnnnnnnnnnnnnnnnnnnnnnnnnnnnnnnnnnnnnnnnnnnnnnnnnnnnnnnnnnnnnnnnnnnnnnnnnnnnnnnnnnnnnnnnnnnnnnnnnnnnnnnnnnnnnnnnnnnnnnnnnnnnnnnnnnnnnnnnnnnnnnnnnnnnnnnnnnnnnnnnnnnnnnnnnnnnnnnnnnnnnnnnnnnnnnnnnnnnnnnnnnnnnnnnnnnnnnnnnnnnnnnnnnnnnnnnnnnnnnnnnnnnnnnnnnnnnnnnnnnnnnnnnnnnnnnnnnnnnnnnnnnnnnnnnnnnnnnnnnnnnnnnnnnnnnnnnnnnnnnnnnnnnnnnnnnnnnnnnnnnnnnnnnnnnnnnnnnnnnnnnnnnnnnnnnnnnnnnnnnnnnnnnnnnnnnnnnnnnnnnnnnnnnnnnnnnnnnnnnnnnnnnnnnnnnnnnnnnnnnnnnnnnnnnnnnnnnnnnnnnnnnnnnnnnnnnnnnnnnnnnnnnnnnnnnnnnnnnnnnnnnnnnnnnnnnnnnnnnnnnnnnnnnnnnnnnnnnnnnnnnnnnnnnnnnnnnnnnnnnnnnnnnnnnnnnnnnnnnnnnnnnnnnnnnnnnnnnnnnnnnnnnnnnnnnnnnnnnnnnnnnnnnnnnnnnnnnnnnnnnnnnnnnnnnnnnnnnnnnnnnnnnnnnnnnnnnnnnnnnnnnnnnnnnnnnnnnnnnnnnnnnnnnnnnnnnnnnnnnnnnnnnnnnnnnnnnnnnnnnnnnnnnnnnnnnnnnnnnnnnnnnnnnnnnnnnnnnnnnnnnnnnnnnnnnnnnnnnnnnnnnnnnnnnnnnnnnnnnnnnnnnnnnnnnnnnnnnnnnnnnnnnnnnnnnnnnnnnnnnnnnnnnnnnnnnnnnnnnnnnnnnnnnnnnnnnnnnnnnnnnnnnnnnnnnnnnnnnnnnnnnnnnnnnnnnnnnnnnnnnnnnnnnnnnnnnnnnnnnnnnnnnnnnnnnnnnnnnnnnnnnnnnnnnnnnnnnnnnnnnnnnnnnnnnnnnnnnnnnnnnnnnnnnnnnnnnnnnnnnnnnnnnnnnnnnnnnnnnnnnnnnnnnnnnnnnnnnnnnnnnnnnnnnnnnnnnnnnnnnnnnnnnnnnnnnnnnnnnnnnnnnnnnnnnnnnnnnnnnnnnnnnnnnnnnnnnnnnnnnnnnnnnnnnnnnnnnnnnnnnnnnnnnnnnnnnnnnnnnnnnnnnnnnnnnnnnnnnnnnnnnnnnnnnnnnnnnnnnnnnnnnnnnnnnnnnnnnnnnnnnnnnnnnnnnnnnnnnnnnnnnnnnnnnnnnnnnnnnnnnnnnnnnnnnnnnnnnnnnnnnnnnnnnnnnnnnnnnnnnnnnnnnnnnnnnnnnnnnnnnnnnnnnnnnnnnnnnnnnnnnnnnnnnnnnnnnnnnnnnnnnnnnnnnnnnnnnnnnnnnnnnnnnnnnnnnnnnnnnnnnnnnnnnnnnnnnnnnnnnnnnnnnnnnnnnnnnnnnnnnnnnnnnnnnnnnnnnnnnnnnnnnnnnnnnnnnnnnnnnnnnnnnnnnnnnnnnnnnnnnnnnnnnnnnnnnnnnnnnnnnnnnnnnnnnnnnnnnnnnnnnnnnnnnnnnnnnnnnnnnnnnnnnnnnnnnnnnnnnnnnnnnnnnnnnnnnnnnnnnnnnnnnnnnnnnnnnnnnnnnnnnnnnnnnnnnnnnnnnnnnnnnnnnnnnnnnnnnnnnnnnnnnnnnnnnnnnnnnnnnnnnnnnnnnnnnnnnnnnnnnnnnnnnnnnnnnnnnnnnnnnnnnnnnnnnnnnnnnnnnnnnnnnnnnnnnnnnnnnnnnnnnnnnnnnnnnnnnnnnnnnnnnnnnnnnnnnnnnnnnnnnnnnnnnnnnnnnnnnnnnnnnnnnnnnnnnnnnnnnnnnnnnnnnnnnnnnnnnnnnnnnnnnnnnnnnnnnnnnnnnnnnnnnnnnnnnnnnnnnnnnnnnnnnnnnnnnnnnnnnnnnnnnnnnnnnnnnnnnnnnnnnnnnnnnnnnnnnnnnnnnnnnnnnnnnnnnnnnnnnnnnnnnnnnnnnnnnnnnnnnnnnnnnnnnnnnnnnnnnnnnnnnnnnnnnnnnnnnnnnnnnnnnnnnnnnnnnnnnnnnnnnnnnnnnnnnnnnnnnnnnnnnnnnnnnnnnnnnnnnnnnnnnnnnnnnnnnnnnnnnnnnnnnnnnnnnnnnnnnnnnnnnnnnnnnnnnnnnnnnnnnnnnnnnnnnnnnnnnnnnnnnnnnnnnnnnnnnnnnnnnnnnnnnnnnnnnnnnnnnnnnnnnnnnnnnnnnnnnnnnnnnnnnnnnnnnnnnnnnnnnnnnnnnnnnnnnnnnnnnnnnnnnnnnnnnnnnnnnnnnnnnnnnnnnnnnnnnnnnnnnnnnnnnnnnnnnnnnnnnnnnnnnnnnnnnnnnnnnnnnnnnnnnnnnnnnnnnnnnnnnnnnnnnnnnnnnnnnnnnnnnnnnnnnnnnnnnnnnnnnnnnnnnnnnnnnnnnnnnnnnnnnnnnnnnnnnnnnnnnnnnnnnnnnnnnnnnnnnnnnnnnnnnnnnnnnnnnnnnnnnnnnnnnnnnnnnnnnnnnnnnnnnnnnnnnnnnnnnnnnnnnnnnnnnnnnnnnnnnnnnnnnnnnnnnnnnnnnnnnnnnnnnnnnnnnnnnnnnnnnnnnnnnnnnnnnnnnnnnnnnnnnnnnnnnnnnnnnnnnnnnnnnnnnnnnnnnnnnnnnnnnnnnnnnnnnnnnnnnnnnnnnnnnnnnnnnnnnnnnnnnnnnnnnnnnnnnnnnnnnnnnnnnnnnnnnnnnnnnnnnnnnnnnnnnnnnnnnnnnnnnnnnnnnnnnnnnnnnnnnnnnnnnnnnnnnnnnnnnnnnnnnnnnnnnnnnnnnnnnnnnnnnnnnnnnnnnnnnnnnnnnnnnnnnnnnnnnnnnnnnnnnnnnnnnnnnnnnnnnnnnnnnnnnnnnnnnnnnnnnnnnnnnnnnnnnnnnnnnnnnnnnnnnnnnnnnnnnnnnnnnnnnnnnnnnnnnnnnnnnnnnnnnnnnnnnnnnnnnnnnnnnnnnnnnnnnnnnnnnnnnnnnnnnnnnnnnnnnnnnnnnnnnnnnnnnnnnnnnnnnnnnnnnnnnnnnnnnnnnnnnnnnnnnnnnnnnnnnnnnnnnnnnnnnnnnnnnnnnnnnnnnnnnnnnnnnnnnnnnnnnnnnnnnnnnnnnnnnnnnnnnnnnnnnnnnnnnnnnnnnnnnnnnnnnnnnnnnnnnnnnnnnnnnnnnnnnnnnnnnnnnnnnnnnnnnnnnnnnnnnnnnnnnnnnnnnnnnnnnnnnnnnnnnnnnnnnnnnnnnnnnnnnnnnnnnnnnnnnnnnnnnnnnnnnnnnnnnnnnnnnnnnnnnnnnnnnnnnnnnnnnnnnnnnnnnnnnnnnnnnnnnnnnnnnnnnnnnnnnnnnnnnnnnnnnnnnnnnnnnnnnnnnnnnnnnnnnnnnnnnnnnnnnnnnnnnnnnnnnnnnnnnnnnnnnnnnnnnnnnnnnnnnnnnnnnnnnnnnnnnnnnnnnnnnnnnnnnnnnnnnnnnnnnnnnnnnnnnnnnnnnnnnnnnnnnnnnnnnnnnnnnnnnnnnnnnnnnnnnnnnnnnnnnnnnnnnnnnnnnnnnnnnnnnnnnnnnnnnnnnnnnnnnnnnnnnnnnnnnnnnnnnnnnnnnnnnnnnnnnnnnnnnnnnnnnnnnnnnnnnnnnnnnnnnnnnnnnnnnnnnnnnnnnnnnnnnnnnnnnnnnnnnnnnnnnnnnnnnnnnnnnnnnnnnnnnnnnnnnnnnnnnnnnnnnnnnnnnnnnnnnnnnnnnnnnnnnnnnnnnnnnnnnnnnnnnnnnnnnnnnnnnnnnnnnnnnnnnnnnnnnnnnnnnnnnnnnnnnnnnnnnnnnnnnnnnnnnnnnnnnnnnnnnnnnnnnnnnnnnnnnnnnnnnnnnnnnnnnnnnnnnnnnnnnnnnnnnnnnnnnnnnnnnnnnnnnnnnnnnnnnnnnnnnnnnnnnnnnnnnnnnnnnnnnnnnnnnnnnnnnnnnnnnnnnnnnnnnnnnnnnnnnnnnnnnnnnnnnnnnnnnnnnnnnnnnnnnnnnnnnnnnnnnnnnnnnnnnnnnnnnnnnnnnnnnnnnnnnnnnnnnnnnnnnnnnnnnnnnnnnnnnnnnnnnnnnnnnnnnnnnnnnnnnnnnnnnnnnnnnnnnnnnnnnnnnnnnnnnnnnnnnnnnnnnnnnnnnnnnnnnnnnnnnnnnnnnnnnnnnnnnnnnnnnnnnnnnnnnnnnnnnnnnnnnnnnnnnnnnnnnnnnnnnnnnnnnnnnnnnnnnnnnnnnnnnnnnnnnnnnnnnnnnnnnnnnnnnnnnnnnnnnnnnnnnnnnnnnnnnnnnnnnnnnnnnnnnnnnnnnnnnnnnnnnnnnnnnnnnnnnnnnnnnnnnnnnnnnnnnnnnnnnnnnnnnnnnnnnnnnnnnnnnnnnnnnnnnnnnnnnnnnnnnnnnnnnnnnnnnnnnnnnnnnnnnnnnnnnnnnnnnnnnnnnnnnnnnnnnnnnnnnnnnnnnnnnnnnnnnnnnnnnnnnnnnnnnnnnnnnnnnnnnnnnnnnnnnnnnnnnnnnnnnnnnnnnnnnnnnnnnnnnnnnnnnnnnnnnnnnnnnnnnnnnnnnnnnnnnnnnnnnnnnnnnnnnnnnnnnnnnnnnnnnnnnnnnnnnnnnnnnnnnnnnnnnnnnnnnnnnnnnnnnnnnnnnnnnnnnnnnnnnnnnnnnnnnnnnnnnnnnnnnnnnnnnnnnnnnnnnnnnnnnnnnnnnnnnnnnnnnnnnnnnnnnnnnnnnnnnnnnnnnnnnnnnnnnnnnnnnnnnnnnnnnnnnnnnnnnnnnnnnnnnnnnnnnnnnnnnnnnnnnnnnnnnnnnnnnnnnnnnnnnnnnnnnnnnnnnnnnnnnnnnnnnnnnnnnnnnnnnnnnnnnnnnnnnnnnnnnnnnnnnnnnnnnnnnnnnnnnnnnnnnnnnnnnnnnnnnnnnnnnnnnnnnnnnnnnnnnnnnnnnnnnnnnnnnnnnnnnnnnnnnnnnnnnnnnnnnnnnnnnnnnnnnnnnnnnnnnnnnnnnnnnnnnnnnnnnnnnnnnnnnnnnnnnnnnnnnnnnnnnnnnnnnnnnnnnnnnnnnnnnnnnnnnnnnnnnnnnnnnnnnnnnnnnnnnnnnnnnnnnnnnnnnnnnnnnnnnnnnnnnnnnnnnnnnnnnnnnnnnnnnnnnnnnnnnnnnnnnnnnnnnnnnnnnnnnnnnnnnnnnnnnnnnnnnnnnnnnnnnnnnnnnnnnnnnnnnnnnnnnnnnnnnnnnnnnnnnnnnnnnnnnnnnnnnnnnnnnnnnnnnnnnnnnnnnnnnnnnnnnnnnnnnnnnnnnnnnnnnnnnnnnnnnnnnnnnnnnnnnnnnnnnnnnnnnnnnnnnnnnnnnnnnnnnnnnnnnnnnnnnnnnnnnnnnnnnnnnnnnnnnnnnnnnnnnnnnnnnnnnnnnnnnnnnnnnnnnnnnnnnnnnnnnnnnnnnnnnnnnnnnnnnnnnnnnnnnnnnnnnnnnnnnnnnnnnnnnnnnnnnnnnnnnnnnnnnnnnnnnnnnnnnnnnnnnnnnnnnnnnnnnnnnnnnnnnnnnnnnnnnnnnnnnnnnnnnnnnnnnnnnnnnnnnnnnnnnnnnnnnnnnnnnnnnnnnnnnnnnnnnnnnnnnnnnnnnnnnnnnnnnnnnnnnnnnnnnnnnnnnnnnnnnnnnnnnnnnnnnnnnnnnnnnnnnnnnnnnnnnnnnnnnnnnnnnnnnnnnnnnnnnnnnnnnnnnnnnnnnnnnnnnnnnnnnnnnnnnnnnnnnnnnnnnnnnnnnnnnnnnnnnnnnnnnnnnnnnnnnnnnnnnnnnnnnnnnnnnnnnnnnnnnnnnnnnnnnnnnnnnnnnnnnnnnnnnnnnnnnnnnnnnnnnnnnnnnnnnnnnnnnnnnnnnnnnnnnnnnnnnnnnnnnnnnnnnnnnnnnnnnnnnnnnnnnnnnnnnnnnnnnnnnnnnnnnnnnnnnnnnnnnnnnnnnnnnnnnnnnnnnnnnnnnnnnnnnnnnnnnnnnnnnnnnnnnnnnnnnnnnnnnnnnnnnnnnnnnnnnnnnnnnnnnnnnnnnnnnnnnnnnnnnnnnnnnnnnnnnnnnnnnnnnnnnnnnnnnnnnnnnnnnnnnnnnnnnnnnnnnnnnnnnnnnnnnnnnnnnnnnnnnnnnnnnnnnnnnnnnnnnnnnnnnnnnnnnnnnnnnnnnnnnnnnnnnnnnnnnnnnnnnnnnnnnnnnnnnnnnnnnnnnnnnnnnnnnnnnnnnnnnnnnnnnnnnnnnnnnnnnnnnnnnnnnnnnnnnnnnnnnnnnnnnnnnnnnnnnnnnnnnnnnnnnnnnnnnnnnnnnnnnnnnnnnnnnnnnnnnnnnnnnnnnnnnnnnnnnnnnnnnnnnnnnnnnnnnnnnnnnnnnnnnnnnnnnnnnnnnnnnnnnnnnnnnnnnnnnnnnnnnnnnnnnnnnnnnnnnnnnnnnnnnnnnnnnnnnnnnnnnnnnnnnnnnnnnnnnnnnnnnnnnnnnnnnnnnnnnnnnnnnnnnnnnnnnnnnnnnnnnnnnnnnnnnnnnnnnnnnnnnnnnnnnnnnnnnnnnnnnnnnnnnnnnnnnnnnnnnnnnnnnnnnnnnnnnnnnnnnnnnnnnnnnnnnnnnnnnnnnnnnnnnnnnnnnnnnnnnnnnnnnnnnnnnnnnnnnnnnnnnnnnnnnnnnnnnnnnnnnnnnnnnnnnnnnnnnnnnnnnnnnnnnnnnnnnnnnnnnnnnnnnnnnnnnnnnnnnnnnnnnnnnnnnnnnnnnnnnnnnnnnnnnnnnnnnnnnnnnnnnnnnnnnnnnnnnnnnnnnnnnnnnnnnnnnnnnnnnnnnnnnnnnnnnnnnnnnnnnnnnnnnnnnnnnnnnnnnnnnnnnnnnnnnnnnnnnnnnnnnnnnnnnnnnnnnnnnnnnnnnnnnnnnnnnnnnnnnnnnnnnnnnnnnnnnnnnnnnnnnnnnnnnnnnnnnnnnnnnnnnnnnnnnnnnnnnnnnnnnnnnnnnnnnnnnnnnnnnnnnnnnnnnnnnnnnnnnnnnnnnnnnnnnnnnnnnnnnnnnnnnnnnnnnnnnnnnnnnnnnnnnnnnnnnnnnnnnnnnnnnnnnnnnnnnnnnnnnnnnnnnnnnnnnnnnnnnnnnnnnnnnnnnnnnnnnnnnnnnnnnnnnnnnnnnnnnnnnnnnnnnnnnnnnnnnnnnnnnnnnnnnnnnnnnnnnnnnnnnnnnnnnnnnnnnnnnnnnnnnnnnnnnnnnnnnnnnnnnnnnnnnnnnnnnnnnnnnnnnnnnnnnnnnnnnnnnnnnnnnnnnnnnnnnnnnnnnnnnnnnnnnnnnnnnnnnnnnnnnnnnnnnnnnnnnnnnnnnnnnnnnnnnnnnnnnnnnnnnnnnnnnnnnnnnnnnnnnnnnnnnnnnnnnnnnnnnnnnnnnnnnnnnnnnnnnnnnnnnnnnnnnnnnnnnnnnnnnnnnnnnnnnnnnnnnnnnnnnnnnnnnnnnnnnnnnnnnnnnnnnnnnnnnnnnnnnnnnnnnnnnnnnnnnnnnnnnnnnnnnnnnnnnnnnnnnnnnnnnnnnnnnnnnnnnnnnnnnnnnnnnnnnnnnnnnnnnnnnnnnnnnnnnnnnnnnnnnnnnnnnnnnnnnnnnnnnnnnnnnnnnnnnnnnnnnnnnnnnnnnnnnnnnnnnnnnnnnnnnnnnnnnnnnnnnnnnnnnnnnnnnnnnnnnnnnnnnnnnnnnnnnnnnnnnnnnnnnnnnnnnnnnnnnnnnnnnnnnnnnnnnnnnnnnnnnnnnnnnnnnnnnnnnnnnnnnnnnnnnnnnnnnnnnnnnnnnnnnnnnnnnnnnnnnnnnnnnnnnnnnnnnnnnnnnnnnnnnnnnnnnnnnnnnnnnnnnnnnnnnnnnnnnnnnnnnnnnnnnnnnnnnnnnnnnnnnnnnnnnnnnnnnnnnnnnnnnnnnnnnnnnnnnnnnnnnnnnnnnnnnnnnnnnnnnnnnnnnnnnnnnnnnnnnnnnnnnnnnnnnnnnnnnnnnnnnnnnnnnnnnnnnnnnnnnnnnnnnnnnnnnnnnnnnnnnnnnnnnnnnnnnnnnnnnnnnnnnnnnnnnnnnnnnnnnnnnnnnnnnnnnnnnnnnnnnnnnnnnnnnnnnnnnnnnnnnnnnnnnnnnnnnnnnnnnnnnnnnnnnnnnnnnnnnnnnnnnnnnnnnnnnnnnnnnnnnnnnnnnnnnnnnnnnnnnnnnnnnnnnnnnnnnnnnnnnnnnnnnnnnnnnnnnnnnnnnnnnnnnnnnnnnnnnnnnnnnnnnnnnnnnnnnnnnnnnnnnnnnnnnnnnnnnnnnnnnnnnnnnnnnnnnnnnnnnnnnnnnnnnnnnnnnnnnnnnnnnnnnnnnnnnnnnnnnnnnnnnnnnnnnnnnnnnnnnnnnnnnnnnnnnnnnnnnnnnnnnnnnnnnnnnnnnnnnnnnnnnnnnnnnnnnnnnnnnnnnnnnnnnnnnnnnnnnnnnnnnnnnnnnnnnnnnnnnnnnnnnnnnnnnnnnnnnnnnnnnnnnnnnnnnnnnnnnnnnnnnnnnnnnnnnnnnnnnnnnnnnnnnnnnnnnnnnnnnnnnnnnnnnnnnnnnnnnnnnnnnnnnnnnnnnnnnnnnnnnnnnnnnnnnnnnnnnnnnnnnnnnnnnnnnnnnnnnnnnnnnnnnnnnnnnnnnnnnnnnnnnnnnnnnnnnnnnnnnnnnnnnnnnnnnnnnnnnnnnnnnnnnnnnnnnnnnnnnnnnnnnnnnnnnnnnnnnnnnnnnnnnnnnnnnnnnnnnnnnnnnnnnnnnnnnnnnnnnnnnnnnnnnnnnnnnnnnnnnnnnnnnnnnnnnnnnnnnnnnnnnnnnnnnnnnnnnnnnnnnnnnnnnnnnnnnnnnnnnnnnnnnnnnnnnnnnnnnnnnnnnnnnnnnnnnnnnnnnnnnnnnnnnnnnnnnnnnnnnnnnnnnnnnnnnnnnnnnnnnnnnnnnnnnnnnnnnnnnnnnnnnnnnnnnnnnnnnnnnnnnnnnnnnnnnnnnnnnnnnnnnnnnnnnnnnnnnnnnnnnnnnnnnnnnnnnnnnnnnnnnnnnnnnnnnnnnnnnnnnnnnnnnnnnnnnnnnnnnnnnnnnnnnnnnnnnnnnnnnnnnnnnnnnnnnnnnnnnnnnnnnnnnnnnnnnnnnnnnnnnnnnnnnnnnnnnnnnnnnnnnnnnnnnnnnnnnnnnnnnnnnnnnnnnnnnnnnnnnnnnnnnnnnnnnnnnnnnnnnnnnnnnnnnnnnnnnnnnnnnnnnnnnnnnnnnnnnnnnnnnnnnnnnnnnnnnnnnnnnnnnnnnnnnnnnnnnnnnnnnnnnnnnnnnnnnnnnnnnnnnnnnnnnnnnnnnnnnnnnnnnnnnnnnnnnnnnnnnnnnnnnnnnnnnnnnnnnnnnnnnnnnnnnnnnnnnnnnnnnnnnnnnnnnnnnnnnnnnnnnnnnnnnnnnnnnnnnnnnnnnnnnnnnnnnnnnnnnnnnnnnnnnnnnnnnnnnnnnnnnnnnnnnnnnnnnnnnnnnnnnnnnnnnnnnnnnnnnnnnnnnnnnnnnnnnnnnnnnnnnnnnnnnnnnnnnnnnnnnnnnnnnnnnnnnnnnnnnnnnnnnnnnnnnnnnnnnnnnnnnnnnnnnnnnnnnnnnnnnnnnnnnnnnnnnnnnnnnnnnnnnnnnnnnnnnnnnnnnnnnnnnnnnnnnnnnnnnnnnnnnnnnnnnnnnnnnnnnnnnnnnnnnnnnnnnnnnnnnnnnnnnnnnnnnnnnnnnnnnnnnnnnnnnnnnnnnnnnnnnnnnnnnnnnnnnnnnnnnnnnnnnnnnnnnnnnnnnnnnnnnnnnnnnnnnnnnnnnnnnnnnnnnnnnnnnnnnnnnnnnnnnnnnnnnnnnnnnnnnnnnnnnnnnnnnnnnnnnnnnnnnnnnnnnnnnnnnnnnnnnnnnnnnnnnnnnnnnnnnnnnnnnnnnnnnnnnnnnnnnnnnnnnnnnnnnnnnnnnnnnnnnnnnnnnnnnnnnnnnnnnnnnnnnnnnnnnnnnnnnnnnnnnnnnnnnnnnnnnnnnnnnnnnnnnnnnnnnnnnnnnnnnnnnnnnnnnnnnnnnnnnnnnnnnnnnnnnnnnnnnnnnnnnnnnnnnnnnnnnnnnnnnnnnnnnnnnnnnnnnnnnnnnnnnnnnnnnnnnnnnnnnnnnnnnnnnnnnnnnnnnnnnnnnnnnnnnnnnnnnnnnnnnnnnnnnnnnnnnnnnnnnnnnnnnnnnnnnnnnnnnnnnnnnnnnnnnnnnnnnnnnnnnnnnnnnnnnnnnnnnnnnnnnnnnnnnnnnnnnnnnnnnnnnnnnnnnnnnnnnnnnnnnnnnnnnnnnnnnnnnnnnnnnnnnnnnnnnnnnnnnnnnnnnnnnnnnnnnnnnnnnnnnnnnnnnnnnnnnnnnnnnnnnnnnnnnnnnnnnnnnnnnnnnnnnnnnnnnnnnnnnnnnnnnnnnnnnnnnnnnnnnnnnnnnnnnnnnnnnnnnnnnnnnnnnnnnnnnnnnnnnnnnnnnnnnnnnnnnnnnnnnnnnnnnnnnnnnnnnnnnnnnnnnnnnnnnnnnnnnnnnnnnnnnnnnnnnnnnnnnnnnnnnnnnnnnnnnnnnnnnnnnnnnnnnnnnnnnnnnnnnnnnnnnnnnnnnnnnnnnnnnnnnnnnnnnnnnnnnnnnnnnnnnnnnnnnnnnnnnnnnnnnnnnnnnnnnnnnnnnnnnnnnnnnnnnnnnnnnnnnnnnnnnnnnnnnnnnnnnnnnnnnnnnnnnnnnnnnnnnnnnnnnnnnnnnnnnnnnnnnnnnnnnnnnnnnnnnnnnnnnnnnnnnnnnnnnnnnnnnnnnnnnnnnnnnnnnnnnnnnnnnnnnnnnnnnnnnnnnnnnnnnnnnnnnnnnnnnnnnnnnnnnnnnnnnnnnnnnnnnnnnnnnnnnnnnnnnnnnnnnnnnnnnnnnnnnnnnnnnnnnnnnnnnnnnnnnnnnnnnnnnnnnnnnnnnnnnnnnnnnnnnnnnnnnnnnnnnnnnnnnnnnnnnnnnnnnnnnnnnnnnnnnnnnnnnnnnnnnnnnnnnnnnnnnnnnnnnnnnnnnnnnnnnnnnnnnnnnnnnnnnnnnnnnnnnnnnnnnnnnnnnnnnnnnnnnnnnnnnnnnnnnnnnnnnnnnnnnnnnnnnnnnnnnnnnnnnnnnnnnnnnnnnnnnnnnnnnnnnnnnnnnnnnnnnnnnnnnnnnnnnnnnnnnnnnnnnnnnnnnnnnnnnnnnnnnnnnnnnnnnnnnnnnnnnnnnnnnnnnnnnnnnnnnnnnnnnnnnnnnnnnnnnnnnnnnnnnnnnnnnnnnnnnnnnnnnnnnnnnnnnnnnnnnnnnnnnnnnnnnnnnnnnnnnnnnnnnnnnnnnnnnnnnnnnnnnnnnnnnnnnnnnnnnnnnnnnnnnnnnnnnnnnnnnnnnnnnnnnnnnnnnnnnnnnnnnnnnnnnnnnnnnnnnnnnnnnnnnnnnnnnnnnnnnnnnnnnnnnnnnnnnnnnnnnnnnnnnnnnnnnnnnnnnnnnnnnnnnnnnnnnnnnnnnnnnnnnnnnnnnnnnnnnnnnnnnnnnnnnnnnnnnnnnnnnnnnnnnnnnnnnnnnnnnnnnnnnnnnnnnnnnnnnnnnnnnnnnnnnnnnnnnnnnnnnnnnnnnnnnnnnnnnnnnnnnnnnnnnnnnnnnnnnnnnnnnnnnnnnnnnnnnnnnnnnnnnnnnnnnnnnnnnnnnnnnnnnnnnnnnnnnnnnnnnnnnnnnnnnnnnnnnnnnnnnnnnnnnnnnnnnnnnnnnnnnnnnnnnnnnnnnnnnnnnnnnnnnnnnnnnnnnnnnnnnnnnnnnnnnnnnnnnnnnnnnnnnnnnnnnnnnnnnnnnnnnnnnnnnnnnnnnnnnnnnnnnnnnnnnnnnnnnnnnnnnnnnnnnnnnnnnnnnnnnnnnnnnnnnnnnnnnnnnnnnnnnnnnnnnnnnnnnnnnnnnnnnnnnnnnnnnnnnnnnnnnnnnnnnnnnnnnnnnnnnnnnnnnnnnnnnnnnnnnnnnnnnnnnnnnnnnnnnnnnnnnnnnnnnnnnnnnnnnnnnnnnnnnnnnnnnnnnnnnnnnnnnnnnnnnnnnnnnnnnnnnnnnnnnnnnnnnnnnnnnnnnnnnnnnnnnnnnnnnnnnnnnnnnnnnnnnnnnnnnnnnnnnnnnnnnnnnnnnnnnnnnnnnnnnnnnnnnnnnnnnnnnnnnnnnnnnnnnnnnnnnnnnnnnnnnnnnnnnnnnnnnnnnnnnnnnnnnnnnnnnnnnnnnnnnnnnnnnnnnnnnnnnnnnnnnnnnnnnnnnnnnnnnnnnnnnnnnnnnnnnnnnnnnnnnnnnnnnnnnnnnnnnnnnnnnnnnnnnnnnnnnnnnnnnnnnnnnnnnnnnnnnnnnnnnnnnnnnnnnnnnnnnnnnnnnnnnnnnnnnnnnnnnnnnnnnnnnnnnnnnnnnnnnnnnnnnnnnnnnnnnnnnnnnnnnnnnnnnnnnnnnnnnnnnnnnnnnnnnnnnnnnnnnnnnnnnnnnnnnnnnnnnnnnnnnnnnnnnnnnnnnnnnnnnnnnnnnnnnnnnnnnnnnnnnnnnnnnnnnnnnnnnnnnnnnnnnnnnnnnnnnnnnnnnnnnnnnnnnnnnnnnnnnnnnnnnnnnnnnnnnnnnnnnnnnnnnnnnnnnnnnnnnnnnnnnnnnnnnnnnnnnnnnnnnnnnnnnnnnnnnnnnnnnnnnnnnnnnnnnnnnnnnnnnnnnnnnnnnnnnnnnnnnnnnnnnnnnnnnnnnnnnnnnnnnnnnnnnnnnnnnnnnnnnnnnnnnnnnnnnnnnnnnnnnnnnnnnnnnnnnnnnnnnnnnnnnnnnnnnnnnnnnnnnnnnnnnnnnnnnnnnnnnnnnnnnnnnnnnnnnnnnnnnnnnnnnnnnnnnnnnnnnnnnnnnnnnnnnnnnnnnnnnnnnnnnnnnnnnnnnnnnnnnnnnnnnnnnnnnnnnnnnnnnnnnnnnnnnnnnnnnnnnnnnnnnnnnnnnnnnnnnnnnnnnnnnnnnnnnnnnnnnnnnnnnnnnnnnnnnnnnnnnnnnnnnnnnnnnnnnnnnnnnnnnnnnnnnnnnnnnnnnnnnnnnnnnnnnnnnnnnnnnnnnnnnnnnnnnnnnnnnnnnnnnnnnnnnnnnnnnnnnnnnnnnnnnnnnnnnnnnnnnnnnnnnnnnnnnnnnnnnnnnnnnnnnnnnnnnnnnnnnnnnnnnnnnnnnnnnnnnnnnnnnnnnnnnnnnnnnnnnnnnnnnnnnnnnnnnnnnnnnnnnnnnnnnnnnnnnnnnnnnnnnnnnnnnnnnnnnnnnnnnnnnnnnnnnnnnnnnnnnnnnnnnnnnnnnnnnnnnnnnnnnnnnnnnnnnnnnnnnnnnnnnnnnnnnnnnnnnnnnnnnnnnnnnnnnnnnnnnnnnnnnnnnnnnnnnnnnnnnnnnnnnnnnnnnnnnnnnnnnnnnnnnnnnnnnnnnnnnnnnnnnnnnnnnnnnnnnnnnnnnnnnnnnnnnnnnnnnnnnnnnnnnnnnnnnnnnnnnnnnnnnnnnnnnnnnnnnnnnnnnnnnnnnnnnnnnnnnnnnnnnnnnnnnnnnnnnnnnnnnnnnnnnnnnnnnnnnnnnnnnnnnnnnnnnnnnnnnnnnnnnnnnnnnnnnnnnnnnnnnnnnnnnnnnnnnnnnnnnnnnnnnnnnnnnnnnnnnnnnnnnnnnnnnnnnnnnnnnnnnnnnnnnnnnnnnnnnnnnnnnnnnnnnnnnnnnnnnnnnnnnnnnnnnnnnnnnnnnnnnnnnnnnnnnnnnnnnnnnnnnnnnnnnnnnnnnnnnnnnnnnnnnnnnnnnnnnnnnnnnnnnnnnnnnnnnnnnnnnnnnnnnnnnnnnnnnnnnnnnnnnnnnnnnnnnnnnnnnnnnnnnnnnnnnnnnnnnnnnnnnnnnnnnnnnnnnnnnnnnnnnnnnnnnnnnnnnnnnnnnnnnnnnnnnnnnnnnnnnnnnnnnnnnnnnnnnnnnnnnnnnnnnnnnnnnnnnnnnnnnnnnnnnnnnnnnnnnnnnnnnnnnnnnnnnnnnnnnnnnnnnnnnnnnnnnnnnnnnnnnnnnnnnnnnnnnnnnnnnnnnnnnnnnnnnnnnnnnnnnnnnnnnnnnnnnnnnnnnnnnnnnnnnnnnnnnnnnnnnnnnnnnnnnnnnnnnnnnnnnnnnnnnnnnnnnnnnnnnnnnnnnnnnnnnnnnnnnnnnnnnnnnnnnnnnnnnnnnnnnnnnnnnnnnnnnnnnnnnnnnnnnnnnnnnnnnnnnnnnnnnnnnnnnnnnnnnnnnnnnnnnnnnnnnnnnnnnnnnnnnnnnnnnnnnnnnnnnnnnnnnnnnnnnnnnnnnnnnnnnnnnnnnnnnnnnnnnnnnnnnnnnnnnnnnnnnnnnnnnnnnnnnnnnnnnnnnnnnnnnnnnnnnnnnnnnnnnnnnnnnnnnnnnnnnnnnnnnnnnnnnnnnnnnnnnnnnnnnnnnnnnnnnnnnnnnnnnnnnnnnnnnnnnnnnnnnnnnnnnnnnnnnnnnnnnnnnnnnnnnnnnnnnnnnnnnnnnnnnnnnnnnnnnnnnnnnnnnnnnnnnnnnnnnnnnnnnnnnnnnnnnnnnnnnnnnnnnnnnnnnnnnnnnnnnnnnnnnnnnnnnnnnnnnnnnnnnnnnnnnnnnnnnnnnnnnnnnnnnnnnnnnnnnnnnnnnnnnnnnnnnnnnnnnnnnnnnnnnnnnnnnnnnnnnnnnnnnnnnnnnnnnnnnnnnnnnnnnnnnnnnnnnnnnnnnnnnnnnnnnnnnnnnnnnnnnnnnnnnnnnnnnnnnnnnnnnnnnnnnnnnnnnnnnnnnnnnnnnnnnnnnnnnnnnnnnnnnnnnnnnnnnnnnnnnnnnnnnnnnnnnnnnnnnnnnnnnnnnnnnnnnnnnnnnnnnnnnnnnnnnnnnnnnnnnnnnnnnnnnnnnnnnnnnnnnnnnnnnnnnnnnnnnnnnnnnnnnnnnnnnnnnnnnnnnnnnnnnnnnnnnnnnnnnnnnnnnnnnnnnnnnnnnnnnnnnnnnnnnnnnnnnnnnnnnnnnnnnnnnnnnnnnnnnnnnnnnnnnnnnnnnnnnnnnnnnnnnnnnnnnnnnnnnnnnnnnnnnnnnnnnnnnnnnnnnnnnnnnnnnnnnnnnnnnnnnnnnnnnnnnnnnnnnnnnnnnnnnnnnnnnnnnnnnnnnnnnnnnnnnnnnnnnnnnnnnnnnnnnnnnnnnnnnnnnnnnnnnnnnnnnnnnnnnnnnnnnnnnnnnnnnnnnnnnnnnnnnnnnnnnnnnnnnnnnnnnnnnnnnnnnnnnnnnnnnnnnnnnnnnnnnnnnnnnnnnnnnnnnnnnnnnnnnnnnnnnnnnnnnnnnnnnnnnnnnnnnnnnnnnnnnnnnnnnnnnnnnnnnnnnnnnnnnnnnnnnnnnnnnnnnnnnnnnnnnnnnnnnnnnnnnnnnnnnnnnnnnnnnnnnnnnnnnnnnnnnnnnnnnnnnnnnnnnnnnnnnnnnnnnnnnnnnnnnnnnnnnnnnnnnnnnnnnnnnnnnnnnnnnnnnnnnnnnnnnnnnnnnnnnnnnnnnnnnnnnnnnnnnnnnnnnnnnnnnnnnnnnnnnnnnnnnnnnnnnnnnnnnnnnnnnnnnnnnnnnnnnnnnnnnnnnnnnnnnnnnnnnnnnnnnnnnnnnnnnnnnnnnnnnnnnnnnnnnnnnnnnnnnnnnnnnnnnnnnnnnnnnnnnnnnnnnnnnnnnnnnnnnnnnnnnnnnnnnnnnnnnnnnnnnnnnnnnnnnnnnnnnnnnnnnnnnnnnnnnnnnnnnnnnnnnnnnnnnnnnnnnnnnnnnnnnnnnnnnnnnnnnnnnnnnnnnnnnnnnnnnnnnnnnnnnnnnnnnnnnnnnnnnnnnnnnnnnnnnnnnnnnnnnnnnnnnnnnnnnnnnnnnnnnnnnnnnnnnnnnnnnnnnnnnnnnnnnnnnnnnnnnnnnnnnnnnnnnnnnnnnnnnnnnnnnnnnnnnnnnnnnnnnnnnnnnnnnnnnnnnnnnnnnnnnnnnnnnnnnnnnnnnnnnnnnnnnnnnnnnnnnnnnnnnnnnnnnnnnnnnnnnnnnnnnnnnnnnnnnnnnnnnnnnnnnnnnnnnnnnnnnnnnnnnnnnnnnnnnnnnnnnnnnnnnnnnnnnnnnnnnnnnnnnnnnnnnnnnnnnnnnnnnnnnnnnnnnnnnnnnnnnnnnnnnnnnnnnnnnnnnnnnnnnnnnnnnnnnnnnnnnnnnnnnnnnnnnnnnnnnnnnnnnnnnnnnnnnnnnnnnnnnnnnnnnnnnnnnnnnnnnnnnnnnnnnnnnnnnnnnnnnnnnnnnnnnnnnnnnnnnnnnnnnnnnnnnnnnnnnnnnnnnnnnnnnnnnnnnnnnnnnnnnnnnnnnnnnnnnnnnnnnnnnnnnnnnnnnnnnnnnnnnnnnnnnnnnnnnnnnnnnnnnnnnnnnnnnnnnnnnnnnnnnnnnnnnnnnnnnnnnnnnnnnnnnnnnnnnnnnnnnnnnnnnnnnnnnnnnnnnnnnnnnnnnnnnnnnnnnnnnnnnnnnnnnnnnnnnnnnnnnnnnnnnnnnnnnnnnnnnnnnnnnnnnnnnnnnnnnnnnnnnnnnnnnnnnnnnnnnnnnnnnnnnnnnnnnnnnnnnnnnnnnnnnnnnnnnnnnnnnnnnnnnnnnnnnnnnnnnnnnnnnnnnnnnnnnnnnnnnnnnnnnnnnnnnnnnnnnnnnnnnnnnnnnnnnnnnnnnnnnnnnnnnnnnnnnnnnnnnnnnnnnnnnnnnnnnnnnnnnnnnnnnnnnnnnnnnnnnnnnnnnnnnnnnnnnnnnnnnnnnnnnnnnnnnnnnnnnnnnnnnnnnnnnnnnnnnnnnnnnnnnnnnnnnnnnnnnnnnnnnnnnnnnnnnnnnnnnnnnnnnnnnnnnnnnnnnnnnnnnnnnnnnnnnnnnnnnnnnnnnnnnnnnnnnnnnnnnnnnnnnnnnnnnnnnnnnnnnnnnnnnnnnnnnnnnnnnnnnnnnnnnnnnnnnnnnnnnnnnnnnnnnnnnnnnnnnnnnnnnnnnnnnnnnnnnnnnnnnnnnnnnnnnnnnnnnnnnnnnnnnnnnnnnnnnnnnnnnnnnnnnnnnnnnnnnnnnnnnnnnnnnnnnnnnnnnnnnnnnnnnnnnnnnnnnnnnnnnnnnnnnnnnnnnnnnnnnnnnnnnnnnnnnnnnnnnnnnnnnnnnnnnnnnnnnnnnnnnnnnnnnnnnnnnnnnnnnnnnnnnnnnnnnnnnnnnnnnnnnnnnnnnnnnnnnnnnnnnnnnnnnnnnnnnnnnnnnnnnnnnnnnnnnnnnnnnnnnnnnnnnnnnnnnnnnnnnnnnnnnnnnnnnnnnnnnnnnnnnnnnnnnnnnnnnnnnnnnnnnnnnnnnnnnnnnnnnnnnnnnnnnnnnnnnnnnnnnnnnnnnnnnnnnnnnnnnnnnnnnnnnnnnnnnnnnnnnnnnnnnnnnnnnnnnnnnnnnnnnnnnnnnnnnnnnnnnnnnnnnnnnnnnnnnnnnnnnnnnnnnnnnnnnnnnnnnnnnnnnnnnnnnnnnnnnnnnnnnnnnnnnnnnnnnnnnnnnnnnnnnnnnnnnnnnnnnnnnnnnnnnnnnnnnnnnnnnnnnnnnnnnnnnnnnnnnnnnnnnnnnnnnnnnnnnnnnnnnnnnnnnnnnnnnnnnnnnnnnnnnnnnnnnnnnnnnnnnnnnnnnnnnnnnnnnnnnnnnnnnnnnnnnnnnnnnnnnnnnnnnnnnnnnnnnnnnnnnnnnnnnnnnnnnnnnnnnnnnnnnnnnnnnnnnnnnnnnnnnnnnnnnnnnnnnnnnnnnnnnnnnnnnnnnnnnnnnnnnnnnnnnnnnnnnnnnnnnnnnnnnnnnnnnnnnnnnnnnnnnnnnnnnnnnnnnnnnnnnnnnnnnnnnnnnnnnnnnnnnnnnnnnnnnnnnnnnnnnnnnnnnnnnnnnnnnnnnnnnnnnnnnnnnnnnnnnnnnnnnnnnnnnnnnnnnnnnnnnnnnnnnnnnnnnnnnnnnnnnnnnnnnnnnnnnnnnnnnnnnnnnnnnnnnnnnnnnnnnnnnnnnnnnnnnnnnnnnnnnnnnnnnnnnnnnnnnnnnnnnnnnnnnnnnnnnnnnnnnnnnnnnnnnnnnnnnnnnnnnnnnnnnnnnnnnnnnnnnnnnnnnnnnnnnnnnnnnnnnnnnnnnnnnnnnnnnnnnnnnnnnnnnnnnnnnnnnnnnnnnnnnnnnnnnnnnnnnnnnnnnnnnnnnnnnnnnnnnnnnnnnnnnnnnnnnnnnnnnnnnnnnnnnnnnnnnnnnnnnnnnnnnnnnnnnnnnnnnnnnnnnnnnnnnnnnnnnnnnnnnnnnnnnnnnnnnnnnnnnnnnnnnnnnnnnnnnnnnnnnnnnnnnnnnnnnnnnnnnnnnnnnnnnnnnnnnnnnnnnnnnnnnnnnnnnnnnnnnnnnnnnnnnnnnnnnnnnnnnnnnnnnnnnnnnnnnnnnnnnnnnnnnnnnnnnnnnnnnnnnnnnnnnnnnnnnnnnnnnnnnnnnnnnnnnnnnnnnnnnnnnnnnnnnnnnnnnnnnnnnnnnnnnnnnnnnnnnnnnnnnnnnnnnnnnnnnnnnnnnnnnnnnnnnnnnnnnnnnnnnnnnnnnnnnnnnnnnnnnnnnnnnnnnnnnnnnnnnnnnnnnnnnnnnnnnnnnnnnnnnnnnnnnnnnnnnnnnnnnnnnnnnnnnnnnnnnnnnnnnnnnnnnnnnnnnnnnnnnnnnnnnnnnnnnnnnnnnnnnnnnnnnnnnnnnnnnnnnnnnnnnnnnnnnnnnnnnnnnnnnnnnnnnnnnnnnnnnnnnnnnnnnnnnnnnnnnnnnnnnnnnnnnnnnnnnnnnnnnnnnnnnnnnnnnnnnnnnnnnnnnnnnnnnnnnnnnnnnnnnnnnnnnnnnnnnnnnnnnnnnnnnnnnnnnnnnnnnnnnnnnnnnnnnnnnnnnnnnnnnnnnnnnnnnnnnnnnnnnnnnnnnnnnnnnnnnnnnnnnnnnnnnnnnnnnnnnnnnnnnnnnnnnnnnnnnnnnnnnnnnnnnnnnnnnnnnnnnnnnnnnnnnnnnnnnnnnnnnnnnnnnnnnnnnnnnnnnnnnnnnnnnnnnnnnnnnnnnnnnnnnnnnnnnnnnnnnnnnnnnnnnnnnnnnnnnnnnnnnnnnnnnnnnnnnnnnnnnnnnnnnnnnnnnnnnnnnnnnnnnnnnnnnnnnnnnnnnnnnnnnnnnnnnnnnnnnnnnnnnnnnnnnnnnnnnnnnnnnnnnnnnnnnnnnnnnnnnnnnnnnnnnnnnnnnnnnnnnnnnnnnnnnnnnnnnnnnnnnnnnnnnnnnnnnnnnnnnnnnnnnnnnnnnnnnnnnnnnnnnnnnnnnnnnnnnnnnnnnnnnnnnnnnnnnnnnnnnnnnnnnnnnnnnnnnnnnnnnnnnnnnnnnnnnnnnnnnnnnnnnnnnnnnnnnnnnnnnnnnnnnnnnnnnnnnnnnnnnnnnnnnnnnnnnnnnnnnnnnnnnnnnnnnnnnnnnnnnnnnnnnnnnnnnnnnnnnnnnnnnnnnnnnnnnnnnnnnnnnnnnnnnnnnnnnnnnnnnnnnnnnnnnnnnnnnnnnnnnnnnnnnnnnnnnnnnnnnnnnnnnnnnnnnnnnnnnnnnnnnnnnnnnnnnnnnnnnnnnnnnnnnnnnnnnnnnnnnnnnnnnnnnnnnnnnnnnnnnnnnnnnnnnnnnnnnnnnnnnnnnnnnnnnnnnnnnnnnnnnnnnnnnnnnnnnnnnnnnnnnnnnnnnnnnnnnnnnnnnnnnnnnnnnnnnnnnnnnnnnnnnnnnnnnnnnnnnnnnnnnnnnnnnnnnnnnnnnnnnnnnnnnnnnnnnnnnnnnnnnnnnnnnnnnnnnnnnnnnnnnnnnnnnnnnnnnnnnnnnnnnnnnnnnnnnnnnnnnnnnnnnnnnnnnnnnnnnnnnnnnnnnnnnnnnnnnnnnnnnnnnnnnnnnnnnnnnnnnnnnnnnnnnnnnnnnnnnnnnnnnnnnnnnnnnnnnnnnnnnnnnnnnnnnnnnnnnnnnnnnnnnnnnnnnnnnnnnnnnnnnnnnnnnnnnnnnnnnnnnnnnnnnnnnnnnnnnnnnnnnnnnnnnnnnnnnnnnnnnnnnnnnnnnnnnnnnnnnnnnnnnnnnnnnnnnnnnnnnnnnnnnnnnnnnnnnnnnnnnnnnnnnnnnnnnnnnnnnnnnnnnnnnnnnnnnnnnnnnnnnnnnnnnnnnnnnnnnnnnnnnnnnnnnnnnnnnnnnnnnnnnnnnnnnnnnnnnnnnnnnnnnnnnnnnnnnnnnnnnnnnnnnnnnnnnnnnnnnnnnnnnnnnnnnnnnnnnnnnnnnnnnnnnnnnnnnnnnnnnnnnnnnnnnnnnnnnnnnnnnnnnnnnnnnnnnnnnnnnnnnnnnnnnnnnnnnnnnnnnnnnnnnnnnnnnnnnnnnnnnnnnnnnnnnnnnnnnnnnnnnnnnnnnnnnnnnnnnnnnnnnnnnnnnnnnnnnnnnnnnnnnnnnnnnnnnnnnnnnnnnnnnnnnnnnnnnnnnnnnnnnnnnnnnnnnnnnnnnnnnnnnnnnnnnnnnnnnnnnnnnnnnnnnnnnnnnnnnnnnnnnnnnnnnnnnnnnnnnnnnnnnnnnnnnnnnnnnnnnnnnnnnnnnnnnnnnnnnnnnnnnnnnnnnnnnnnnnnnnnnnnnnnnnnnnnnnnnnnnnnnnnnnnnnnnnnnnnnnnnnnnnnnnnnnnnnnnnnnnnnnnnnnnnnnnnnnnnnnnnnnnnnnnnnnnnnnnnnnnnnnnnnnnnnnnnnnnnnnnnnnnnnnnnnnnnnnnnnnnnnnnnnnnnnnnnnnnnnnnnnnnnnnnnnnnnnnnnnnnnnnnnnnnnnnnnnnnnnnnnnnnnnnnnnnnnnnnnnnnnnnnnnnnnnnnnnnnnnnnnnnnnnnnnnnnnnnnnnnnnnnnnnnnnnnnnnnnnnnnnnnnnnnnnnnnnnnnnnnnnnnnnnnnnnnnnnnnnnnnnnnnnnnnnnnnnnnnnnnnnnnnnnnnnnnnnnnnnnnnnnnnnnnnnnnnnnnnnnnnnnnnnnnnnnnnnnnnnnnnnnnnnnnnnnnnnnnnnnnnnnnnnnnnnnnnnnnnnnnnnnnnnnnnnnnnnnnnnnnnnnnnnnnnnnnnnnnnnnnnnnnnnnnnnnnnnnnnnnnnnnnnnnnnnnnnnnnnnnnnnnnnnnnnnnnnnnnnnnnnnnnnnnnnnnnnnnnnnnnnnnnnnnnnnnnnnnnnnnnnnnnnnnnnnnnnnnnnnnnnnnnnnnnnnnnnnnnnnnnnnnnnnnnnnnnnnnnnnnnnnnnnnnnnnnnnnnnnnnnnnnnnnnnnnnnnnnnnnnnnnnnnnnnnnnnnnnnnnnnnnnnnnnnnnnnnnnnnnnnnnnnnnnnnnnnnnnnnnnnnnnnnnnnnnnnnnnnnnnnnnnnnnnnnnnnnnnnnnnnnnnnnnnnnnnnnnnnnnnnnnnnnnnnnnnnnnnnnnnnnnnnnnnnnnnnnnnnnnnnnnnnnnnnnnnnnnnnnnnnnnnnnnnnnnnnnnnnnnnnnnnnnnnnnnnnnnnnnnnnnnnnnnnnnnnnnnnnnnnnnnnnnnnnnnnnnnnnnnnnnnnnnnnnnnnnnnnnnnnnnnnnnnnnnnnnnnnnnnnnnnnnnnnnnnnnnnnnnnnnnnnnnnnnnnnnnnnnnnnnnnnnnnnnnnnnnnnnnnnnnnnnnnnnnnnnnnnnnnnnnnnnnnnnnnnnnnnnnnnnnnnnnnnnnnnnnnnnnnnnnnnnnnnnnnnnnnnnnnnnnnnnnnnnnnnnnnnnnnnnnnnnnnnnnnnnnnnnnnnnnnnnnnnnnnnnnnnnnnnnnnnnnnnnnnnnnnnnnnnnnnnnnnnnnnnnnnnnnnnnnnnnnnnnnnnnnnnnnnnnnnnnnnnnnnnnnnnnnnnnnnnnnnnnnnnnnnnnnnnnnnnnnnnnnnnnnnnnnnnnnnnnnnnnnnnnnnnnnnnnnnnnnnnnnnnnnnnnnnnnnnnnnnnnnnnnnnnnnnnnnnnnnnnnnnnnnnnnnnnnnnnnnnnnnnnnnnnnnnnnnnnnnnnnnnnnnnnnnnnnnnnnnnnnnnnnnnnnnnnnnnnnnnnnnnnnnnnnnnnnnnnnnnnnnnnnnnnnnnnnnnnnnnnnnnnnnnnnnnnnnnnnnnnnnnnnnnnnnnnnnnnnnnnnnnnnnnnnnnnnnnnnnnnnnnnnnnnnnnnnnnnnnnnnnnnnnnnnnnnnnnnnnnnnnnnnnnnnnnnnnnnnnnnnnnnnnnnnnnnnnnnnnnnnnnnnnnnnnnnnnnnnnnnnnnnnnnnnnnnnnnnnnnnnnnnnnnnnnnnnnnnnnnnnnnnnnnnnnnnnnnnnnnnnnnnnnnnnnnnnnnnnnnnnnnnnnnnnnnnnnnnnnnnnnnnnnnnnnnnnnnnnnnnnnnnnnnnnnnnnnnnnnnnnnnnnnnnnnnnnnnnnnnnnnnnnnnnnnnnnnnnnnnnnnnnnnnnnnnnnnnnnnnnnnnnnnnnnnnnnnnnnnnnnnnnnnnnnnnnnnnnnnnnnnnnnnnnnnnnnnnnnnnnnnnnnnnnnnnnnnnnnnnnnnnnnnnnnnnnnnnnnnnnnnnnnnnnnnnnnnnnnnnnnnnnnnnnnnnnnnnnnnnnnnnnnnnnnnnnnnnnnnnnnnnnnnnnnnnnnnnnnnnnnnnnnnnnnnnnnnnnnnnnnnnnnnnnnnnnnnnnnnnnnnnnnnnnnnnnnnnnnnnnnnnnnnnnnnnnnnnnnnnnnnnnnnnnnnnnnnnnnnnnnnnnnnnnnnnnnnnnnnnnnnnnnnnnnnnnnnnnnnnnnnnnnnnnnnnnnnnnnnnnnnnnnnnnnnnnnnnnnnnnnnnnnnnnnnnnnnnnnnnnnnnnnnnnnnnnnnnnnnnnnnnnnnnnnnnnnnnnnnnnnnnnnnnnnnnnnnnnnnnnnnnnnnnnnnnnnnnnnnnnnnnnnnnnnnnnnnnnnnnnnnnnnnnnnnnnnnnnnnnnnnnnnnnnnnnnnnnnnnnnnnnnnnnnnnnnnnnnnnnnnnnnnnnnnnnnnnnnnnnnnnnnnnnnnnnnnnnnnnnnnnnnnnnnnnnnnnnnnnnnnnnnnnnnnnnnnnnnnnnnnnnnnnnnnnnnnnnnnnnnnnnnnnnnnnnnnnnnnnnnnnnnnnnnnnnnnnnnnnnnnnnnnnnnnnnnnnnnnnnnnnnnnnnnnnnnnnnnnnnnnnnnnnnnnnnnnnnnnnnnnnnnnnnnnnnnnnnnnnnnnnnnnnnnnnnnnnnnnnnnnnnnnnnnnnnnnnnnnnnnnnnnnnnnnnnnnnnnnnnnnnnnnnnnnnnnnnnnnnnnnnnnnnnnnnnnnnnnnnnnnnnnnnnnnnnnnnnnnnnnnnnnnnnnnnnnnnnnnnnnnnnnnnnnnnnnnnnnnnnnnnnnnnnnnnnnnnnnnnnnnnnnnnnnnnnnnnnnnnnnnnnnnnnnnnnnnnnnnnnnnnnnnnnnnnnnnnnnnnnnnnnnnnnnnnnnnnnnnnnnnnnnnnnnnnnnnnnnnnnnnnnnnnnnnnnnnnnnnnnnnnnnnnnnnnnnnnnnnnnnnnnnnnnnnnnnnnnnnnnnnnnnnnnnnnnnnnnnnnnnnnnnnnnnnnnnnnnnnnnnnnnnnnnnnnnnnnnnnnnnnnnnnnnnnnnnnnnnnnnnnnnnnnnnnnnnnnnnnnnnnnnnnnnnnnnnnnnnnnnnnnnnnnnnnnnnnnnnnnnnnnnnnnnnnnnnnnnnnnnnnnnnnnnnnnnnnnnnnnnnnnnnnnnnnnnnnnnnnnnnnnnnnnnnnnnnnnnnnnnnnnnnnnnnnnnnnnnnnnnnnnnnnnnnnnnnnnnnnnnnnnnnnnnnnnnnnnnnnnnnnnnnnnnnnnnnnnnnnnnnnnnnnnnnnnnnnnnnnnnnnnnnnnnnnnnnnnnnnnnnnnnnnnnnnnnnnnnnnnnnnnnnnnnnnnnnnnnnnnnnnnnnnnnnnnnnnnnnnnnnnnnnnnnnnnnnnnnnnnnnnnnnnnnnnnnnnnnnnnnnnnnnnnnnnnnnnnnnnnnnnnnnnnnnnnnnnnnnnnnnnnnnnnnnnnnnnnnnnnnnnnnnnnnnnnnnnnnnnnnnnnnnnnnnnnnnnnnnnnnnnnnnnnnnnnnnnnnnnnnnnnnnnnnnnnnnnnnnnnnnnnnnnnnnnnnnnnnnnnnnnnnnnnnnnnnnnnnnnnnnnnnnnnnnnnnnnnnnnnnnnnnnnnnnnnnnnnnnnnnnnnnnnnnnnnnnnnnnnnnnnnnnnnnnnnnnnnnnnnnnnnnnnnnnnnnnnnnnnnnnnnnnnnnnnnnnnnnnnnnnnnnnnnnnnnnnnnnnnnnnnnnnnnnnnnnnnnnnnnnnnnnnnnnnnnnnnnnnnnnnnnnnnnnnnnnnnnnnnnnnnnnnnnnnnnnnnnnnnnnnnnnnnnnnnnnnnnnnnnnnnnnnnnnnnnnnnnnnnnnnnnnnnnnnnnnnnnnnnnnnnnnnnnnnnnnnnnnnnnnnnnnnnnnnnnnnnnnnnnnnnnnnnnnnnnnnnnnnnnnnnnnnnnnnnnnnnnnnnnnnnnnnnnnnnnnnnnnnnnnnnnnnnnnnnnnnnnnnnnnnnnnnnnnnnnnnnnnnnnnnnnnnnnnnnnnnnnnnnnnnnnnnnnnnnnnnnnnnnnnnnnnnnnnnnnnnnnnnnnnnnnnnnnnnnnnnnnnnnnnnnnnnnnnnnnnnnnnnnnnnnnnnnnnnnnnnnnnnnnnnnnnnnnnnnnnnnnnnnnnnnnnnnnnnnnnnnnnnnnnnnnnnnnnnnnnnnnnnnnnnnnnnnnnnnnnnnnnnnnnnnnnnnnnnnnnnnnnnnnnnnnnnnnnnnnnnnnnnnnnnnnnnnnnnnnnnnnnnnnnnnnnnnnnnnnnnnnnnnnnnnnnnnnnnnnnnnnnnnnnnnnnnnnnnnnnnnnnnnnnnnnnnnnnnnnnnnnnnnnnnnnnnnnnnnnnnnnnnnnnnnnnnnnnnnnnnnnnnnnnnnnnnnnnnnnnnnnnnnnnnnnnnnnnnnnnnnnnnnnnnnnnnnnnnnnnnnnnnnnnnnnnnnnnnnnnnnnnnnnnnnnnnnnnnnnnnnnnnnnnnnnnnnnnnnnnnnnnnnnnnnnnnnnnnnnnnnnnnnnnnnnnnnnnnnnnnnnnnnnnnnnnnnnnnnnnnnnnnnnnnnnnnnnnnnnnnnnnnnnnnnnnnnnnnnnnnnnnnnnnnnnnnnnnnnnnnnnnnnnnnnnnnnnnnnnnnnnnnnnnnnnnnnnnnnnnnnnnnnnnnnnnnnnnnnnnnnnnnnnnnnnnnnnnnnnnnnnnnnnnnnnnnnnnnnnnnnnnnnnnnnnnnnnnnnnnnnnnnnnnnnnnnnnnnnnnnnnnnnnnnnnnnnnnnnnnnnnnnnnnnnnnnnnnnnnnnnnnnnnnnnnnnnnnnnnnnnnnnnnnnnnnnnnnnnnnnnnnnnnnnnnnnnnnnnnnnnnnnnnnnnnnnnnnnnnnnnnnnnnnnnnnnnnnnnnnnnnnnnnnnnnnnnnnnnnnnnnnnnnnnnnnnnnnnnnnnnnnnnnnnnnnnnnnnnnnnnnnnnnnnnnnnnnnnnnnnnnnnnnnnnnnnnnnnnnnnnnnnnnnnnnnnnnnnnnnnnnnnnnnnnnnnnnnnnnnnnnnnnnnnnnnnnnnnnnnnnnnnnnnnnnnnnnnnnnnnnnnnnnnnnnnnnnnnnnnnnnnnnnnnnnnnnnnnnnnnnnnnnnnnnnnnnnnnnnnnnnnnnnnnnnnnnnnnnnnnnnnnnnnnnnnnnnnnnnnnnnnnnnnnnnnnnnnnnnnnnnnnnnnnnnnnnnnnnnnnnnnnnnnnnnnnnnnnnnnnnnnnnnnnnnnnnnnnnnnnnnnnnnnnnnnnnnnnnnnnnnnnnnnnnnnnnnnnnnnnnnnnnnnnnnnnnnnnnnnnnnnnnnnnnnnnnnnnnnnnnnnnnnnnnnnnnnnnnnnnnnnnnnnnnnnnnnnnnnnnnnnnnnnnnnnnnnnnnnnnnnnnnnnnnnnnnnnnnnnnnnnnnnnnnnnnnnnnnnnnnnnnnnnnnnnnnnnnnnnnnnnnnnnnnnnnnnnnnnnnnnnnnnnnnnnnnnnnnnnnnnnnnnnnnnnnnnnnnnnnnnnnnnnnnnnnnnnnnnnnnnnnnnnnnnnnnnnnnnnnnnnnnnnnnnnnnnnnnnnnnnnnnnnnnnnnnnnnnnnnnnnnnnnnnnnnnnnnnnnnnnnnnnnnnnnnnnnnnnnnnnnnnnnnnnnnnnnnnnnnnnnnnnnnnnnnnnnnnnnnnnnnnnnnnnnnnnnnnnnnnnnnnnnnnnnnnnnnnnnnnnnnnnnnnnnnnnnnnnnnnnnnnnnnnnnnnnnnnnnnnnnnnnnnnnnnnnnnnnnnnnnnnnnnnnnnnnnnnnnnnnnnnnnnnnnnnnnnnnnnnnnnnnnnnnnnnnnnnnnnnnnnnnnnnnnnnnnnnnnnnnnnnnnnnnnnnnnnnnnnnnnnnnnnnnnnnnnnnnnnnnnnnnnnnnnnnnnnnnnnnnnnnnnnnnnnnnnnnnnnnnnnnnnnnnnnnnnnnnnnnnnnnnnnnnnnnnnnnnnnnnnnnnnnnnnnnnnnnnnnnnnnnnnnnnnnnnnnnnnnnnnnnnnnnnnnnnnnnnnnnnnnnnnnnnnnnnnnnnnnnnnnnnnnnnnnnnnnnnnnnnnnnnnnnnnnnnnnnnnnnnnnnnnnnnnnnnnnnnnnnnnnnnnnnnnnnnnnnnnnnnnnnnnnnnnnnnnnnnnnnnnnnnnnnnnnnnnnnnnnnnnnnnnnnnnnnnnnnnnnnnnnnnnnnnnnnnnnnnnnnnnnnnnnnnnnnnnnnnnnnnnnnnnnnnnnnnnnnnnnnnnnnnnnnnnnnnnnnnnnnnnnnnnnnnnnnnnnnnnnnnnnnnnnnnnnnnnnnnnnnnnnnnnnnnnnnnnnnnnnnnnnnnnnnnnnnnnnnnnnnnnnnnnnnnnnnnnnnnnnnnnnnnnnnnnnnnnnnnnnnnnnnnnnnnnnnnnnnnnnnnnnnnnnnnnnnnnnnnnnnnnnnnnnnnnnnnnnnnnnnnnnnnnnnnnnnnnnnnnnnnnnnnnnnnnnnnnnnnnnnnnnnnnnnnnnnnnnnnnnnnnnnnnnnnnnnnnnnnnnnnnnnnnnnnnnnnnnnnnnnnnnnnnnnnnnnnnnnnnnnnnnnnnnnnnnnnnnnnnnnnnnnnnnnnnnnnnnnnnnnnnnnnnnnnnnnnnnnnnnnnnnnnnnnnnnnnnnnnnnnnnnnnnnnnnnnnnnnnnnnnnnnnnnnnnnnnnnnnnnnnnnnnnnnnnnnnnnnnnnnnnnnnnnnnnnnnnnnnnnnnnnnnnnnnnnnnnnnnnnnnnnnnnnnnnnnnnnnnnnnnnnnnnnnnnnnnnnnnnnnnnnnnnnnnnnnnnnnnnnnnnnnnnnnnnnnnnnnnnnnnnnnnnnnnnnnnnnnnnnnnnnnnnnnnnnnnnnnnnnnnnnnnnnnnnnnnnnnnnnnnnnnnnnnnnnnnnnnnnnnnnnnnnnnnnnnnnnnnnnnnnnnnnnnnnnnnnnnnnnnnnnnnnnnnnnnnnnnnnnnnnnnnnnnnnnnnnnnnnnnnnnnnnnnnnnnnnnnnnnnnnnnnnnnnnnnnnnnnnnnnnnnnnnnnnnnnnnnnnnnnnnnnnnnnnnnnnnnnnnnnnnnnnnnnnnnnnnnnnnnnnnnnnnnnnnnnnnnnnnnnnnnnnnnnnnnnnnnnnnnnnnnnnnnnnnnnnnnnnnnnnnnnnnnnnnnnnnnnnnnnnnnnnnnnnnnnnnnnnnnnnnnnnnnnnnnnnnnnnnnnnnnnnnnnnnnnnnnnnnnnnnnnnnnnnnnnnnnnnnnnnnnnnnnnnnnnnnnnnnnnnnnnnnnnnnnnnnnnnnnnnnnnnnnnnnnnnnnnnnnnnnnnnnnnnnnnnnnnnnnnnnnnnnnnnnnnnnnnnnnnnnnnnnnnnnnnnnnnnnnnnnnnnnnnnnnnnnnnnnnnnnnnnnnnnnnnnnnnnnnnnnnnnnnnnnnnnnnnnnnnnnnnnnnnnnnnnnnnnnnnnnnnnnnnnnnnnnnnnnnnnnnnnnnnnnnnnnnnnnnnnnnnnnnnnnnnnnnnnnnnnnnnnnnnnnnnnnnnnnnnnnnnnnnnnnnnnnnnnnnnnnnnnnnnnnnnnnnnnnnnnnnnnnnnnnnnnnnnnnnnnnnnnnnnnnnnnnnnnnnnnnnnnnnnnnnnnnnnnnnnnnnnnnnnnnnnnnnnnnnnnnnnnnnnnnnnnnnnnnnnnnnnnnnnnnnnnnnnnnnnnnnnnnnnnnnnnnnnnnnnnnnnnnnnnnnnnnnnnnnnnnnnnnnnnnnnnnnnnnnnnnnnnnnnnnnnnnnnnnnnnnnnnnnnnnnnnnnnnnnnnnnnnnnnnnnnnnnnnnnnnnnnnnnnnnnnnnnnnnnnnnnnnnnnnnnnnnnnnnnnnnnnnnnnnnnnnnnnnnnnnnnnnnnnnnnnnnnnnnnnnnnnnnnnnnnnnnnnnnnnnnnnnnnnnnnnnnnnnnnnnnnnnnnnnnnnnnnnnnnnnnnnnnnnnnnnnnnnnnnnnnnnnnnnnnnnnnnnnnnnnnnnnnnnnnnnnnnnnnnnnnnnnnnnnnnnnnnnnnnnnnnnnnnnnnnnnnnnnnnnnnnnnnnnnnnnnnnnnnnnnnnnnnnnnnnnnnnnnnnnnnnnnnnnnnnnnnnnnnnnnnnnnnnnnnnnnnnnnnnnnnnnnnnnnnnnnnnnnnnnnnnnnnnnnnnnnnnnnnnnnnnnnnnnnnnnnnnnnnnnnnnnnnnnnnnnnnnnnnnnnnnnnnnnnnnnnnnnnnnnnnnnnnnnnnnnnnnnnnnnnnnnnnnnnnnnnnnnnnnnnnnnnnnnnnnnnnnnnnnnnnnnnnnnnnnnnnnnnnnnnnnnnnnnnnnnnnnnnnnnnnnnnnnnnnnnnnnnnnnnnnnnnnnnnnnnnnnnnnnnnnnnnnnnnnnnnnnnnnnnnnnnnnnnnnnnnnnnnnnnnnnnnnnnnnnnnnnnnnnnnnnnnnnnnnnnnnnnnnnnnnnnnnnnnnnnnnnnnnnnnnnnnnnnnnnnnnnnnnnnnnnnnnnnnnnnnnnnnnnnnnnnnnnnnnnnnnnnnnnnnnnnnnnnnnnnnnnnnnnnnnnnnnnnnnnnnnnnnnnnnnnnnnnnnnnnnnnnnnnnnnnnnnnnnnnnnnnnnnnnnnnnnnnnnnnnnnnnnnnnnnnnnnnnnnnnnnnnnnnnnnnnnnnnnnnnnnnnnnnnnnnnnnnnnnnnnnnnnnnnnnnnnnnnnnnnnnnnnnnnnnnnnnnnnnnnnnnnnnnnnnnnnnnnnnnnnnnnnnnnnnnnnnnnnnnnnnnnnnnnnnnnnnnnnnnnnnnnnnnnnnnnnnnnnnnnnnnnnnnnnnnnnnnnnnnnnnnnnnnnnnnnnnnnnnnnnnnnnnnnnnnnnnnnnnnnnnnnnnnnnnnnnnnnnnnnnnnnnnnnnnnnnnnnnnnnnnnnnnnnnnnnnnnnnnnnnnnnnnnnnnnnnnnnnnnnnnnnnnnnnnnnnnnnnnnnnnnnnnnnnnnnnnnnnnnnnnnnnnnnnnnnnnnnnnnnnnnnnnnnnnnnnnnnnnnnnnnnnnnnnnnnnnnnnnnnnnnnnnnnnnnnnnnnnnnnnnnnnnnnnnnnnnnnnnnnnnnnnnnnnnnnnnnnnnnnnnnnnnnnnnnnnnnnnnnnnnnnnnnnnnnnnnnnnnnnnnnnnnnnnnnnnnnnnnnnnnnnnnnnnnnnnnnnnnnnnnnnnnnnnnnnnnnnnnnnnnnnnnnnnnnnnnnnnnnnnnnnnnnnnnnnnnnnnnnnnnnnnnnnnnnnnnnnnnnnnnnnnnnnnnnnnnnnnnnnnnnnnnnnnnnnnnnnnnnnnnnnnnnnnnnnnnnnnnnnnnnnnnnnnnnnnnnnnnnnnnnnnnnnnnnnnnnnnnnnnnnnnnnnnnnnnnnnnnnnnnnnnnnnnnnnnnnnnnnnnnnnnnnnnnnnnnnnnnnnnnnnnnnnnnnnnnnnnnnnnnnnnnnnnnnnnnnnnnnnnnnnnnnnnnnnnnnnnnnnnnnnnnnnnnnnnnnnnnnnnnnnnnnnnnnnnnnnnnnnnnnnnnnnnnnnnnnnnnnnnnnnnnnnnnnnnnnnnnnnnnnnnnnnnnnnnnnnnnnnnnnnnnnnnnnnnnnnnnnnnnnnnnnnnnnnnnnnnnnnnnnnnnnnnnnnnnnnnnnnnnnnnnnnnnnnnnnnnnnnnnnnnnnnnnnnnnnnnnnnnnnnnnnnnnnnnnnnnnnnnnnnnnnnnnnnnnnnnnnnnnnnnnnnnnnnnnnnnnnnnnnnnnnnnnnnnnnnnnnnnnnnnnnnnnnnnnnnnnnnnnnnnnnnnnnnnnnnnnnnnnnnnnnnnnnnnnnnnnnnnnnnnnnnnnnnnnnnnnnnnnnnnnnnnnnnnnnnnnnnnnnnnnnnnnnnnnnnnnnnnnnnnnnnnnnnnnnnnnnnnnnnnnnnnnnnnnnnnnnnnnnnnnnnnnnnnnnnnnnnnnnnnnnnnnnnnnnnnnnnnnnnnnnnnnnnnnnnnnnnnnnnnnnnnnnnnnnnnnnnnnnnnnnnnnnnnnnnnnnnnnnnnnnnnnnnnnnnnnnnnnnnnnnnnnnnnnnnnnnnnnnnnnnnnnnnnnnnnnnnnnnnnnnnnnnnnnnnnnnnnnnnnnnnnnnnnnnnnnnnnnnnnnnnnnnnnnnnnnnnnnnnnnnnnnnnnnnnnnnnnnnnnnnnnnnnnnnnnnnnnnnnnnnnnnnnnnnnnnnnnnnnnnnnnnnnnnnnnnnnnnnnnnnnnnnnnnnnnnnnnnnnnnnnnnnnnnnnnnnnnnnnnnnnnnnnnnnnnnnnnnnnnnnnnnnnnnnnnnnnnnnnnnnnnnnnnnnnnnnnnnnnnnnnnnnnnnnnnnnnnnnnnnnnnnnnnnnnnnnnnnnnnnnnnnnnnnnnnnnnnnnnnnnnnnnnnnnnnnnnnnnnnnnnnnnnnnnnnnnnnnnnnnnnnnnnnnnnnnnnnnnnnnnnnnnnnnnnnnnnnnnnnnnnnnnnnnnnnnnnnnnnnnnnnnnnnnnnnnnnnnnnnnnnnnnnnnnnnnnnnnnnnnnnnnnnnnnnnnnnnnnnnnnnnnnnnnnnnnnnnnnnnnnnnnnnnnnnnnnnnnnnnnnnnnnnnnnnnnnnnnnnnnnnnnnnnnnnnnnnnnnnnnnnnnnnnnnnnnnnnnnnnnnnnnnnnnnnnnnnnnnnnnnnnnnnnnnnnnnnnnnnnnnnnnnnnnnnnnnnnnnnnnnnnnnnnnnnnnnnnnnnnnnnnnnnnnnnnnnnnnnnnnnnnnnnnnnnnnnnnnnnnnnnnnnnnnnnnnnnnnnnnnnnnnnnnnnnnnnnnnnnnnnnnnnnnnnnnnnnnnnnnnnnnnnnnnnnnnnnnnnnnnnnnnnnnnnnnnnnnnnnnnnnnnnnnnnnnnnnnnnnnnnnnnnnnnnnnnnnnnnnnnnnnnnnnnnnnnnnnnnnnnnnnnnnnnnnnnnnnnnnnnnnnnnnnnnnnnnnnnnnnnnnnnnnnnnnnnnnnnnnnnnnnnnnnnnnnnnnnnnnnnnnnnnnnnnnnnnnnnnnnnnnnnnnnnnnnnnnnnnnnnnnnnnnnnnnnnnnnnnnnnnnnnnnnnnnnnnnnnnnnnnnnnnnnnnnnnnnnnnnnnnnnnnnnnnnnnnnnnnnnnnnnnnnnnnnnnnnnnnnnnnnnnnnnnnnnnnnnnnnnnnnnnnnnnnnnnnnnnnnnnnnnnnnnnnnnnnnnnnnnnnnnnnnnnnnnnnnnnnnnnnnnnnnnnnnnnnnnnnnnnnnnnnnnnnnnnnnnnnnnnnnnnnnnnnnnnnnnnnnnnnnnnnnnnnnnnnnnnnnnnnnnnnnnnnnnnnnnnnnnnnnnnnnnnnnnnnnnnnnnnnnnnnnnnnnnnnnnnnnnnnnnnnnnnnnnnnnnnnnnnnnnnnnnnnnnnnnnnnnnnnnnnnnnnnnnnnnnnnnnnnnnnnnnnnnnnnnnnnnnnnnnnnnnnnnnnnnnnnnnnnnnnnnnnnnnnnnnnnnnnnnnnnnnnnnnnnnnnnnnnnnnnnnnnnnnnnnnnnnnnnnnnnnnnnnnnnnnnnnnnnnnnnnnnnnnnnnnnnnnnnnnnnnnnnnnnnnnnnnnnnnnnnnnnnnnnnnnnnnnnnnnnnnnnnnnnnnnnnnnnnnnnnnnnnnnnnnnnnnnnnnnnnnnnnnnnnnnnnnnnnnnnnnnnnnnnnnnnnnnnnnnnnnnnnnnnnnnnnnnnnnnnnnnnnnnnnnnnnnnnnnnnnnnnnnnnnnnnnnnnnnnnnnnnnnnnnnnnnnnnnnnnnnnnnnnnnnnnnnnnnnnnnnnnnnnnnnnnnnnnnnnnnnnnnnnnnnnnnnnnnnnnnnnnnnnnnnnnnnnnnnnnnnnnnnnnnnnnnnnnnnnnnnnnnnnnnnnnnnnnnnnnnnnnnnnnnnnnnnnnnnnnnnnnnnnnnnnnnnnnnnnnnnnnnnnnnnnnnnnnnnnnnnnnnnnnnnnnnnnnnnnnnnnnnnnnnnnnnnnnnnnnnnnnnnnnnnnnnnnnnnnnnnnnnnnnnnnnnnnnnnnnnnnnnnnnnnnnnnnnnnnnnnnnnnnnnnnnnnnnnnnnnnnnnnnnnnnnnnnnnnnnnnnnnnnnnnnnnnnnnnnnnnnnnnnnnnnnnnnnnnnnnnnnnnnnnnnnnnnnnnnnnnnnnnnnnnnnnnnnnnnnnnnnnnnnnnnnnnnnnnnnnnnnnnnnnnnnnnnnnnnnnnnnnnnnnnnnnnnnnnnnnnnnnnnnnnnnnnnnnnnnnnnnnnnnnnnnnnnnnnnnnnnnnnnnnnnnnnnnnnnnnnnnnnnnnnnnnnnnnnnnnnnnnnnnnnnnnnnnnnnnnnnnnnnnnnnnnnnnnnnnnnnnnnnnnnnnnnnnnnnnnnnnnnnnnnnnnnnnnnnnnnnnnnnnnnnnnnnnnnnnnnnnnnnnnnnnnnnnnnnnnnnnnnnnnnnnnnnnnnnnnnnnnnnnnnnnnnnnnnnnnnnnnnnnnnnnnnnnnnnnnnnnnnnnnnnnnnnnnnnnnnnnnnnnnnnnnnnnnnnnnnnnnnnnnnnnnnnnnnnnnnnnnnnnnnnnnnnnnnnnnnnnnnnnnnnnnnnnnnnnnnnnnnnnnnnnnnnnnnnnnnnnnnnnnnnnnnnnnnnnnnnnnnnnnnnnnnnnnnnnnnnnnnnnnnnnnnnnnnnnnnnnnnnnnnnnnnnnnnnnnnnnnnnnnnnnnnnnnnnnnnnnnnnnnnnnnnnnnnnnnnnnnnnnnnnnnnnnnnnnnnnnnnnnnnnnnnnnnnnnnnnnnnnnnnnnnnnnnnnnnnnnnnnnnnnnnnnnnnnnnnnnnnnnnnnnnnnnnnnnnnnnnnnnnnnnnnnnnnnnnnnnnnnnnnnnnnnnnnnnnnnnnnnnnnnnnnnnnnnnnnnnnnnnnnnnnnnnnnnnnnnnnnnnnnnnnnnnnnnnnnnnnnnnnnnnnnnnnnnnnnnnnnnnnnnnnnnnnnnnnnnnnnnnnnnnnnnnnnnnnnnnnnnnnnnnnnnnnnnnnnnnnnnnnnnnnnnnnnnnnnnnnnnnnnnnnnnnnnnnnnnnnnnnnnnnnnnnnnnnnnnnnnnnnnnnnnnnnnnnnnnnnnnnnnnnnnnnnnnnnnnnnnnnnnnnnnnnnnnnnnnnnnnnnnnnnnnnnnnnnnnnnnnnnnnnnnnnnnnnnnnnnnnnnnnnnnnnnnnnnnnnnnnnnnnnnnnnnnnnnnnnnnnnnnnnnnnnnnnnnnnnnnnnnnnnnnnnnnnnnnnnnnnnnnnnnnnnnnnnnnnnnnnnnnnnnnnnnnnnnnnnnnnnnnnnnnnnnnnnnnnnnnnnnnnnnnnnnnnnnnnnnnnnnnnnnnnnnnnnnnnnnnnnnnnnnnnnnnnnnnnnnnnnnnnnnnnnnnnnnnnnnnnnnnnnnnnnnnnnnnnnnnnnnnnnnnnnnnnnnnnnnnnnnnnnnnnnnnnnnnnnnnnnnnnnnnnnnnnnnnnnnnnnnnnnnnnnnnnnnnnnnnnnnnnnnnnnnnnnnnnnnnnnnnnnnnnnnnnnnnnnnnnnnnnnnnnnnnnnnnnnnnnnnnnnnnnnnnnnnnnnnnnnnnnnnnnnnnnnnnnnnnnnnnnnnnnnnnnnnnnnnnnnnnnnnnnnnnnnnnnnnnnnnnnnnnnnnnnnnnnnnnnnnnnnnnnnnnnnnnnnnnnnnnnnnnnnnnnnnnnnnnnnnnnnnnnnnnnnnnnnnnnnnnnnnnnnnnnnnnnnnnnnnnnnnnnnnnnnnnnnnnnnnnnnnnnnnnnnnnnnnnnnnnnnnnnnnnnnnnnnnnnnnnnnnnnnnnnnnnnnnnnnnnnnnnnnnnnnnnnnnnnnnnnnnnnnnnnnnnnnnnnnnnnnnnnnnnnnnnnnnnnnnnnnnnnnnnnnnnnnnnnnnnnnnnnnnnnnnnnnnnnnnnnnnnnnnnnnnnnnnnnnnnnnnnnnnnnnnnnnnnnnnnnnnnnnnnnnnnnnnnnnnnnnnnnnnnnnnnnnnnnnnnnnnnnnnnnnnnnnnnnnnnnnnnnnnnnnnnnnnnnnnnnnnnnnnnnnnnnnnnnnnnnnnnnnnnnnnnnnnnnnnnnnnnnnnnnnnnnnnnnnnnnnnnnnnnnnnnnnnnnnnnnnnnnnnnnnnnnnnnnnnnnnnnnnnnnnnnnnnnnnnnnnnnnnnnnnnnnnnnnnnnnnnnnnnnnnnnnnnnnnnnnnnnnnnnnnnnnnnnnnnnnnnnnnnnnnnnnnnnnnnnnnnnnnnnnnnnnnnnnnnnnnnnnnnnnnnnnnnnnnnnnnnnnnnnnnnnnnnnnnnnnnnnnnnnnnnnnnnnnnnnnnnnnnnnnnnnnnnnnnnnnnnnnnnnnnnnnnnnnnnnnnnnnnnnnnnnnnnnnnnnnnnnnnnnnnnnnnnnnnnnnnnnnnnnnnnnnnnnnnnnnnnnnnnnnnnnnnnnnnnnnnnnnnnnnnnnnnnnnnnnnnnnnnnnnnnnnnnnnnnnnnnnnnnnnnnnnnnnnnnnnnnnnnnnnnnnnnnnnnnnnnnnnnnnnnnnnnnnnnnnnnnnnnnnnnnnnnnnnnnnnnnnnnnnnnnnnnnnnnnnnnnnnnnnnnnnnnnnnnnnnnnnnnnnnnnnnnnnnnnnnnnnnnnnnnnnnnnnnnnnnnnnnnnnnnnnnnnnnnnnnnnnnnnnnnnnnnnnnnnnnnnnnnnnnnnnnnnnnnnnnnnnnnnnnnnnnnnnnnnnnnnnnnnnnnnnnnnnnnnnnnnnnnnnnnnnnnnnnnnnnnnnnnnnnnnnnnnnnnnnnnnnnnnnnnnnnnnnnnnnnnnnnnnnnnnnnnnnnnnnnnnnnnnnnnnnnnnnnnnnnnnnnnnnnnnnnnnnnnnnnnnnnnnnnnnnnnnnnnnnnnnnnnnnnnnnnnnnnnnnnnnnnnnnnnnnnnnnnnnnnnnnnnnnnnnnnnnnnnnnnnnnnnnnnnnnnnnnnnnnnnnnnnnnnnnnnnnnnnnnnnnnnnnnnnnnnnnnnnnnnnnnnnnnnnnnnnnnnnnnnnnnnnnnnnnnnnnnnnnnnnnnnnnnnnnnnnnnnnnnnnnnnnnnnnnnnnnnnnnnnnnnnnnnnnnnnnnnnnnnnnnnnnnnnnnnnnnnnnnnnnnnnnnnnnnnnnnnnnnnnnnnnnnnnnnnnnnnnnnnnnnnnnnnnnnnnnnnnnnnnnnnnnnnnnnnnnnnnnnnnnnnnnnnnnnnnnnnnnnnnnnnnnnnnnnnnnnnnnnnnnnnnnnnnnnnnnnnnnnnnnnnnnnnnnnnnnnnnnnnnnnnnnnnnnnnnnnnnnnnnnnnnnnnnnnnnnnnnnnnnnnnnnnnnnnnnnnnnnnnnnnnnnnnnnnnnnnnnnnnnnnnnnnnnnnnnnnnnnnnnnnnnnnnnnnnnnnnnnnnnnnnnnnnnnnnnnnnnnnnnnnnnnnnnnnnnnnnnnnnnnnnnnnnnnnnnnnnnnnnnnnnnnnnnnnnnnnnnnnnnnnnnnnnnnnnnnnnnnnnnnnnnnnnnnnnnnnnnnnnnnnnnnnnnnnnnnnnnnnnnnnnnnnnnnnnnnnnnnnnnnnnnnnnnnnnnnnnnnnnnnnnnnnnnnnnnnnnnnnnnnnnnnnnnnnnnnnnnnnnnnnnnnnnnnnnnnnnnnnnnnnnnnnnnnnnnnnnnnnnnnnnnnnnnnnnnnnnnnnnnnnnnnnnnnnnnnnnnnnnnnnnnnnnnnnnnnnnnnnnnnnnnnnnnnnnnnnnnnnnnnnnnnnnnnnnnnnnnnnnnnnnnnnnnnnnnnnnnnnnnnnnnnnnnnnnnnnnnnnnnnnnnnnnnnnnnnnnnnnnnnnnnnnnnnnnnnnnnnnnnnnnnnnnnnnnnnnnnnnnnnnnnnnnnnnnnnnnnnnnnnnnnnnnnnnnnnnnnnnnnnnnnnnnnnnnnnnnnnnnnnnnnnnnnnnnnnnnnnnnnnnnnnnnnnnnnnnnnnnnnnnnnnnnnnnnnnnnnnnnnnnnnnnnnnnnnnnnnnnnnnnnnnnnnnnnnnnnnnnnnnnnnnnnnnnnnnnnnnnnnnnnnnnnnnnnnnnnnnnnnnnnnnnnnnnnnnnnnnnnnnnnnnnnnnnnnnnnnnnnnnnnnnnnnnnnnnnnnnnnnnnnnnnnnnnnnnnnnnnnnnnnnnnnnnnnnnnnnnnnnnnnnnnnnnnnnnnnnnnnnnnnnnnnnnnnnnnnnnnnnnnnnnnnnnnnnnnnnnnnnnnnnnnnnnnnnnnnnnnnnnnnnnnnnnnnnnnnnnnnnnnnnnnnnnnnnnnnnnnnnnnnnnnnnnnnnnnnnnnnnnnnnnnnnnnnnnnnnnnnnnnnnnnnnnnnnnnnnnnnnnnnnnnnnnnnnnnnnnnnnnnnnnnnnnnnnnnnnnnnnnnnnnnnnnnnnnnnnnnnnnnnnnnnnnnnnnnnnnnnnnnnnnnnnnnnnnnnnnnnnnnnnnnnnnnnnnnnnnnnnnnnnnnnnnnnnnnnnnnnnnnnnnnnnnnnnnnnnnnnnnnnnnnnnnnnnnnnnnnnnnnnnnnnnnnnnnnnnnnnnnnnnnnnnnnnnnnnnnnnnnnnnnnnnnnnnnnnnnnnnnnnnnnnnnnnnnnnnnnnnnnnnnnnnnnnnnnnnnnnnnnnnnnnnnnnnnnnnnnnnnnnnnnnnnnnnnnnnnnnnnnnnnnnnnnnnnnnnnnnnnnnnnnnnnnnnnnnnnnnnnnnnnnnnnnnnnnnnnnnnnnnnnnnnnnnnnnnnnnnnnnnnnnnnnnnnnnnnnnnnnnnnnnnnnnnnnnnnnnnnnnnnnnnnnnnnnnnnnnnnnnnnnnnnnnnnnnnnnnnnnnnnnnnnnnnnnnnnnnnnnnnnnnnnnnnnnnnnnnnnnnnnnnnnnnnnnnnnnnnnnnnnnnnnnnnnnnnnnnnnnnnnnnnnnnnnnnnnnnnnnnnnnnnnnnnnnnnnnnnnnnnnnnnnnnnnnnnnnnnnnnnnnnnnnnnnnnnnnnnnnnnnnnnnnnnnnnnnnnnnnnnnnnnnnnnnnnnnnnnnnnnnnnnnnnnnnnnnnnnnnnnnnnnnnnnnnnnnnnnnnnnnnnnnnnnnnnnnnnnnnnnnnnnnnnnnnnnnnnnnnnnnnnnnnnnnnnnnnnnnnnnnnnnnnnnnnnnnnnnnnnnnnnnnnnnnnnnnnnnnnnnnnnnnnnnnnnnnnnnnnnnnnnnnnnnnnnnnnnnnnnnnnnnnnnnnnnnnnnnnnnnnnnnnnnnnnnnnnnnnnnnnnnnnnnnnnnnnnnnnnnnnnnnnnnnnnnnnnnnnnnnnnnnnnnnnnnnnnnnnnnnnnnnnnnnnnnnnnnnnnnnnnnnnnnnnnnnnnnnnnnnnnnnnnnnnnnnnnnnnnnnnnnnnnnnnnnnnnnnnnnnnnnnnnnnnnnnnnnnnnnnnnnnnnnnnnnnnnnnnnnnnnnnnnnnnnnnnnnnnnnnnnnnnnnnnnnnnnnnnnnnnnnnnnnnnnnnnnnnnnnnnnnnnnnnnnnnnnnnnnnnnnnnnnnnnnnnnnnnnnnnnnnnnnnnnnnnnnnnnnnnnnnnnnnnnnnnnnnnnnnnnnnnnnnnnnnnnnnnnnnnnnnnnnnnnnnnnnnnnnnnnnnnnnnnnnnnnnnnnnnnnnnnnnnnnnnnnnnnnnnnnnnnnnnnnnnnnnnnnnnnnnnnnnnnnnnnnnnnnnnnnnnnnnnnnnnnnnnnnnnnnnnnnnnnnnnnnnnnnnnnnnnnnnnnnnnnnnnnnnnnnnnnnnnnnnnnnnnnnnnnnnnnnnnnnnnnnnnnnnnnnnnnnnnnnnnnnnnnnnnnnnnnnnnnnnnnnnnnnnnnnnnnnnnnnnnnnnnnnnnnnnnnnnnnnnnnnnnnnnnnnnnnnnnnnnnnnnnnnnnnnnnnnnnnnnnnnnnnnnnnnnnnnnnnnnnnnnnnnnnnnnnnnnnnnnnnnnnnnnnnnnnnnnnnnnnnnnnnnnnnnnnnnnnnnnnnnnnnnnnnnnnnnnnnnnnnnnnnnnnnnnnnnnnnnnnnnnnnnnnnnnnnnnnnnnnnnnnnnnnnnnnnnnnnnnnnnnnnnnnnnnnnnnnnnnnnnnnnnnnnnnnnnnnnnnnnnnnnnnnnnnnnnnnnnnnnnnnnnnnnnnnnnnnnnnnnnnnnnnnnnnnnnnnnnnnnnnnnnnnnnnnnnnnnnnnnnnnnnnnnnnnnnnnnnnnnnnnnnnnnnnnnnnnnnnnnnnnnnnnnnnnnnnnnnnnnnnnnnnnnnnnnnnnnnnnnnnnnnnnnnnnnnnnnnnnnnnnnnnnnnnnnnnnnnnnnnnnnnnnnnnnnnnnnnnnnnnnnnnnnnnnnnnnnnnnnnnnnnnnnnnnnnnnnnnnnnnnnnnnnnnnnnnnnnnnnnnnnnnnnnnnnnnnnnnnnnnnnnnnnnnnnnnnnnnnnnnnnnnnnnnnnnnnnnnnnnnnnnnnnnnnnnnnnnnnnnnnnnnnnnnnnnnnnnnnnnnnnnnnnnnnnnnnnnnnnnnnnnnnnnnnnnnnnnnnnnnnnnnnnnnnnnnnnnnnnnnnnnnnnnnnnnnnnnnnnnnnnnnnnnnnnnnnnnnnnnnnnnnnnnnnnnnnnnnnnnnnnnnnnnnnnnnnnnnnnnnnnnnnnnnnnnnnnnnnnnnnnnnnnnnnnnnnnnnnnnnnnnnnnnnnnnnnnnnnnnnnnnnnnnnnnnnnnnnnnnnnnnnnnnnnnnnnnnnnnnnnnnnnnnnnnnnnnnnnnnnnnnnnnnnnnnnnnnnnnnnnnnnnnnnnnnnnnnnnnnnnnnnnnnnnnnnnnnnnnnnnnnnnnnnnnnnnnnnnnnnnnnnnnnnnnnnnnnnnnnnnnnnnnnnnnnnnnnnnnnnnnnnnnnnnnnnnnnnnnnnnnnnnnnnnnnnnnnnnnnnnnnnnnnnnnnnnnnnnnnnnnnnnnnnnnnnnnnnnnnnnnnnnnnnnnnnnnnnnnnnnnnnnnnnnnnnnnnnnnnnnnnnnnnnnnnnnnnnnnnnnnnnnnnnnnnnnnnnnnnnnnnnnnnnnnnnnnnnnnnnnnnnnnnnnnnnnnnnnnnnnnnnnnnnnnnnnnnnnnnnnnnnnnnnnnnnnnnnnnnnnnnnnnnnnnnnnnnnnnnnnnnnnnnnnnnnnnnnnnnnnnnnnnnnnnnnnnnnnnnnnnnnnnngccgctgggacctcttcaagcttcaggtacagcaggagaaatatgcgccggtggcggggatgggcggggcgaccgagccgatggttgatgatgatgtctcgccggtctcaccggttaagaaggggcgtcagggccggcgcaggtaagctcccaagctaagacaaccgtgtcacagcaccatgctaaaatacaccgtgggtatcggaccacctcagctagcggtcacaaatagggccaggaggctaaagacgttgacctacaatctgcttgaaaaacagtggattcccgtcctctggacagatggcaatgtctcacgggtagggattagagaggcactaacacaagcaggttccattcgacagattgccgccagcaatccaatggaccgcgtggcgattttccggtttctgctggctctgctttactggtgccggggcgacccaccgactacgacagacactgcccccgaagaatccttcccaattgattggttttccaaactcgataccaatagagagtgtttcaatttgcttggcggtggtaagagattctatcaatacagggaacagggcgacagactactcacggttaactacctcattcacgagataccatcaggcactaactttaaccattttcggcactcgatagacggaactaaaggcttgtgtccggcatgttgtgctttgggactgctgcggctaccgatgttcgcgacacaggggggacagggcaagtcgcccggcatcaacgcaaagccgccaatctatgctattcccgtgggcgagacccttgcggagaccttgcggctttcgtggcggcaggtgtccaatttgggaacgccagcgtgggaaaagccggacttgccacttcccggggtgggagaggtaccgctactaactgggctgacgtggctcccacgccgagtttggttagacgagccgcagaaatctttgacacactgcatttcgtgtggccgtctggataatgtgatactgtccagcgtctttgctggcaaagggagtgccaagacagatgatggcactaagcgcgtctggcgtgacccgcacgttatctacaaaccagccaagaacggagaaacttcactgcattgggcagacgtaataggaagcgctgacgccggtgccgggcagtggtccaaaataatggctgggttactccagaatccccaaacggagcggaccagagcgtggatagttggcttttcgtcagaccagaataaatacttcgaggcatcggaattgtttctcccctggccaggctcattcgtttctatcgatgagctaagccaatggcaacagtcaaacaataatctaagccgaaagctgatgcagcttgacgaaaaacgatctcgaaaccatattgatatagcctcggtgctcgccgctattcgtccccacgttgaaagcagggtctttgcgaaagccgaagagttgctgtctggtgacaacacggcgtgggagcgcgcggccagcgaataccgacccatgatgcaaatcatttctaggtcattagcgcccggtgtaaccacggtagcagtcaaacgacgccgagaaatcggcaatgcactccctcaaacgggatcgacgtcgacgccagcaaagaaacccagcaaggggaaggcgaggaagtaaatgggtccaacagcgactgaggaatacattgagatcctgacgcagttgaagtccggtgacctcggcctgttgcgaatacatgccgggcagggtctggatgagtccgtccagggctttgacctgttcgccggtctatggtggccgttacagaacaagggcccgtttgcaccgcggcgggaagtagcctggctgattgccaagctttatgccttttcgcccatcccacattctaccggtgacacgctggcttgccaattgcgtcgttgtcaaccagacgacgagaacagccgaaggcgatttcaacagaaattcgatgaaatgttgcttatgccgttggctagtattgagccagccctgcgatgggcgctggcccaggtagccgatactggcaaaccgcttgattgggtaagactgacgaatgacctgtcaatatgggaacgtgaagcaacccgcctgaagtgggcggaggaatttcttggtaactaaggaggataatagcaatgctgattgaagtccacatgattcagaaccacagtccggccaatctgaaccgggatgacctgggtgcgcccaagacctgctacttcggcggtgtgctccgttcgcgcatctccagccagtgcctcaagcgcagcatccgcatgagcgatgagttcaaagcattactcaatggcgtccgcacacggcagttggcgaaattgatcgccaggggtactaaaggagacccgtttgatgaaaaagtacaagccgaccccaaagtcgtagagaaggccgagaagatcctttccgattgtggtttcaagccaaagaaggacgcggacaggagcaagatgctggtctacaccacgcgtgacgccataaaggagatgtccgcacttttagggaacggcggcgagaaaaacgacgccgtacttgcaaaggatttttccaggctaatcgccgaacgcgtctttgcaccggatatggcactgtcagggagaatgctggaaccttcggaggccagcgacttgtggaaagaccttgatactactgtagaggcggctttgcaggttgcacatgccttctccacgcacgaggcccgtcccgaagtagactattacgtcgccgcagatgacatccccggtactgatgcgggcgcaggctacgttgacgaagccatgtttacctccgcctgtttttacaagtacttttccatccactgggaacagttgctcaagaatctgggcggcgagatcaacctggcggcccacaccgtcggggcattccttcgcggggcggcggtggtcaccccaaccggcaagcagaacagcttcgcagcacacaattacccggatggcatactggttgagattcgcaatacgcctgttaactatgccaatgcttttgctcgaccggttgttcgagatgggcgggacattatctcccagagcatcgcccagctgggccagtacgtccatgatctggacaccggttttggcccgccacaacagcgcttctggttttctcctaacctgcggtatcccttgactgccagaacaaaggtaaaggaaggagaaagggaggtcgaaaaggacatcgacctgacagggaacaaagtcaagtctctggacgaattgataccggcggtggtcagcgccatcggctgtaactgggaagaagccaagaaagctatcataaatctatcggtgtcagcatgatggccaataccctgtttttacggttcgagggtccacttcaggcgtggggcaaccacgagtccaaatttgttgtccggcgcaccgctgaagctccaactaaatcaggggttatcggactgctctgcgcggcgctcggcataccacggtcagccgccgctgaaacatggcttccgaagctgtctgccctgaaaatgggtgtccgtatcgacagcccgggcgttcgctggtgggactatcacactgtcggcgccaggattggcatgcggaaagctgacggtggcttcaagaagcctgaatcaggaaaggagactttactcacccgccgtgaatacttgtgtgacgccagttttctcgttgcgctacagggcgatgccacactggttacggaactaggaacggcgataacgaacccaaaatggacactttacctcggccgcaaatgctgtcccccgtcacgcccgctgctggaacaccccgccggtgatttccctgacttactttcggcgctccaatcagtcccatggcgaaagcggctgaaggacgacccaccgcaagaaaccgttgattgcctgcttgactggcttccgacgccgcaacagcctgtagcaccaactgatgcgctcgtgtggtacgatgtcccgctcacgttagacccgccttcccattctccccgctttgttattcgacgaaaactacgggttggtaccgaggttagtatcgcagaaaagccggcgcaaagcgagactcccagacccctccgacttcgtgctgactatcagaacactgaatataagaaggctcgcgccacgcgtttaagagcagactatggcctttgtgttttctgcaaggcacccgccaccaccgtccagcacatcacctaccgccgcgctggcggcggggaaactcacgatgacctgcgctcgctgtgccgcctctgtcacgacgcggtcactatgattgaatacggtctggacatgggcttagatcgcattaaccccgaagaccccaaatggcgggatgaaatcattcagaaacggggtgaaatcatctgttttcgctcgttggagacccgccgccgtcgcctcagtccggaggaggtggaatagccatgtatctttcgtgccttcttgtcaatacgggggacaaccccgaccgccctcatcccggacgactgtggttacggaacgtgtaccgtgtacatcagcgcctttgcatgggcttcccctcggcggaatctaaggaacatgacccgcttttcttaaaaccatataagcccggccgctttccggaagaccgttacctgtctgacagaaagaagctggaggtgcctgacgatgtcctcaggcaaattcactcaccgcgagataaccgcagtggctttctcttccgcatagacccgctgccctcaggccgcgccatgataatcgtacaatcagcggtcaaaccggactgggactatgcctttcgtaatgctatgcacttgcttgccgcaacgcctgcaattaagccatatgacccgcattttcagaacggacagtgtctcgtttttcggctgttggctaaccctacccgcaagagggacagggaaaaccggcccgcaggcaggaataactggggcaggagagtcccagtacctcgtaatgaaattgaagcgtggctcaccagccgtgccggccggtatggatttagcgtggagtgcttcgataacgtgcaaacagggtatgttgtagcttccaaaggcaaggagatagatggtagcagtgagattgccgacgatgaagaagcaaaagggaggttgaggcactttttctatgcgcgttacgaaggcaaactccgtgtaaccgccgctgattctctccgcagtgcaattatacagggtatcggccccgccaagggcttcggcttcggattgctgtccgtagcccggtcaagggagtgagttgtgcgcaccctttatgagcttccgcattttaaggaccgctggagctatctttatctggaaatgggccgtctcgacgtcagtgacaatgggttgagtttccatcagggtgattcggtaacgccggtgccgatcgaccagctaagcgtggtgatgctcggtccggggtcaaccattacgcacgctgccgtgaaatcgctctcccagaataactgcttactcgcctggactggacaggacggcattcgtttttattcggcgggtatcggtggtacatatagctcccggagacttatttggcaggcgcggttggccagtgatgaatcaaagaggctggaagtcgcctggcgcatgtataattttcgtttcaagaagcccgtaccaaccatcgtcagccttgaggagatccgcggtatggagggaatccgggttaggcgggcctatgccgaggcttcagccaagtacggcgttgagtggaaaggacggcgctatgaccagaaagactgggccaaaggtgacccggtaaatcgggcgctttcggcggccaatgcctgcctttacgccgtctgccatgccgcgatactgtctgcaggctactccccggggctgggctttattcataccggcaggatgctgagcttcgtctatgacatcggggacctgtacaagactgagacaacgattccgattgctttcaaggttgccgcacgggccccgcaggacattgaaagggcggtacgtacggagtgccgccaggcgttttacgacttcaaactaatggaacgaatcttacctgatattgcggaggtgctcggtgttagtgatgatactggagaaagtgccgacgagcttgaggggcgcattgtcacggtggcttctggaaccgaggacgggagttttcctgggcaatccgagtgcgagagtcagggacgagctctgggcacggtcgctcaaaaataccagggaaagcgggacgatattgcaggtctggacggacaagaatccgcagggattttcctatcgtcaggcaggcaaccactggcggcaattggtcgacttcgaaggattagccctggtaagtataaggtcgcgcgacgccgggccggaggaggcaatgcattccgataaccgaccttagtgagcgtgagtcagcgaacacaggcacatgggcgttgacactggaatgcctcaaccacctttgaggtagttagggcttggctttgaacttctagggtcttccccacgcatgtgggggtgaaccgctaccacatccttaaaaatactagcacgccctgtcttccccacgcatgtgggggtgaaccgtacgagaggcggcgcaagaaggatcagctcaagtcttccccacgcatgtgggggtgaaccggatttgctggtcgatgggtataggcctgaggaagtcttccccacgcatgtgggggtgaaccggtggcgcagtggatagccgaccgggtgctggcgtcttccccacgcatgtgggggtgaaccgacatgtttgccgtgggtcgattggcgggtgacgtcttccccacgcatgtgggggtgaaccgcgcactcgcgatgggtcaccaccaatattcgcgtcttccccacgcatgtgggggtgaaccagtatcggatcccatatatttcggggaccaaccgtcttccccacgcatgtgggggtgaaccggtgtgtggtcgctggaggcgcagcggaatggagtcttccccacgcatgtgggggtgaaccgcgcactcgcgatgggtcaccaccaatattcgcgtcttccccacgcatgtgggggtgaaccgacacgcggcacgagcgatattgatgagatatcgtcttccccacgcatgtgggggtgaaccggcgacgacgccaatcaccacagtgaccagtccgtcttccccacgcatgtgggggtgaaccgtaaacgcttacttacattggtcgaaagtaaacgtcttccccacgcatgtgggggtgaaccgacacgcggcacgagcgatattgatgagatatcgtcttccccacgcatgtgggggtgaaccgcgttacttcccgcataagcgggtgctgcgggagtcttccccacgcatgtgggggtgaaccgggtaaggtgcgctcagcaactgtaattgacggcgtcttccccacgcatgtgggggtgaaccgtaccgtctcggtggaggcggcgggctgctcggtcttccccacgcatgtgggggtgaaccgatgttgatccggatgtcgtttccggatttaccgtcttccccacgcatgtgggggtgaaccggctaggccgactatatgccagctcagccagtcgtcttccccacgcatgtgggggtgaaccgttcactgggtccacaaagttcactgggtccatgtcttccccacgcatgtgggggtgaaccgccagttttcaagcgtgttaggtctgctaaaacgtcttccccacgcatgtgggggtgaaccgaccagctcaatcccttcgactacgtgcaggctgtcttccccacgcatgtgggggtgaaccgttcactgggtccacaaagttcactgggtccacgtcttccccacgcatgtgggggtgaaccgccagttttcaagcgtgttaggtctgctaaaacgtcttccccacgcatgtgggggtgaaccg

SEQ ID NO: 1096 - DNA, 103709 bp, Artificial Sequence
  Synthetic Oligonucleotide
  misc_feature (1)..(95823): n is a, c, g, or t
nnnnnnnnnnnnnnnnnnnnnnnnnnnnnnnnnnnnnnnnnnnnnnnnnnnnnnnnnnnnnnnnnnnnnnnnnnnnnnnnnnnnnnnnnnnnnnnnnnnnnnnnnnnnnnnnnnnnnnnnnnnnnnnnnnnnnnnnnnnnnnnnnnnnnnnnnnnnnnnnnnnnnnnnnnnnnnnnnnnnnnnnnnnnnnnnnnnnnnnnnnnnnnnnnnnnnnnnnnnnnnnnnnnnnnnnnnnnnnnnnnnnnnnnnnnnnnnnnnnnnnnnnnnnnnnnnnnnnnnnnnnnnnnnnnnnnnnnnnnnnnnnnnnnnnnnnnnnnnnnnnnnnnnnnnnnnnnnnnnnnnnnnnnnnnnnnnnnnnnnnnnnnnnnnnnnnnnnnnnnnnnnnnnnnnnnnnnnnnnnnnnnnnnnnnnnnnnnnnnnnnnnnnnnnnnnnnnnnnnnnnnnnnnnnnnnnnnnnnnnnnnnnnnnnnnnnnnnnnnnnnnnnnnnnnnnnnnnnnnnnnnnnnnnnnnnnnnnnnnnnnnnnnnnnnnnnnnnnnnnnnnnnnnnnnnnnnnnnnnnnnnnnnnnnnnnnnnnnnnnnnnnnnnnnnnnnnnnnnnnnnnnnnnnnnnnnnnnnnnnnnnnnnnnnnnnnnnnnnnnnnnnnnnnnnnnnnnnnnnnnnnnnnnnnnnnnnnnnnnnnnnnnnnnnnnnnnnnnnnnnnnnnnnnnnnnnnnnnnnnnnnnnnnnnnnnnnnnnnnnnnnnnnnnnnnnnnnnnnnnnnnnnnnnnnnnnnnnnnnnnnnnnnnnnnnnnnnnnnnnnnnnnnnnnnnnnnnnnnnnnnnnnnnnnnnnnnnnnnnnnnnnnnnnnnnnnnnnnnnnnnnnnnnnnnnnnnnnnnnnnnnnnnnnnnnnnnnnnnnnnnnnnnnnnnnnnnnnnnnnnnnnnnnnnnnnnnnnnnnnnnnnnnnnnnnnnnnnnnnnnnnnnnnnnnnnnnnnnnnnnnnnnnnnnnnnnnnnnnnnnnnnnnnnnnnnnnnnnnnnnnnnnnnnnnnnnnnnnnnnnnnnnnnnnnnnnnnnnnnnnnnnnnnnnnnnnnnnnnnnnnnnnnnnnnnnnnnnnnnnnnnnnnnnnnnnnnnnnnnnnnnnnnnnnnnnnnnnnnnnnnnnnnnnnnnnnnnnnnnnnnnnnnnnnnnnnnnnnnnnnnnnnnnnnnnnnnnnnnnnnnnnnnnnnnnnnnnnnnnnnnnnnnnnnnnnnnnnnnnnnnnnnnnnnnnnnnnnnnnnnnnnnnnnnnnnnnnnnnnnnnnnnnnnnnnnnnnnnnnnnnnnnnnnnnnnnnnnnnnnnnnnnnnnnnnnnnnnnnnnnnnnnnnnnnnnnnnnnnnnnnnnnnnnnnnnnnnnnnnnnnnnnnnnnnnnnnnnnnnnnnnnnnnnnnnnnnnnnnnnnnnnnnnnnnnnnnnnnnnnnnnnnnnnnnnnnnnnnnnnnnnnnnnnnnnnnnnnnnnnnnnnnnnnnnnnnnnnnnnnnnnnnnnnnnnnnnnnnnnnnnnnnnnnnnnnnnnnnnnnnnnnnnnnnnnnnnnnnnnnnnnnnnnnnnnnnnnnnnnnnnnnnnnnnnnnnnnnnnnnnnnnnnnnnnnnnnnnnnnnnnnnnnnnnnnnnnnnnnnnnnnnnnnnnnnnnnnnnnnnnnnnnnnnnnnnnnnnnnnnnnnnnnnnnnnnnnnnnnnnnnnnnnnnnnnnnnnnnnnnnnnnnnnnnnnnnnnnnnnnnnnnnnnnnnnnnnnnnnnnnnnnnnnnnnnnnnnnnnnnnnnnnnnnnnnnnnnnnnnnnnnnnnnnnnnnnnnnnnnnnnnnnnnnnnnnnnnnnnnnnnnnnnnnnnnnnnnnnnnnnnnnnnnnnnnnnnnnnnnnnnnnnnnnnnnnnnnnnnnnnnnnnnnnnnnnnnnnnnnnnnnnnnnnnnnnnnnnnnnnnnnnnnnnnnnnnnnnnnnnnnnnnnnnnnnnnnnnnnnnnnnnnnnnnnnnnnnnnnnnnnnnnnnnnnnnnnnnnnnnnnnnnnnnnnnnnnnnnnnnnnnnnnnnnnnnnnnnnnnnnnnnnnnnnnnnnnnnnnnnnnnnnnnnnnnnnnnnnnnnnnnnnnnnnnnnnnnnnnnnnnnnnnnnnnnnnnnnnnnnnnnnnnnnnnnnnnnnnnnnnnnnnnnnnnnnnnnnnnnnnnnnnnnnnnnnnnnnnnnnnnnnnnnnnnnnnnnnnnnnnnnnnnnnnnnnnnnnnnnnnnnnnnnnnnnnnnnnnnnnnnnnnnnnnnnnnnnnnnnnnnnnnnnnnnnnnnnnnnnnnnnnnnnnnnnnnnnnnnnnnnnnnnnnnnnnnnnnnnnnnnnnnnnnnnnnnnnnnnnnnnnnnnnnnnnnnnnnnnnnnnnnnnnnnnnnnnnnnnnnnnnnnnnnnnnnnnnnnnnnnnnnnnnnnnnnnnnnnnnnnnnnnnnnnnnnnnnnnnnnnnnnnnnnnnnnnnnnnnnnnnnnnnnnnnnnnnnnnnnnnnnnnnnnnnnnnnnnnnnnnnnnnnnnnnnnnnnnnnnnnnnnnnnnnnnnnnnnnnnnnnnnnnnnnnnnnnnnnnnnnnnnnnnnnnnnnnnnnnnnnnnnnnnnnnnnnnnnnnnnnnnnnnnnnnnnnnnnnnnnnnnnnnnnnnnnnnnnnnnnnnnnnnnnnnnnnnnnnnnnnnnnnnnnnnnnnnnnnnnnnnnnnnnnnnnnnnnnnnnnnnnnnnnnnnnnnnnnnnnnnnnnnnnnnnnnnnnnnnnnnnnnnnnnnnnnnnnnnnnnnnnnnnnnnnnnnnnnnnnnnnnnnnnnnnnnnnnnnnnnnnnnnnnnnnnnnnnnnnnnnnnnnnnnnnnnnnnnnnnnnnnnnnnnnnnnnnnnnnnnnnnnnnnnnnnnnnnnnnnnnnnnnnnnnnnnnnnnnnnnnnnnnnnnnnnnnnnnnnnnnnnnnnnnnnnnnnnnnnnnnnnnnnnnnnnnnnnnnnnnnnnnnnnnnnnnnnnnnnnnnnnnnnnnnnnnnnnnnnnnnnnnnnnnnnnnnnnnnnnnnnnnnnnnnnnnnnnnnnnnnnnnnnnnnnnnnnnnnnnnnnnnnnnnnnnnnnnnnnnnnnnnnnnnnnnnnnnnnnnnnnnnnnnnnnnnnnnnnnnnnnnnnnnnnnnnnnnnnnnnnnnnnnnnnnnnnnnnnnnnnnnnnnnnnnnnnnnnnnnnnnnnnnnnnnnnnnnnnnnnnnnnnnnnnnnnnnnnnnnnnnnnnnnnnnnnnnnnnnnnnnnnnnnnnnnnnnnnnnnnnnnnnnnnnnnnnnnnnnnnnnnnnnnnnnnnnnnnnnnnnnnnnnnnnnnnnnnnnnnnnnnnnnnnnnnnnnnnnnnnnnnnnnnnnnnnnnnnnnnnnnnnnnnnnnnnnnnnnnnnnnnnnnnnnnnnnnnnnnnnnnnnnnnnnnnnnnnnnnnnnnnnnnnnnnnnnnnnnnnnnnnnnnnnnnnnnnnnnnnnnnnnnnnnnnnnnnnnnnnnnnnnnnnnnnnnnnnnnnnnnnnnnnnnnnnnnnnnnnnnnnnnnnnnnnnnnnnnnnnnnnnnnnnnnnnnnnnnnnnnnnnnnnnnnnnnnnnnnnnnnnnnnnnnnnnnnnnnnnnnnnnnnnnnnnnnnnnnnnnnnnnnnnnnnnnnnnnnnnnnnnnnnnnnnnnnnnnnnnnnnnnnnnnnnnnnnnnnnnnnnnnnnnnnnnnnnnnnnnnnnnnnnnnnnnnnnnnnnnnnnnnnnnnnnnnnnnnnnnnnnnnnnnnnnnnnnnnnnnnnnnnnnnnnnnnnnnnnnnnnnnnnnnnnnnnnnnnnnnnnnnnnnnnnnnnnnnnnnnnnnnnnnnnnnnnnnnnnnnnnnnnnnnnnnnnnnnnnnnnnnnnnnnnnnnnnnnnnnnnnnnnnnnnnnnnnnnnnnnnnnnnnnnnnnnnnnnnnnnnnnnnnnnnnnnnnnnnnnnnnnnnnnnnnnnnnnnnnnnnnnnnnnnnnnnnnnnnnnnnnnnnnnnnnnnnnnnnnnnnnnnnnnnnnnnnnnnnnnnnnnnnnnnnnnnnnnnnnnnnnnnnnnnnnnnnnnnnnnnnnnnnnnnnnnnnnnnnnnnnnnnnnnnnnnnnnnnnnnnnnnnnnnnnnnnnnnnnnnnnnnnnnnnnnnnnnnnnnnnnnnnnnnnnnnnnnnnnnnnnnnnnnnnnnnnnnnnnnnnnnnnnnnnnnnnnnnnnnnnnnnnnnnnnnnnnnnnnnnnnnnnnnnnnnnnnnnnnnnnnnnnnnnnnnnnnnnnnnnnnnnnnnnnnnnnnnnnnnnnnnnnnnnnnnnnnnnnnnnnnnnnnnnnnnnnnnnnnnnnnnnnnnnnnnnnnnnnnnnnnnnnnnnnnnnnnnnnnnnnnnnnnnnnnnnnnnnnnnnnnnnnnnnnnnnnnnnnnnnnnnnnnnnnnnnnnnnnnnnnnnnnnnnnnnnnnnnnnnnnnnnnnnnnnnnnnnnnnnnnnnnnnnnnnnnnnnnnnnnnnnnnnnnnnnnnnnnnnnnnnnnnnnnnnnnnnnnnnnnnnnnnnnnnnnnnnnnnnnnnnnnnnnnnnnnnnnnnnnnnnnnnnnnnnnnnnnnnnnnnnnnnnnnnnnnnnnnnnnnnnnnnnnnnnnnnnnnnnnnnnnnnnnnnnnnnnnnnnnnnnnnnnnnnnnnnnnnnnnnnnnnnnnnnnnnnnnnnnnnnnnnnnnnnnnnnnnnnnnnnnnnnnnnnnnnnnnnnnnnnnnnnnnnnnnnnnnnnnnnnnnnnnnnnnnnnnnnnnnnnnnnnnnnnnnnnnnnnnnnnnnnnnnnnnnnnnnnnnnnnnnnnnnnnnnnnnnnnnnnnnnnnnnnnnnnnnnnnnnnnnnnnnnnnnnnnnnnnnnnnnnnnnnnnnnnnnnnnnnnnnnnnnnnnnnnnnnnnnnnnnnnnnnnnnnnnnnnnnnnnnnnnnnnnnnnnnnnnnnnnnnnnnnnnnnnnnnnnnnnnnnnnnnnnnnnnnnnnnnnnnnnnnnnnnnnnnnnnnnnnnnnnnnnnnnnnnnnnnnnnnnnnnnnnnnnnnnnnnnnnnnnnnnnnnnnnnnnnnnnnnnnnnnnnnnnnnnnnnnnnnnnnnnnnnnnnnnnnnnnnnnnnnnnnnnnnnnnnnnnnnnnnnnnnnnnnnnnnnnnnnnnnnnnnnnnnnnnnnnnnnnnnnnnnnnnnnnnnnnnnnnnnnnnnnnnnnnnnnnnnnnnnnnnnnnnnnnnnnnnnnnnnnnnnnnnnnnnnnnnnnnnnnnnnnnnnnnnnnnnnnnnnnnnnnnnnnnnnnnnnnnnnnnnnnnnnnnnnnnnnnnnnnnnnnnnnnnnnnnnnnnnnnnnnnnnnnnnnnnnnnnnnnnnnnnnnnnnnnnnnnnnnnnnnnnnnnnnnnnnnnnnnnnnnnnnnnnnnnnnnnnnnnnnnnnnnnnnnnnnnnnnnnnnnnnnnnnnnnnnnnnnnnnnnnnnnnnnnnnnnnnnnnnnnnnnnnnnnnnnnnnnnnnnnnnnnnnnnnnnnnnnnnnnnnnnnnnnnnnnnnnnnnnnnnnnnnnnnnnnnnnnnnnnnnnnnnnnnnnnnnnnnnnnnnnnnnnnnnnnnnnnnnnnnnnnnnnnnnnnnnnnnnnnnnnnnnnnnnnnnnnnnnnnnnnnnnnnnnnnnnnnnnnnnnnnnnnnnnnnnnnnnnnnnnnnnnnnnnnnnnnnnnnnnnnnnnnnnnnnnnnnnnnnnnnnnnnnnnnnnnnnnnnnnnnnnnnnnnnnnnnnnnnnnnnnnnnnnnnnnnnnnnnnnnnnnnnnnnnnnnnnnnnnnnnnnnnnnnnnnnnnnnnnnnnnnnnnnnnnnnnnnnnnnnnnnnnnnnnnnnnnnnnnnnnnnnnnnnnnnnnnnnnnnnnnnnnnnnnnnnnnnnnnnnnnnnnnnnnnnnnnnnnnnnnnnnnnnnnnnnnnnnnnnnnnnnnnnnnnnnnnnnnnnnnnnnnnnnnnnnnnnnnnnnnnnnnnnnnnnnnnnnnnnnnnnnnnnnnnnnnnnnnnnnnnnnnnnnnnnnnnnnnnnnnnnnnnnnnnnnnnnnnnnnnnnnnnnnnnnnnnnnnnnnnnnnnnnnnnnnnnnnnnnnnnnnnnnnnnnnnnnnnnnnnnnnnnnnnnnnnnnnnnnnnnnnnnnnnnnnnnnnnnnnnnnnnnnnnnnnnnnnnnnnnnnnnnnnnnnnnnnnnnnnnnnnnnnnnnnnnnnnnnnnnnnnnnnnnnnnnnnnnnnnnnnnnnnnnnnnnnnnnnnnnnnnnnnnnnnnnnnnnnnnnnnnnnnnnnnnnnnnnnnnnnnnnnnnnnnnnnnnnnnnnnnnnnnnnnnnnnnnnnnnnnnnnnnnnnnnnnnnnnnnnnnnnnnnnnnnnnnnnnnnnnnnnnnnnnnnnnnnnnnnnnnnnnnnnnnnnnnnnnnnnnnnnnnnnnnnnnnnnnnnnnnnnnnnnnnnnnnnnnnnnnnnnnnnnnnnnnnnnnnnnnnnnnnnnnnnnnnnnnnnnnnnnnnnnnnnnnnnnnnnnnnnnnnnnnnnnnnnnnnnnnnnnnnnnnnnnnnnnnnnnnnnnnnnnnnnnnnnnnnnnnnnnnnnnnnnnnnnnnnnnnnnnnnnnnnnnnnnnnnnnnnnnnnnnnnnnnnnnnnnnnnnnnnnnnnnnnnnnnnnnnnnnnnnnnnnnnnnnnnnnnnnnnnnnnnnnnnnnnnnnnnnnnnnnnnnnnnnnnnnnnnnnnnnnnnnnnnnnnnnnnnnnnnnnnnnnnnnnnnnnnnnnnnnnnnnnnnnnnnnnnnnnnnnnnnnnnnnnnnnnnnnnnnnnnnnnnnnnnnnnnnnnnnnnnnnnnnnnnnnnnnnnnnnnnnnnnnnnnnnnnnnnnnnnnnnnnnnnnnnnnnnnnnnnnnnnnnnnnnnnnnnnnnnnnnnnnnnnnnnnnnnnnnnnnnnnnnnnnnnnnnnnnnnnnnnnnnnnnnnnnnnnnnnnnnnnnnnnnnnnnnnnnnnnnnnnnnnnnnnnnnnnnnnnnnnnnnnnnnnnnnnnnnnnnnnnnnnnnnnnnnnnnnnnnnnnnnnnnnnnnnnnnnnnnnnnnnnnnnnnnnnnnnnnnnnnnnnnnnnnnnnnnnnnnnnnnnnnnnnnnnnnnnnnnnnnnnnnnnnnnnnnnnnnnnnnnnnnnnnnnnnnnnnnnnnnnnnnnnnnnnnnnnnnnnnnnnnnnnnnnnnnnnnnnnnnnnnnnnnnnnnnnnnnnnnnnnnnnnnnnnnnnnnnnnnnnnnnnnnnnnnnnnnnnnnnnnnnnnnnnnnnnnnnnnnnnnnnnnnnnnnnnnnnnnnnnnnnnnnnnnnnnnnnnnnnnnnnnnnnnnnnnnnnnnnnnnnnnnnnnnnnnnnnnnnnnnnnnnnnnnnnnnnnnnnnnnnnnnnnnnnnnnnnnnnnnnnnnnnnnnnnnnnnnnnnnnnnnnnnnnnnnnnnnnnnnnnnnnnnnnnnnnnnnnnnnnnnnnnnnnnnnnnnnnnnnnnnnnnnnnnnnnnnnnnnnnnnnnnnnnnnnnnnnnnnnnnnnnnnnnnnnnnnnnnnnnnnnnnnnnnnnnnnnnnnnnnnnnnnnnnnnnnnnnnnnnnnnnnnnnnnnnnnnnnnnnnnnnnnnnnnnnnnnnnnnnnnnnnnnnnnnnnnnnnnnnnnnnnnnnnnnnnnnnnnnnnnnnnnnnnnnnnnnnnnnnnnnnnnnnnnnnnnnnnnnnnnnnnnnnnnnnnnnnnnnnnnnnnnnnnnnnnnnnnnnnnnnnnnnnnnnnnnnnnnnnnnnnnnnnnnnnnnnnnnnnnnnnnnnnnnnnnnnnnnnnnnnnnnnnnnnnnnnnnnnnnnnnnnnnnnnnnnnnnnnnnnnnnnnnnnnnnnnnnnnnnnnnnnnnnnnnnnnnnnnnnnnnnnnnnnnnnnnnnnnnnnnnnnnnnnnnnnnnnnnnnnnnnnnnnnnnnnnnnnnnnnnnnnnnnnnnnnnnnnnnnnnnnnnnnnnnnnnnnnnnnnnnnnnnnnnnnnnnnnnnnnnnnnnnnnnnnnnnnnnnnnnnnnnnnnnnnnnnnnnnnnnnnnnnnnnnnnnnnnnnnnnnnnnnnnnnnnnnnnnnnnnnnnnnnnnnnnnnnnnnnnnnnnnnnnnnnnnnnnnnnnnnnnnnnnnnnnnnnnnnnnnnnnnnnnnnnnnnnnnnnnnnnnnnnnnnnnnnnnnnnnnnnnnnnnnnnnnnnnnnnnnnnnnnnnnnnnnnnnnnnnnnnnnnnnnnnnnnnnnnnnnnnnnnnnnnnnnnnnnnnnnnnnnnnnnnnnnnnnnnnnnnnnnnnnnnnnnnnnnnnnnnnnnnnnnnnnnnnnnnnnnnnnnnnnnnnnnnnnnnnnnnnnnnnnnnnnnnnnnnnnnnnnnnnnnnnnnnnnnnnnnnnnnnnnnnnnnnnnnnnnnnnnnnnnnnnnnnnnnnnnnnnnnnnnnnnnnnnnnnnnnnnnnnnnnnnnnnnnnnnnnnnnnnnnnnnnnnnnnnnnnnnnnnnnnnnnnnnnnnnnnnnnnnnnnnnnnnnnnnnnnnnnnnnnnnnnnnnnnnnnnnnnnnnnnnnnnnnnnnnnnnnnnnnnnnnnnnnnnnnnnnnnnnnnnnnnnnnnnnnnnnnnnnnnnnnnnnnnnnnnnnnnnnnnnnnnnnnnnnnnnnnnnnnnnnnnnnnnnnnnnnnnnnnnnnnnnnnnnnnnnnnnnnnnnnnnnnnnnnnnnnnnnnnnnnnnnnnnnnnnnnnnnnnnnnnnnnnnnnnnnnnnnnnnnnnnnnnnnnnnnnnnnnnnnnnnnnnnnnnnnnnnnnnnnnnnnnnnnnnnnnnnnnnnnnnnnnnnnnnnnnnnnnnnnnnnnnnnnnnnnnnnnnnnnnnnnnnnnnnnnnnnnnnnnnnnnnnnnnnnnnnnnnnnnnnnnnnnnnnnnnnnnnnnnnnnnnnnnnnnnnnnnnnnnnnnnnnnnnnnnnnnnnnnnnnnnnnnnnnnnnnnnnnnnnnnnnnnnnnnnnnnnnnnnnnnnnnnnnnnnnnnnnnnnnnnnnnnnnnnnnnnnnnnnnnnnnnnnnnnnnnnnnnnnnnnnnnnnnnnnnnnnnnnnnnnnnnnnnnnnnnnnnnnnnnnnnnnnnnnnnnnnnnnnnnnnnnnnnnnnnnnnnnnnnnnnnnnnnnnnnnnnnnnnnnnnnnnnnnnnnnnnnnnnnnnnnnnnnnnnnnnnnnnnnnnnnnnnnnnnnnnnnnnnnnnnnnnnnnnnnnnnnnnnnnnnnnnnnnnnnnnnnnnnnnnnnnnnnnnnnnnnnnnnnnnnnnnnnnnnnnnnnnnnnnnnnnnnnnnnnnnnnnnnnnnnnnnnnnnnnnnnnnnnnnnnnnnnnnnnnnnnnnnnnnnnnnnnnnnnnnnnnnnnnnnnnnnnnnnnnnnnnnnnnnnnnnnnnnnnnnnnnnnnnnnnnnnnnnnnnnnnnnnnnnnnnnnnnnnnnnnnnnnnnnnnnnnnnnnnnnnnnnnnnnnnnnnnnnnnnnnnnnnnnnnnnnnnnnnnnnnnnnnnnnnnnnnnnnnnnnnnnnnnnnnnnnnnnnnnnnnnnnnnnnnnnnnnnnnnnnnnnnnnnnnnnnnnnnnnnnnnnnnnnnnnnnnnnnnnnnnnnnnnnnnnnnnnnnnnnnnnnnnnnnnnnnnnnnnnnnnnnnnnnnnnnnnnnnnnnnnnnnnnnnnnnnnnnnnnnnnnnnnnnnnnnnnnnnnnnnnnnnnnnnnnnnnnnnnnnnnnnnnnnnnnnnnnnnnnnnnnnnnnnnnnnnnnnnnnnnnnnnnnnnnnnnnnnnnnnnnnnnnnnnnnnnnnnnnnnnnnnnnnnnnnnnnnnnnnnnnnnnnnnnnnnnnnnnnnnnnnnnnnnnnnnnnnnnnnnnnnnnnnnnnnnnnnnnnnnnnnnnnnnnnnnnnnnnnnnnnnnnnnnnnnnnnnnnnnnnnnnnnnnnnnnnnnnnnnnnnnnnnnnnnnnnnnnnnnnnnnnnnnnnnnnnnnnnnnnnnnnnnnnnnnnnnnnnnnnnnnnnnnnnnnnnnnnnnnnnnnnnnnnnnnnnnnnnnnnnnnnnnnnnnnnnnnnnnnnnnnnnnnnnnnnnnnnnnnnnnnnnnnnnnnnnnnnnnnnnnnnnnnnnnnnnnnnnnnnnnnnnnnnnnnnnnnnnnnnnnnnnnnnnnnnnnnnnnnnnnnnnnnnnnnnnnnnnnnnnnnnnnnnnnnnnnnnnnnnnnnnnnnnnnnnnnnnnnnnnnnnnnnnnnnnnnnnnnnnnnnnnnnnnnnnnnnnnnnnnnnnnnnnnnnnnnnnnnnnnnnnnnnnnnnnnnnnnnnnnnnnnnnnnnnnnnnnnnnnnnnnnnnnnnnnnnnnnnnnnnnnnnnnnnnnnnnnnnnnnnnnnnnnnnnnnnnnnnnnnnnnnnnnnnnnnnnnnnnnnnnnnnnnnnnnnnnnnnnnnnnnnnnnnnnnnnnnnnnnnnnnnnnnnnnnnnnnnnnnnnnnnnnnnnnnnnnnnnnnnnnnnnnnnnnnnnnnnnnnnnnnnnnnnnnnnnnnnnnnnnnnnnnnnnnnnnnnnnnnnnnnnnnnnnnnnnnnnnnnnnnnnnnnnnnnnnnnnnnnnnnnnnnnnnnnnnnnnnnnnnnnnnnnnnnnnnnnnnnnnnnnnnnnnnnnnnnnnnnnnnnnnnnnnnnnnnnnnnnnnnnnnnnnnnnnnnnnnnnnnnnnnnnnnnnnnnnnnnnnnnnnnnnnnnnnnnnnnnnnnnnnnnnnnnnnnnnnnnnnnnnnnnnnnnnnnnnnnnnnnnnnnnnnnnnnnnnnnnnnnnnnnnnnnnnnnnnnnnnnnnnnnnnnnnnnnnnnnnnnnnnnnnnnnnnnnnnnnnnnnnnnnnnnnnnnnnnnnnnnnnnnnnnnnnnnnnnnnnnnnnnnnnnnnnnnnnnnnnnnnnnnnnnnnnnnnnnnnnnnnnnnnnnnnnnnnnnnnnnnnnnnnnnnnnnnnnnnnnnnnnnnnnnnnnnnnnnnnnnnnnnnnnnnnnnnnnnnnnnnnnnnnnnnnnnnnnnnnnnnnnnnnnnnnnnnnnnnnnnnnnnnnnnnnnnnnnnnnnnnnnnnnnnnnnnnnnnnnnnnnnnnnnnnnnnnnnnnnnnnnnnnnnnnnnnnnnnnnnnnnnnnnnnnnnnnnnnnnnnnnnnnnnnnnnnnnnnnnnnnnnnnnnnnnnnnnnnnnnnnnnnnnnnnnnnnnnnnnnnnnnnnnnnnnnnnnnnnnnnnnnnnnnnnnnnnnnnnnnnnnnnnnnnnnnnnnnnnnnnnnnnnnnnnnnnnnnnnnnnnnnnnnnnnnnnnnnnnnnnnnnnnnnnnnnnnnnnnnnnnnnnnnnnnnnnnnnnnnnnnnnnnnnnnnnnnnnnnnnnnnnnnnnnnnnnnnnnnnnnnnnnnnnnnnnnnnnnnnnnnnnnnnnnnnnnnnnnnnnnnnnnnnnnnnnnnnnnnnnnnnnnnnnnnnnnnnnnnnnnnnnnnnnnnnnnnnnnnnnnnnnnnnnnnnnnnnnnnnnnnnnnnnnnnnnnnnnnnnnnnnnnnnnnnnnnnnnnnnnnnnnnnnnnnnnnnnnnnnnnnnnnnnnnnnnnnnnnnnnnnnnnnnnnnnnnnnnnnnnnnnnnnnnnnnnnnnnnnnnnnnnnnnnnnnnnnnnnnnnnnnnnnnnnnnnnnnnnnnnnnnnnnnnnnnnnnnnnnnnnnnnnnnnnnnnnnnnnnnnnnnnnnnnnnnnnnnnnnnnnnnnnnnnnnnnnnnnnnnnnnnnnnnnnnnnnnnnnnnnnnnnnnnnnnnnnnnnnnnnnnnnnnnnnnnnnnnnnnnnnnnnnnnnnnnnnnnnnnnnnnnnnnnnnnnnnnnnnnnnnnnnnnnnnnnnnnnnnnnnnnnnnnnnnnnnnnnnnnnnnnnnnnnnnnnnnnnnnnnnnnnnnnnnnnnnnnnnnnnnnnnnnnnnnnnnnnnnnnnnnnnnnnnnnnnnnnnnnnnnnnnnnnnnnnnnnnnnnnnnnnnnnnnnnnnnnnnnnnnnnnnnnnnnnnnnnnnnnnnnnnnnnnnnnnnnnnnnnnnnnnnnnnnnnnnnnnnnnnnnnnnnnnnnnnnnnnnnnnnnnnnnnnnnnnnnnnnnnnnnnnnnnnnnnnnnnnnnnnnnnnnnnnnnnnnnnnnnnnnnnnnnnnnnnnnnnnnnnnnnnnnnnnnnnnnnnnnnnnnnnnnnnnnnnnnnnnnnnnnnnnnnnnnnnnnnnnnnnnnnnnnnnnnnnnnnnnnnnnnnnnnnnnnnnnnnnnnnnnnnnnnnnnnnnnnnnnnnnnnnnnnnnnnnnnnnnnnnnnnnnnnnnnnnnnnnnnnnnnnnnnnnnnnnnnnnnnnnnnnnnnnnnnnnnnnnnnnnnnnnnnnnnnnnnnnnnnnnnnnnnnnnnnnnnnnnnnnnnnnnnnnnnnnnnnnnnnnnnnnnnnnnnnnnnnnnnnnnnnnnnnnnnnnnnnnnnnnnnnnnnnnnnnnnnnnnnnnnnnnnnnnnnnnnnnnnnnnnnnnnnnnnnnnnnnnnnnnnnnnnnnnnnnnnnnnnnnnnnnnnnnnnnnnnnnnnnnnnnnnnnnnnnnnnnnnnnnnnnnnnnnnnnnnnnnnnnnnnnnnnnnnnnnnnnnnnnnnnnnnnnnnnnnnnnnnnnnnnnnnnnnnnnnnnnnnnnnnnnnnnnnnnnnnnnnnnnnnnnnnnnnnnnnnnnnnnnnnnnnnnnnnnnnnnnnnnnnnnnnnnnnnnnnnnnnnnnnnnnnnnnnnnnnnnnnnnnnnnnnnnnnnnnnnnnnnnnnnnnnnnnnnnnnnnnnnnnnnnnnnnnnnnnnnnnnnnnnnnnnnnnnnnnnnnnnnnnnnnnnnnnnnnnnnnnnnnnnnnnnnnnnnnnnnnnnnnnnnnnnnnnnnnnnnnnnnnnnnnnnnnnnnnnnnnnnnnnnnnnnnnnnnnnnnnnnnnnnnnnnnnnnnnnnnnnnnnnnnnnnnnnnnnnnnnnnnnnnnnnnnnnnnnnnnnnnnnnnnnnnnnnnnnnnnnnnnnnnnnnnnnnnnnnnnnnnnnnnnnnnnnnnnnnnnnnnnnnnnnnnnnnnnnnnnnnnnnnnnnnnnnnnnnnnnnnnnnnnnnnnnnnnnnnnnnnnnnnnnnnnnnnnnnnnnnnnnnnnnnnnnnnnnnnnnnnnnnnnnnnnnnnnnnnnnnnnnnnnnnnnnnnnnnnnnnnnnnnnnnnnnnnnnnnnnnnnnnnnnnnnnnnnnnnnnnnnnnnnnnnnnnnnnnnnnnnnnnnnnnnnnnnnnnnnnnnnnnnnnnnnnnnnnnnnnnnnnnnnnnnnnnnnnnnnnnnnnnnnnnnnnnnnnnnnnnnnnnnnnnnnnnnnnnnnnnnnnnnnnnnnnnnnnnnnnnnnnnnnnnnnnnnnnnnnnnnnnnnnnnnnnnnnnnnnnnnnnnnnnnnnnnnnnnnnnnnnnnnnnnnnnnnnnnnnnnnnnnnnnnnnnnnnnnnnnnnnnnnnnnnnnnnnnnnnnnnnnnnnnnnnnnnnnnnnnnnnnnnnnnnnnnnnnnnnnnnnnnnnnnnnnnnnnnnnnnnnnnnnnnnnnnnnnnnnnnnnnnnnnnnnnnnnnnnnnnnnnnnnnnnnnnnnnnnnnnnnnnnnnnnnnnnnnnnnnnnnnnnnnnnnnnnnnnnnnnnnnnnnnnnnnnnnnnnnnnnnnnnnnnnnnnnnnnnnnnnnnnnnnnnnnnnnnnnnnnnnnnnnnnnnnnnnnnnnnnnnnnnnnnnnnnnnnnnnnnnnnnnnnnnnnnnnnnnnnnnnnnnnnnnnnnnnnnnnnnnnnnnnnnnnnnnnnnnnnnnnnnnnnnnnnnnnnnnnnnnnnnnnnnnnnnnnnnnnnnnnnnnnnnnnnnnnnnnnnnnnnnnnnnnnnnnnnnnnnnnnnnnnnnnnnnnnnnnnnnnnnnnnnnnnnnnnnnnnnnnnnnnnnnnnnnnnnnnnnnnnnnnnnnnnnnnnnnnnnnnnnnnnnnnnnnnnnnnnnnnnnnnnnnnnnnnnnnnnnnnnnnnnnnnnnnnnnnnnnnnnnnnnnnnnnnnnnnnnnnnnnnnnnnnnnnnnnnnnnnnnnnnnnnnnnnnnnnnnnnnnnnnnnnnnnnnnnnnnnnnnnnnnnnnnnnnnnnnnnnnnnnnnnnnnnnnnnnnnnnnnnnnnnnnnnnnnnnnnnnnnnnnnnnnnnnnnnnnnnnnnnnnnnnnnnnnnnnnnnnnnnnnnnnnnnnnnnnnnnnnnnnnnnnnnnnnnnnnnnnnnnnnnnnnnnnnnnnnnnnnnnnnnnnnnnnnnnnnnnnnnnnnnnnnnnnnnnnnnnnnnnnnnnnnnnnnnnnnnnnnnnnnnnnnnnnnnnnnnnnnnnnnnnnnnnnnnnnnnnnnnnnnnnnnnnnnnnnnnnnnnnnnnnnnnnnnnnnnnnnnnnnnnnnnnnnnnnnnnnnnnnnnnnnnnnnnnnnnnnnnnnnnnnnnnnnnnnnnnnnnnnnnnnnnnnnnnnnnnnnnnnnnnnnnnnnnnnnnnnnnnnnnnnnnnnnnnnnnnnnnnnnnnnnnnnnnnnnnnnnnnnnnnnnnnnnnnnnnnnnnnnnnnnnnnnnnnnnnnnnnnnnnnnnnnnnnnnnnnnnnnnnnnnnnnnnnnnnnnnnnnnnnnnnnnnnnnnnnnnnnnnnnnnnnnnnnnnnnnnnnnnnnnnnnnnnnnnnnnnnnnnnnnnnnnnnnnnnnnnnnnnnnnnnnnnnnnnnnnnnnnnnnnnnnnnnnnnnnnnnnnnnnnnnnnnnnnnnnnnnnnnnnnnnnnnnnnnnnnnnnnnnnnnnnnnnnnnnnnnnnnnnnnnnnnnnnnnnnnnnnnnnnnnnnnnnnnnnnnnnnnnnnnnnnnnnnnnnnnnnnnnnnnnnnnnnnnnnnnnnnnnnnnnnnnnnnnnnnnnnnnnnnnnnnnnnnnnnnnnnnnnnnnnnnnnnnnnnnnnnnnnnnnnnnnnnnnnnnnnnnnnnnnnnnnnnnnnnnnnnnnnnnnnnnnnnnnnnnnnnnnnnnnnnnnnnnnnnnnnnnnnnnnnnnnnnnnnnnnnnnnnnnnnnnnnnnnnnnnnnnnnnnnnnnnnnnnnnnnnnnnnnnnnnnnnnnnnnnnnnnnnnnnnnnnnnnnnnnnnnnnnnnnnnnnnnnnnnnnnnnnnnnnnnnnnnnnnnnnnnnnnnnnnnnnnnnnnnnnnnnnnnnnnnnnnnnnnnnnnnnnnnnnnnnnnnnnnnnnnnnnnnnnnnnnnnnnnnnnnnnnnnnnnnnnnnnnnnnnnnnnnnnnnnnnnnnnnnnnnnnnnnnnnnnnnnnnnnnnnnnnnnnnnnnnnnnnnnnnnnnnnnnnnnnnnnnnnnnnnnnnnnnnnnnnnnnnnnnnnnnnnnnnnnnnnnnnnnnnnnnnnnnnnnnnnnnnnnnnnnnnnnnnnnnnnnnnnnnnnnnnnnnnnnnnnnnnnnnnnnnnnnnnnnnnnnnnnnnnnnnnnnnnnnnnnnnnnnnnnnnnnnnnnnnnnnnnnnnnnnnnnnnnnnnnnnnnnnnnnnnnnnnnnnnnnnnnnnnnnnnnnnnnnnnnnnnnnnnnnnnnnnnnnnnnnnnnnnnnnnnnnnnnnnnnnnnnnnnnnnnnnnnnnnnnnnnnnnnnnnnnnnnnnnnnnnnnnnnnnnnnnnnnnnnnnnnnnnnnnnnnnnnnnnnnnnnnnnnnnnnnnnnnnnnnnnnnnnnnnnnnnnnnnnnnnnnnnnnnnnnnnnnnnnnnnnnnnnnnnnnnnnnnnnnnnnnnnnnnnnnnnnnnnnnnnnnnnnnnnnnnnnnnnnnnnnnnnnnnnnnnnnnnnnnnnnnnnnnnnnnnnnnnnnnnnnnnnnnnnnnnnnnnnnnnnnnnnnnnnnnnnnnnnnnnnnnnnnnnnnnnnnnnnnnnnnnnnnnnnnnnnnnnnnnnnnnnnnnnnnnnnnnnnnnnnnnnnnnnnnnnnnnnnnnnnnnnnnnnnnnnnnnnnnnnnnnnnnnnnnnnnnnnnnnnnnnnnnnnnnnnnnnnnnnnnnnnnnnnnnnnnnnnnnnnnnnnnnnnnnnnnnnnnnnnnnnnnnnnnnnnnnnnnnnnnnnnnnnnnnnnnnnnnnnnnnnnnnnnnnnnnnnnnnnnnnnnnnnnnnnnnnnnnnnnnnnnnnnnnnnnnnnnnnnnnnnnnnnnnnnnnnnnnnnnnnnnnnnnnnnnnnnnnnnnnnnnnnnnnnnnnnnnnnnnnnnnnnnnnnnnnnnnnnnnnnnnnnnnnnnnnnnnnnnnnnnnnnnnnnnnnnnnnnnnnnnnnnnnnnnnnnnnnnnnnnnnnnnnnnnnnnnnnnnnnnnnnnnnnnnnnnnnnnnnnnnnnnnnnnnnnnnnnnnnnnnnnnnnnnnnnnnnnnnnnnnnnnnnnnnnnnnnnnnnnnnnnnnnnnnnnnnnnnnnnnnnnnnnnnnnnnnnnnnnnnnnnnnnnnnnnnnnnnnnnnnnnnnnnnnnnnnnnnnnnnnnnnnnnnnnnnnnnnnnnnnnnnnnnnnnnnnnnnnnnnnnnnnnnnnnnnnnnnnnnnnnnnnnnnnnnnnnnnnnnnnnnnnnnnnnnnnnnnnnnnnnnnnnnnnnnnnnnnnnnnnnnnnnnnnnnnnnnnnnnnnnnnnnnnnnnnnnnnnnnnnnnnnnnnnnnnnnnnnnnnnnnnnnnnnnnnnnnnnnnnnnnnnnnnnnnnnnnnnnnnnnnnnnnnnnnnnnnnnnnnnnnnnnnnnnnnnnnnnnnnnnnnnnnnnnnnnnnnnnnnnnnnnnnnnnnnnnnnnnnnnnnnnnnnnnnnnnnnnnnnnnnnnnnnnnnnnnnnnnnnnnnnnnnnnnnnnnnnnnnnnnnnnnnnnnnnnnnnnnnnnnnnnnnnnnnnnnnnnnnnnnnnnnnnnnnnnnnnnnnnnnnnnnnnnnnnnnnnnnnnnnnnnnnnnnnnnnnnnnnnnnnnnnnnnnnnnnnnnnnnnnnnnnnnnnnnnnnnnnnnnnnnnnnnnnnnnnnnnnnnnnnnnnnnnnnnnnnnnnnnnnnnnnnnnnnnnnnnnnnnnnnnnnnnnnnnnnnnnnnnnnnnnnnnnnnnnnnnnnnnnnnnnnnnnnnnnnnnnnnnnnnnnnnnnnnnnnnnnnnnnnnnnnnnnnnnnnnnnnnnnnnnnnnnnnnnnnnnnnnnnnnnnnnnnnnnnnnnnnnnnnnnnnnnnnnnnnnnnnnnnnnnnnnnnnnnnnnnnnnnnnnnnnnnnnnnnnnnnnnnnnnnnnnnnnnnnnnnnnnnnnnnnnnnnnnnnnnnnnnnnnnnnnnnnnnnnnnnnnnnnnnnnnnnnnnnnnnnnnnnnnnnnnnnnnnnnnnnnnnnnnnnnnnnnnnnnnnnnnnnnnnnnnnnnnnnnnnnnnnnnnnnnnnnnnnnnnnnnnnnnnnnnnnnnnnnnnnnnnnnnnnnnnnnnnnnnnnnnnnnnnnnnnnnnnnnnnnnnnnnnnnnnnnnnnnnnnnnnnnnnnnnnnnnnnnnnnnnnnnnnnnnnnnnnnnnnnnnnnnnnnnnnnnnnnnnnnnnnnnnnnnnnnnnnnnnnnnnnnnnnnnnnnnnnnnnnnnnnnnnnnnnnnnnnnnnnnnnnnnnnnnnnnnnnnnnnnnnnnnnnnnnnnnnnnnnnnnnnnnnnnnnnnnnnnnnnnnnnnnnnnnnnnnnnnnnnnnnnnnnnnnnnnnnnnnnnnnnnnnnnnnnnnnnnnnnnnnnnnnnnnnnnnnnnnnnnnnnnnnnnnnnnnnnnnnnnnnnnnnnnnnnnnnnnnnnnnnnnnnnnnnnnnnnnnnnnnnnnnnnnnnnnnnnnnnnnnnnnnnnnnnnnnnnnnnnnnnnnnnnnnnnnnnnnnnnnnnnnnnnnnnnnnnnnnnnnnnnnnnnnnnnnnnnnnnnnnnnnnnnnnnnnnnnnnnnnnnnnnnnnnnnnnnnnnnnnnnnnnnnnnnnnnnnnnnnnnnnnnnnnnnnnnnnnnnnnnnnnnnnnnnnnnnnnnnnnnnnnnnnnnnnnnnnnnnnnnnnnnnnnnnnnnnnnnnnnnnnnnnnnnnnnnnnnnnnnnnnnnnnnnnnnnnnnnnnnnnnnnnnnnnnnnnnnnnnnnnnnnnnnnnnnnnnnnnnnnnnnnnnnnnnnnnnnnnnnnnnnnnnnnnnnnnnnnnnnnnnnnnnnnnnnnnnnnnnnnnnnnnnnnnnnnnnnnnnnnnnnnnnnnnnnnnnnnnnnnnnnnnnnnnnnnnnnnnnnnnnnnnnnnnnnnnnnnnnnnnnnnnnnnnnnnnnnnnnnnnnnnnnnnnnnnnnnnnnnnnnnnnnnnnnnnnnnnnnnnnnnnnnnnnnnnnnnnnnnnnnnnnnnnnnnnnnnnnnnnnnnnnnnnnnnnnnnnnnnnnnnnnnnnnnnnnnnnnnnnnnnnnnnnnnnnnnnnnnnnnnnnnnnnnnnnnnnnnnnnnnnnnnnnnnnnnnnnnnnnnnnnnnnnnnnnnnnnnnnnnnnnnnnnnnnnnnnnnnnnnnnnnnnnnnnnnnnnnnnnnnnnnnnnnnnnnnnnnnnnnnnnnnnnnnnnnnnnnnnnnnnnnnnnnnnnnnnnnnnnnnnnnnnnnnnnnnnnnnnnnnnnnnnnnnnnnnnnnnnnnnnnnnnnnnnnnnnnnnnnnnnnnnnnnnnnnnnnnnnnnnnnnnnnnnnnnnnnnnnnnnnnnnnnnnnnnnnnnnnnnnnnnnnnnnnnnnnnnnnnnnnnnnnnnnnnnnnnnnnnnnnnnnnnnnnnnnnnnnnnnnnnnnnnnnnnnnnnnnnnnnnnnnnnnnnnnnnnnnnnnnnnnnnnnnnnnnnnnnnnnnnnnnnnnnnnnnnnnnnnnnnnnnnnnnnnnnnnnnnnnnnnnnnnnnnnnnnnnnnnnnnnnnnnnnnnnnnnnnnnnnnnnnnnnnnnnnnnnnnnnnnnnnnnnnnnnnnnnnnnnnnnnnnnnnnnnnnnnnnnnnnnnnnnnnnnnnnnnnnnnnnnnnnnnnnnnnnnnnnnnnnnnnnnnnnnnnnnnnnnnnnnnnnnnnnnnnnnnnnnnnnnnnnnnnnnnnnnnnnnnnnnnnnnnnnnnnnnnnnnnnnnnnnnnnnnnnnnnnnnnnnnnnnnnnnnnnnnnnnnnnnnnnnnnnnnnnnnnnnnnnnnnnnnnnnnnnnnnnnnnnnnnnnnnnnnnnnnnnnnnnnnnnnnnnnnnnnnnnnnnnnnnnnnnnnnnnnnnnnnnnnnnnnnnnnnnnnnnnnnnnnnnnnnnnnnnnnnnnnnnnnnnnnnnnnnnnnnnnnnnnnnnnnnnnnnnnnnnnnnnnnnnnnnnnnnnnnnnnnnnnnnnnnnnnnnnnnnnnnnnnnnnnnnnnnnnnnnnnnnnnnnnnnnnnnnnnnnnnnnnnnnnnnnnnnnnnnnnnnnnnnnnnnnnnnnnnnnnnnnnnnnnnnnnnnnnnnnnnnnnnnnnnnnnnnnnnnnnnnnnnnnnnnnnnnnnnnnnnnnnnnnnnnnnnnnnnnnnnnnnnnnnnnnnnnnnnnnnnnnnnnnnnnnnnnnnnnnnnnnnnnnnnnnnnnnnnnnnnnnnnnnnnnnnnnnnnnnnnnnnnnnnnnnnnnnnnnnnnnnnnnnnnnnnnnnnnnnnnnnnnnnnnnnnnnnnnnnnnnnnnnnnnnnnnnnnnnnnnnnnnnnnnnnnnnnnnnnnnnnnnnnnnnnnnnnnnnnnnnnnnnnnnnnnnnnnnnnnnnnnnnnnnnnnnnnnnnnnnnnnnnnnnnnnnnnnnnnnnnnnnnnnnnnnnnnnnnnnnnnnnnnnnnnnnnnnnnnnnnnnnnnnnnnnnnnnnnnnnnnnnnnnnnnnnnnnnnnnnnnnnnnnnnnnnnnnnnnnnnnnnnnnnnnnnnnnnnnnnnnnnnnnnnnnnnnnnnnnnnnnnnnnnnnnnnnnnnnnnnnnnnnnnnnnnnnnnnnnnnnnnnnnnnnnnnnnnnnnnnnnnnnnnnnnnnnnnnnnnnnnnnnnnnnnnnnnnnnnnnnnnnnnnnnnnnnnnnnnnnnnnnnnnnnnnnnnnnnnnnnnnnnnnnnnnnnnnnnnnnnnnnnnnnnnnnnnnnnnnnnnnnnnnnnnnnnnnnnnnnnnnnnnnnnnnnnnnnnnnnnnnnnnnnnnnnnnnnnnnnnnnnnnnnnnnnnnnnnnnnnnnnnnnnnnnnnnnnnnnnnnnnnnnnnnnnnnnnnnnnnnnnnnnnnnnnnnnnnnnnnnnnnnnnnnnnnnnnnnnnnnnnnnnnnnnnnnnnnnnnnnnnnnnnnnnnnnnnnnnnnnnnnnnnnnnnnnnnnnnnnnnnnnnnnnnnnnnnnnnnnnnnnnnnnnnnnnnnnnnnnnnnnnnnnnnnnnnnnnnnnnnnnnnnnnnnnnnnnnnnnnnnnnnnnnnnnnnnnnnnnnnnnnnnnnnnnnnnnnnnnnnnnnnnnnnnnnnnnnnnnnnnnnnnnnnnnnnnnnnnnnnnnnnnnnnnnnnnnnnnnnnnnnnnnnnnnnnnnnnnnnnnnnnnnnnnnnnnnnnnnnnnnnnnnnnnnnnnnnnnnnnnnnnnnnnnnnnnnnnnnnnnnnnnnnnnnnnnnnnnnnnnnnnnnnnnnnnnnnnnnnnnnnnnnnnnnnnnnnnnnnnnnnnnnnnnnnnnnnnnnnnnnnnnnnnnnnnnnnnnnnnnnnnnnnnnnnnnnnnnnnnnnnnnnnnnnnnnnnnnnnnnnnnnnnnnnnnnnnnnnnnnnnnnnnnnnnnnnnnnnnnnnnnnnnnnnnnnnnnnnnnnnnnnnnnnnnnnnnnnnnnnnnnnnnnnnnnnnnnnnnnnnnnnnnnnnnnnnnnnnnnnnnnnnnnnnnnnnnnnnnnnnnnnnnnnnnnnnnnnnnnnnnnnnnnnnnnnnnnnnnnnnnnnnnnnnnnnnnnnnnnnnnnnnnnnnnnnnnnnnnnnnnnnnnnnnnnnnnnnnnnnnnnnnnnnnnnnnnnnnnnnnnnnnnnnnnnnnnnnnnnnnnnnnnnnnnnnnnnnnnnnnnnnnnnnnnnnnnnnnnnnnnnnnnnnnnnnnnnnnnnnnnnnnnnnnnnnnnnnnnnnnnnnnnnnnnnnnnnnnnnnnnnnnnnnnnnnnnnnnnnnnnnnnnnnnnnnnnnnnnnnnnnnnnnnnnnnnnnnnnnnnnnnnnnnnnnnnnnnnnnnnnnnnnnnnnnnnnnnnnnnnnnnnnnnnnnnnnnnnnnnnnnnnnnnnnnnnnnnnnnnnnnnnnnnnnnnnnnnnnnnnnnnnnnnnnnnnnnnnnnnnnnnnnnnnnnnnnnnnnnnnnnnnnnnnnnnnnnnnnnnnnnnnnnnnnnnnnnnnnnnnnnnnnnnnnnnnnnnnnnnnnnnnnnnnnnnnnnnnnnnnnnnnnnnnnnnnnnnnnnnnnnnnnnnnnnnnnnnnnnnnnnnnnnnnnnnnnnnnnnnnnnnnnnnnnnnnnnnnnnnnnnnnnnnnnnnnnnnnnnnnnnnnnnnnnnnnnnnnnnnnnnnnnnnnnnnnnnnnnnnnnnnnnnnnnnnnnnnnnnnnnnnnnnnnnnnnnnnnnnnnnnnnnnnnnnnnnnnnnnnnnnnnnnnnnnnnnnnnnnnnnnnnnnnnnnnnnnnnnnnnnnnnnnnnnnnnnnnnnnnnnnnnnnnnnnnnnnnnnnnnnnnnnnnnnnnnnnnnnnnnnnnnnnnnnnnnnnnnnnnnnnnnnnnnnnnnnnnnnnnnnnnnnnnnnnnnnnnnnnnnnnnnnnnnnnnnnnnnnnnnnnnnnnnnnnnnnnnnnnnnnnnnnnnnnnnnnnnnnnnnnnnnnnnnnnnnnnnnnnnnnnnnnnnnnnnnnnnnnnnnnnnnnnnnnnnnnnnnnnnnnnnnnnnnnnnnnnnnnnnnnnnnnnnnnnnnnnnnnnnnnnnnnnnnnnnnnnnnnnnnnnnnnnnnnnnnnnnnnnnnnnnnnnnnnnnnnnnnnnnnnnnnnnnnnnnnnnnnnnnnnnnnnnnnnnnnnnnnnnnnnnnnnnnnnnnnnnnnnnnnnnnnnnnnnnnnnnnnnnnnnnnnnnnnnnnnnnnnnnnnnnnnnnnnnnnnnnnnnnnnnnnnnnnnnnnnnnnnnnnnnnnnnnnnnnnnnnnnnnnnnnnnnnnnnnnnnnnnnnnnnnnnnnnnnnnnnnnnnnnnnnnnnnnnnnnnnnnnnnnnnnnnnnnnnnnnnnnnnnnnnnnnnnnnnnnnnnnnnnnnnnnnnnnnnnnnnnnnnnnnnnnnnnnnnnnnnnnnnnnnnnnnnnnnnnnnnnnnnnnnnnnnnnnnnnnnnnnnnnnnnnnnnnnnnnnnnnnnnnnnnnnnnnnnnnnnnnnnnnnnnnnnnnnnnnnnnnnnnnnnnnnnnnnnnnnnnnnnnnnnnnnnnnnnnnnnnnnnnnnnnnnnnnnnnnnnnnnnnnnnnnnnnnnnnnnnnnnnnnnnnnnnnnnnnnnnnnnnnnnnnnnnnnnnnnnnnnnnnnnnnnnnnnnnnnnnnnnnnnnnnnnnnnnnnnnnnnnnnnnnnnnnnnnnnnnnnnnnnnnnnnnnnnnnnnnnnnnnnnnnnnnnnnnnnnnnnnnnnnnnnnnnnnnnnnnnnnnnnnnnnnnnnnnnnnnnnnnnnnnnnnnnnnnnnnnnnnnnnnnnnnnnnnnnnnnnnnnnnnnnnnnnnnnnnnnnnnnnnnnnnnnnnnnnnnnnnnnnnnnnnnnnnnnnnnnnnnnnnnnnnnnnnnnnnnnnnnnnnnnnnnnnnnnnnnnnnnnnnnnnnnnnnnnnnnnnnnnnnnnnnnnnnnnnnnnnnnnnnnnnnnnnnnnnnnnnnnnnnnnnnnnnnnnnnnnnnnnnnnnnnnnnnnnnnnnnnnnnnnnnnnnnnnnnnnnnnnnnnnnnnnnnnnnnnnnnnnnnnnnnnnnnnnnnnnnnnnnnnnnnnnnnnnnnnnnnnnnnnnnnnnnnnnnnnnnnnnnnnnnnnnnnnnnnnnnnnnnnnnnnnnnnnnnnnnnnnnnnnnnnnnnnnnnnnnnnnnnnnnnnnnnnnnnnnnnnnnnnnnnnnnnnnnnnnnnnnnnnnnnnnnnnnnnnnnnnnnnnnnnnnnnnnnnnnnnnnnnnnnnnnnnnnnnnnnnnnnnnnnnnnnnnnnnnnnnnnnnnnnnnnnnnnnnnnnnnnnnnnnnnnnnnnnnnnnnnnnnnnnnnnnnnnnnnnnnnnnnnnnnnnnnnnnnnnnnnnnnnnnnnnnnnnnnnnnnnnnnnnnnnnnnnnnnnnnnnnnnnnnnnnnnnnnnnnnnnnnnnnnnnnnnnnnnnnnnnnnnnnnnnnnnnnnnnnnnnnnnnnnnnnnnnnnnnnnnnnnnnnnnnnnnnnnnnnnnnnnnnnnnnnnnnnnnnnnnnnnnnnnnnnnnnnnnnnnnnnnnnnnnnnnnnnnnnnnnnnnnnnnnnnnnnnnnnnnnnnnnnnnnnnnnnnnnnnnnnnnnnnnnnnnnnnnnnnnnnnnnnnnnnnnnnnnnnnnnnnnnnnnnnnnnnnnnnnnnnnnnnnnnnnnnnnnnnnnnnnnnnnnnnnnnnnnnnnnnnnnnnnnnnnnnnnnnnnnnnnnnnnnnnnnnnnnnnnnnnnnnnnnnnnnnnnnnnnnnnnnnnnnnnnnnnnnnnnnnnnnnnnnnnnnnnnnnnnnnnnnnnnnnnnnnnnnnnnnnnnnnnnnnnnnnnnnnnnnnnnnnnnnnnnnnnnnnnnnnnnnnnnnnnnnnnnnnnnnnnnnnnnnnnnnnnnnnnnnnnnnnnnnnnnnnnnnnnnnnnnnnnnnnnnnnnnnnnnnnnnnnnnnnnnnnnnnnnnnnnnnnnnnnnnnnnnnnnnnnnnnnnnnnnnnnnnnnnnnnnnnnnnnnnnnnnnnnnnnnnnnnnnnnnnnnnnnnnnnnnnnnnnnnnnnnnnnnnnnnnnnnnnnnnnnnnnnnnnnnnnnnnnnnnnnnnnnnnnnnnnnnnnnnnnnnnnnnnnnnnnnnnnnnnnnnnnnnnnnnnnnnnnnnnnnnnnnnnnnnnnnnnnnnnnnnnnnnnnnnnnnnnnnnnnnnnnnnnnnnnnnnnnnnnnnnnnnnnnnnnnnnnnnnnnnnnnnnnnnnnnnnnnnnnnnnnnnnnnnnnnnnnnnnnnnnnnnnnnnnnnnnnnnnnnnnnnnnnnnnnnnnnnnnnnnnnnnnnnnnnnnnnnnnnnnnnnnnnnnnnnnnnnnnnnnnnnnnnnnnnnnnnnnnnnnnnnnnnnnnnnnnnnnnnnnnnnnnnnnnnnnnnnnnnnnnnnnnnnnnnnnnnnnnnnnnnnnnnnnnnnnnnnnnnnnnnnnnnnnnnnnnnnnnnnnnnnnnnnnnnnnnnnnnnnnnnnnnnnnnnnnnnnnnnnnnnnnnnnnnnnnnnnnnnnnnnnnnnnnnnnnnnnnnnnnnnnnnnnnnnnnnnnnnnnnnnnnnnnnnnnnnnnnnnnnnnnnnnnnnnnnnnnnnnnnnnnnnnnnnnnnnnnnnnnnnnnnnnnnnnnnnnnnnnnnnnnnnnnnnnnnnnnnnnnnnnnnnnnnnnnnnnnnnnnnnnnnnnnnnnnnnnnnnnnnnnnnnnnnnnnnnnnnnnnnnnnnnnnnnnnnnnnnnnnnnnnnnnnnnnnnnnnnnnnnnnnnnnnnnnnnnnnnnnnnnnnnnnnnnnnnnnnnnnnnnnnnnnnnnnnnnnnnnnnnnnnnnnnnnnnnnnnnnnnnnnnnnnnnnnnnnnnnnnnnnnnnnnnnnnnnnnnnnnnnnnnnnnnnnnnnnnnnnnnnnnnnnnnnnnnnnnnnnnnnnnnnnnnnnnnnnnnnnnnnnnnnnnnnnnnnnnnnnnnnnnnnnnnnnnnnnnnnnnnnnnnnnnnnnnnnnnnnnnnnnnnnnnnnnnnnnnnnnnnnnnnnnnnnnnnnnnnnnnnnnnnnnnnnnnnnnnnnnnnnnnnnnnnnnnnnnnnnnnnnnnnnnnnnnnnnnnnnnnnnnnnnnnnnnnnnnnnnnnnnnnnnnnnnnnnnnnnnnnnnnnnnnnnnnnnnnnnnnnnnnnnnnnnnnnnnnnnnnnnnnnnnnnnnnnnnnnnnnnnnnnnnnnnnnnnnnnnnnnnnnnnnnnnnnnnnnnnnnnnnnnnnnnnnnnnnnnnnnnnnnnnnnnnnnnnnnnnnnnnnnnnnnnnnnnnnnnnnnnnnnnnnnnnnnnnnnnnnnnnnnnnnnnnnnnnnnnnnnnnnnnnnnnnnnnnnnnnnnnnnnnnnnnnnnnnnnnnnnnnnnnnnnnnnnnnnnnnnnnnnnnnnnnnnnnnnnnnnnnnnnnnnnnnnnnnnnnnnnnnnnnnnnnnnnnnnnnnnnnnnnnnnnnnnnnnnnnnnnnnnnnnnnnnnnnnnnnnnnnnnnnnnnnnnnnnnnnnnnnnnnnnnnnnnnnnnnnnnnnnnnnnnnnnnnnnnnnnnnnnnnnnnnnnnnnnnnnnnnnnnnnnnnnnnnnnnnnnnnnnnnnnnnnnnnnnnnnnnnnnnnnnnnnnnnnnnnnnnnnnnnnnnnnnnnnnnnnnnnnnnnnnnnnnnnnnnnnnnnnnnnnnnnnnnnnnnnnnnnnnnnnnnnnnnnnnnnnnnnnnnnnnnnnnnnnnnnnnnnnnnnnnnnnnnnnnnnnnnnnnnnnnnnnnnnnnnnnnnnnnnnnnnnnnnnnnnnnnnnnnnnnnnnnnnnnnnnnnnnnnnnnnnnnnnnnnnnnnnnnnnnnnnnnnnnnnnnnnnnnnnnnnnnnnnnnnnnnnnnnnnnnnnnnnnnnnnnnnnnnnnnnnnnnnnnnnnnnnnnnnnnnnnnnnnnnnnnnnnnnnnnnnnnnnnnnnnnnnnnnnnnnnnnnnnnnnnnnnnnnnnnnnnnnnnnnnnnnnnnnnnnnnnnnnnnnnnnnnnnnnnnnnnnnnnnnnnnnnnnnnnnnnnnnnnnnnnnnnnnnnnnnnnnnnnnnnnnnnnnnnnnnnnnnnnnnnnnnnnnnnnnnnnnnnnnnnnnnnnnnnnnnnnnnnnnnnnnnnnnnnnnnnnnnnnnnnnnnnnnnnnnnnnnnnnnnnnnnnnnnnnnnnnnnnnnnnnnnnnnnnnnnnnnnnnnnnnnnnnnnnnnnnnnnnnnnnnnnnnnnnnnnnnnnnnnnnnnnnnnnnnnnnnnnnnnnnnnnnnnnnnnnnnnnnnnnnnnnnnnnnnnnnnnnnnnnnnnnnnnnnnnnnnnnnnnnnnnnnnnnnnnnnnnnnnnnnnnnnnnnnnnnnnnnnnnnnnnnnnnnnnnnnnnnnnnnnnnnnnnnnnnnnnnnnnnnnnnnnnnnnnnnnnnnnnnnnnnnnnnnnnnnnnnnnnnnnnnnnnnnnnnnnnnnnnnnnnnnnnnnnnnnnnnnnnnnnnnnnnnnnnnnnnnnnnnnnnnnnnnnnnnnnnnnnnnnnnnnnnnnnnnnnnnnnnnnnnnnnnnnnnnnnnnnnnnnnnnnnnnnnnnnnnnnnnnnnnnnnnnnnnnnnnnnnnnnnnnnnnnnnnnnnnnnnnnnnnnnnnnnnnnnnnnnnnnnnnnnnnnnnnnnnnnnnnnnnnnnnnnnnnnnnnnnnnnnnnnnnnnnnnnnnnnnnnnnnnnnnnnnnnnnnnnnnnnnnnnnnnnnnnnnnnnnnnnnnnnnnnnnnnnnnnnnnnnnnnnnnnnnnnnnnnnnnnnnnnnnnnnnnnnnnnnnnnnnnnnnnnnnnnnnnnnnnnnnnnnnnnnnnnnnnnnnnnnnnnnnnnnnnnnnnnnnnnnnnnnnnnnnnnnnnnnnnnnnnnnnnnnnnnnnnnnnnnnnnnnnnnnnnnnnnnnnnnnnnnnnnnnnnnnnnnnnnnnnnnnnnnnnnnnnnnnnnnnnnnnnnnnnnnnnnnnnnnnnnnnnnnnnnnnnnnnnnnnnnnnnnnnnnnnnnnnnnnnnnnnnnnnnnnnnnnnnnnnnnnnnnnnnnnnnnnnnnnnnnnnnnnnnnnnnnnnnnnnnnnnnnnnnnnnnnnnnnnnnnnnnnnnnnnnnnnnnnnnnnnnnnnnnnnnnnnnnnnnnnnnnnnnnnnnnnnnnnnnnnnnnnnnnnnnnnnnnnnnnnnnnnnnnnnnnnnnnnnnnnnnnnnnnnnnnnnnnnnnnnnnnnnnnnnnnnnnnnnnnnnnnnnnnnnnnnnnnnnnnnnnnnnnnnnnnnnnnnnnnnnnnnnnnnnnnnnnnnnnnnnnnnnnnnnnnnnnnnnnnnnnnnnnnnnnnnnnnnnnnnnnnnnnnnnnnnnnnnnnnnnnnnnnnnnnnnnnnnnnnnnnnnnnnnnnnnnnnnnnnnnnnnnnnnnnnnnnnnnnnnnnnnnnnnnnnnnnnnnnnnnnnnnnnnnnnnnnnnnnnnnnnnnnnnnnnnnnnnnnnnnnnnnnnnnnnnnnnnnnnnnnnnnnnnnnnnnnnnnnnnnnnnnnnnnnnnnnnnnnnnnnnnnnnnnnnnnnnnnnnnnnnnnnnnnnnnnnnnnnnnnnnnnnnnnnnnnnnnnnnnnnnnnnnnnnnnnnnnnnnnnnnnnnnnnnnnnnnnnnnnnnnnnnnnnnnnnnnnnnnnnnnnnnnnnnnnnnnnnnnnnnnnnnnnnnnnnnnnnnnnnnnnnnnnnnnnnnnnnnnnnnnnnnnnnnnnnnnnnnnnnnnnnnnnnnnnnnnnnnnnnnnnnnnnnnnnnnnnnnnnnnnnnnnnnnnnnnnnnnnnnnnnnnnnnnnnnnnnnnnnnnnnnnnnnnnnnnnnnnnnnnnnnnnnnnnnnnnnnnnnnnnnnnnnnnnnnnnnnnnnnnnnnnnnnnnnnnnnnnnnnnnnnnnnnnnnnnnnnnnnnnnnnnnnnnnnnnnnnnnnnnnnnnnnnnnnnnnnnnnnnnnnnnnnnnnnnnnnnnnnnnnnnnnnnnnnnnnnnnnnnnnnnnnnnnnnnnnnnnnnnnnnnnnnnnnnnnnnnnnnnnnnnnnnnnnnnnnnnnnnnnnnnnnnnnnnnnnnnnnnnnnnnnnnnnnnnnnnnnnnnnnnnnnnnnnnnnnnnnnnnnnnnnnnnnnnnnnnnnnnnnnnnnnnnnnnnnnnnnnnnnnnnnnnnnnnnnnnnnnnnnnnnnnnnnnnnnnnnnnnnnnnnnnnnnnnnnnnnnnnnnnnnnnnnnnnnnnnnnnnnnnnnnnnnnnnnnnnnnnnnnnnnnnnnnnnnnnnnnnnnnnnnnnnnnnnnnnnnnnnnnnnnnnnnnnnnnnnnnnnnnnnnnnnnnnnnnnnnnnnnnnnnnnnnnnnnnnnnnnnnnnnnnnnnnnnnnnnnnnnnnnnnnnnnnnnnnnnnnnnnnnnnnnnnnnnnnnnnnnnnnnnnnnnnnnnnnnnnnnnnnnnnnnnnnnnnnnnnnnnnnnnnnnnnnnnnnnnnnnnnnnnnnnnnnnnnnnnnnnnnnnnnnnnnnnnnnnnnnnnnnnnnnnnnnnnnnnnnnnnnnnnnnnnnnnnnnnnnnnnnnnnnnnnnnnnnnnnnnnnnnnnnnnnnnnnnnnnnnnnnnnnnnnnnnnnnnnnnnnnnnnnnnnnnnnnnnnnnnnnnnnnnnnnnnnnnnnnnnnnnnnnnnnnnnnnnnnnnnnnnnnnnnnnnnnnnnnnnnnnnnnnnnnnnnnnnnnnnnnnnnnnnnnnnnnnnnnnnnnnnnnnnnnnnnnnnnnnnnnnnnnnnnnnnnnnnnnnnnnnnnnnnnnnnnnnnnnnnnnnnnnnnnnnnnnnnnnnnnnnnnnnnnnnnnnnnnnnnnnnnnnnnnnnnnnnnnnnnnnnnnnnnnnnnnnnnnnnnnnnnnnnnnnnnnnnnnnnnnnnnnnnnnnnnnnnnnnnnnnnnnnnnnnnnnnnnnnnnnnnnnnnnnnnnnnnnnnnnnnnnnnnnnnnnnnnnnnnnnnnnnnnnnnnnnnnnnnnnnnnnnnnnnnnnnnnnnnnnnnnnnnnnnnnnnnnnnnnnnnnnnnnnnnnnnnnnnnnnnnnnnnnnnnnnnnnnnnnnnnnnnnnnnnnnnnnnnnnnnnnnnnnnnnnnnnnnnnnnnnnnnnnnnnnnnnnnnnnnnnnnnnnnnnnnnnnnnnnnnnnnnnnnnnnnnnnnnnnnnnnnnnnnnnnnnnnnnnnnnnnnnnnnnnnnnnnnnnnnnnnnnnnnnnnnnnnnnnnnnnnnnnnnnnnnnnnnnnnnnnnnnnnnnnnnnnnnnnnnnnnnnnnnnnnnnnnnnnnnnnnnnnnnnnnnnnnnnnnnnnnnnnnnnnnnnnnnnnnnnnnnnnnnnnnnnnnnnnnnnnnnnnnnnnnnnnnnnnnnnnnnnnnnnnnnnnnnnnnnnnnnnnnnnnnnnnnnnnnnnnnnnnnnnnnnnnnnnnnnnnnnnnnnnnnnnnnnnnnnnnnnnnnnnnnnnnnnnnnnnnnnnnnnnnnnnnnnnnnnnnnnnnnnnnnnnnnnnnnnnnnnnnnnnnnnnnnnnnnnnnnnnnnnnnnnnnnnnnnnnnnnnnnnnnnnnnnnnnnnnnnnnnnnnnnnnnnnnnnnnnnnnnnnnnnnnnnnnnnnnnnnnnnnnnnnnnnnnnnnnnnnnnnnnnnnnnnnnnnnnnnnnnnnnnnnnnnnnnnnnnnnnnnnnnnnnnnnnnnnnnnnnnnnnnnnnnnnnnnnnnnnnnnnnnnnnnnnnnnnnnnnnnnnnnnnnnnnnnnnnnnnnnnnnnnnnnnnnnnnnnnnnnnnnnnnnnnnnnnnnnnnnnnnnnnnnnnnnnnnnnnnnnnnnnnnnnnnnnnnnnnnnnnnnnnnnnnnnnnnnnnnnnnnnnnnnnnnnnnnnnnnnnnnnnnnnnnnnnnnnnnnnnnnnnnnnnnnnnnnnnnnnnnnnnnnnnnnnnnnnnnnnnnnnnnnnnnnnnnnnnnnnnnnnnnnnnnnnnnnnnnnnnnnnnnnnnnnnnnnnnnnnnnnnnnnnnnnnnnnnnnnnnnnnnnnnnnnnnnnnnnnnnnnnnnnnnnnnnnnnnnnnnnnnnnnnnnnnnnnnnnnnnnnnnnnnnnnnnnnnnnnnnnnnnnnnnnnnnnnnnnnnnnnnnnnnnnnnnnnnnnnnnnnnnnnnnnnnnnnnnnnnnnnnnnnnnnnnnnnnnnnnnnnnnnnnnnnnnnnnnnnnnnnnnnnnnnnnnnnnnnnnnnnnnnnnnnnnnnnnnnnnnnnnnnnnnnnnnnnnnnnnnnnnnnnnnnnnnnnnnnnnnnnnnnnnnnnnnnnnnnnnnnnnnnnnnnnnnnnnnnnnnnnnnnnnnnnnnnnnnnnnnnnnnnnnnnnnnnnnnnnnnnnnnnnnnnnnnnnnnnnnnnnnnnnnnnnnnnnnnnnnnnnnnnnnnnnnnnnnnnnnnnnnnnnnnnnnnnnnnnnnnnnnnnnnnnnnnnnnnnnnnnnnnnnnnnnnnnnnnnnnnnnnnnnnnnnnnnnnnnnnnnnnnnnnnnnnnnnnnnnnnnnnnnnnnnnnnnnnnnnnnnnnnnnnnnnnnnnnnnnnnnnnnnnnnnnnnnnnnnnnnnnnnnnnnnnnnnnnnnnnnnnnnnnnnnnnnnnnnnnnnnnnnnnnnnnnnnnnnnnnnnnnnnnnnnnnnnnnnnnnnnnnnnnnnnnnnnnnnnnnnnnnnnnnnnnnnnnnnnnnnnnnnnnnnnnnnnnnnnnnnnnnnnnnnnnnnnnnnnnnnnnnnnnnnnnnnnnnnnnnnnnnnnnnnnnnnnnnnnnnnnnnnnnnnnnnnnnnnnnnnnnnnnnnnnnnnnnnnnnnnnnnnnnnnnnnnnnnnnnnnnnnnnnnnnnnnnnnnnnnnnnnnnnnnnnnnnnnnnnnnnnnnnnnnnnnnnnnnnnnnnnnnnnnnnnnnnnnnnnnnnnnnnnnnnnnnnnnnnnnnnnnnnnnnnnnnnnnnnnnnnnnnnnnnnnnnnnnnnnnnnnnnnnnnnnnnnnnnnnnnnnnnnnnnnnnnnnnnnnnnnnnnnnnnnnnnnnnnnnnnnnnnnnnnnnnnnnnnnnnnnnnnnnnnnnnnnnnnnnnnnnnnnnnnnnnnnnnnnnnnnnnnnnnnnnnnnnnnnnnnnnnnnnnnnnnnnnnnnnnnnnnnnnnnnnnnnnnnnnnnnnnnnnnnnnnnnnnnnnnnnnnnnnnnnnnnnnnnnnnnnnnnnnnnnnnnnnnnnnnnnnnnnnnnnnnnnnnnnnnnnnnnnnnnnnnnnnnnnnnnnnnnnnnnnnnnnnnnnnnnnnnnnnnnnnnnnnnnnnnnnnnnnnnnnnnnnnnnnnnnnnnnnnnnnnnnnnnnnnnnnnnnnnnnnnnnnnnnnnnnnnnnnnnnnnnnnnnnnnnnnnnnnnnnnnnnnnnnnnnnnnnnnnnnnnnnnnnnnnnnnnnnnnnnnnnnnnnnnnnnnnnnnnnnnnnnnnnnnnnnnnnnnnnnnnnnnnnnnnnnnnnnnnnnnnnnnnnnnnnnnnnnnnnnnnnnnnnnnnnnnnnnnnnnnnnnnnnnnnnnnnnnnnnnnnnnnnnnnnnnnnnnnnnnnnnnnnnnnnnnnnnnnnnnnnnnnnnnnnnnnnnnnnnnnnnnnnnnnnnnnnnnnnnnnnnnnnnnnnnnnnnnnnnnnnnnnnnnnnnnnnnnnnnnnnnnnnnnnnnnnnnnnnnnnnnnnnnnnnnnnnnnnnnnnnnnnnnnnnnnnnnnnnnnnnnnnnnnnnnnnnnnnnnnnnnnnnnnnnnnnnnnnnnnnnnnnnnnnnnnnnnnnnnnnnnnnnnnnnnnnnnnnnnnnnnnnnnnnnnnnnnnnnnnnnnnnnnnnnnnnnnnnnnnnnnnnnnnnnnnnnnnnnnnnnnnnnnnnnnnnnnnnnnnnnnnnnnnnnnnnnnnnnnnnnnnnnnnnnnnnnnnnnnnnnnnnnnnnnnnnnnnnnnnnnnnnnnnnnnnnnnnnnnnnnnnnnnnnnnnnnnnnnnnnnnnnnnnnnnnnnnnnnnnnnnnnnnnnnnnnnnnnnnnnnnnnnnnnnnnnnnnnnnnnnnnnnnnnnnnnnnnnnnnnnnnnnnnnnnnnnnnnnnnnnnnnnnnnnnnnnnnnnnnnnnnnnnnnnnnnnnnnnnnnnnnnnnnnnnnnnnnnnnnnnnnnnnnnnnnnnnnnnnnnnnnnnnnnnnnnnnnnnnnnnnnnnnnnnnnnnnnnnnnnnnnnnnnnnnnnnnnnnnnnnnnnnnnnnnnnnnnnnnnnnnnnnnnnnnnnnnnnnnnnnnnnnnnnnnnnnnnnnnnnnnnnnnnnnnnnnnnnnnnnnnnnnnnnnnnnnnnnnnnnnnnnnnnnnnnnnnnnnnnnnnnnnnnnnnnnnnnnnnnnnnnnnnnnnnnnnnnnnnnnnnnnnnnnnnnnnnnnnnnnnnnnnnnnnnnnnnnnnnnnnnnnnnnnnnnnnnnnnnnnnnnnnnnnnnnnnnnnnnnnnnnnnnnnnnnnnnnnnnnnnnnnnnnnnnnnnnnnnnnnnnnnnnnnnnnnnnnnnnnnnnnnnnnnnnnnnnnnnnnnnnnnnnnnnnnnnnnnnnnnnnnnnnnnnnnnnnnnnnnnnnnnnnnnnnnnnnnnnnnnnnnnnnnnnnnnnnnnnnnnnnnnnnnnnnnnnnnnnnnnnnnnnnnnnnnnnnnnnnnnnnnnnnnnnnnnnnnnnnnnnnnnnnnnnnnnnnnnnnnnnnnnnnnnnnnnnnnnnnnnnnnnnnnnnnnnnnnnnnnnnnnnnnnnnnnnnnnnnnnnnnnnnnnnnnnnnnnnnnnnnnnnnnnnnnnnnnnnnnnnnnnnnnnnnnnnnnnnnnnnnnnnnnnnnnnnnnnnnnnnnnnnnnnnnnnnnnnnnnnnnnnnnnnnnnnnnnnnnnnnnnnnnnnnnnnnnnnnnnnnnnnnnnnnnnnnnnnnnnnnnnnnnnnnnnnnnnnnnnnnnnnnnnnnnnnnnnnnnnnnnnnnnnnnnnnnnnnnnnnnnnnnnnnnnnnnnnnnnnnnnnnnnnnnnnnnnnnnnnnnnnnnnnnnnnnnnnnnnnnnnnnnnnnnnnnnnnnnnnnnnnnnnnnnnnnnnnnnnnnnnnnnnnnnnnnnnnnnnnnnnnnnnnnnnnnnnnnnnnnnnnnnnnnnnnnnnnnnnnnnnnnnnnnnnnnnnnnnnnnnnnnnnnnnnnnnnnnnnnnnnnnnnnnnnnnnnnnnnnnnnnnnnnnnnnnnnnnnnnnnnnnnnnnnnnnnnnnnnnnnnnnnnnnnnnnnnnnnnnnnnnnnnnnnnnnnnnnnnnnnnnnnnnnnnnnnnnnnnnnnnnnnnnnnnnnnnnnnnnnnnnnnnnnnnnnnnnnnnnnnnnnnnnnnnnnnnnnnnnnnnnnnnnnnnnnnnnnnnnnnnnnnnnnnnnnnnnnnnnnnnnnnnnnnnnnnnnnnnnnnnnnnnnnnnnnnnnnnnnnnnnnnnnnnnnnnnnnnnnnnnnnnnnnnnnnnnnnnnnnnnnnnnnnnnnnnnnnnnnnnnnnnnnnnnnnnnnnnnnnnnnnnnnnnnnnnnnnnnnnnnnnnnnnnnnnnnnnnnnnnnnnnnnnnnnnnnnnnnnnnnnnnnnnnnnnnnnnnnnnnnnnnnnnnnnnnnnnnnnnnnnnnnnnnnnnnnnnnnnnnnnnnnnnnnnnnnnnnnnnnnnnnnnnnnnnnnnnnnnnnnnnnnnnnnnnnnnnnnnnnnnnnnnnnnnnnnnnnnnnnnnnnnnnnnnnnnnnnnnnnnnnnnnnnnnnnnnnnnnnnnnnnnnnnnnnnnnnnnnnnnnnnnnnnnnnnnnnnnnnnnnnnnnnnnnnnnnnnnnnnnnnnnnnnnnnnnnnnnnnnnnnnnnnnnnnnnnnnnnnnnnnnnnnnnnnnnnnnnnnnnnnnnnnnnnnnnnnnnnnnnnnnnnnnnnnnnnnnnnnnnnnnnnnnnnnnnnnnnnnnnnnnnnnnnnnnnnnnnnnnnnnnnnnnnnnnnnnnnnnnnnnnnnnnnnnnnnnnnnnnnnnnnnnnnnnnnnnnnnnnnnnnnnnnnnnnnnnnnnnnnnnnnnnnnnnnnnnnnnnnnnnnnnnnnnnnnnnnnnnnnnnnnnnnnnnnnnnnnnnnnnnnnnnnnnnnnnnnnnnnnnnnnnnnnnnnnnnnnnnnnnnnnnnnnnnnnnnnnnnnnnnnnnnnnnnnnnnnnnnnnnnnnnnnnnnnnnnnnnnnnnnnnnnnnnnnnnnnnnnnnnnnnnnnnnnnnnnnnnnnnnnnnnnnnnnnnnnnnnnnnnnnnnnnnnnnnnnnnnnnnnnnnnnnnnnnnnnnnnnnnnnnnnnnnnnnnnnnnnnnnnnnnnnnnnnnnnnnnnnnnnnnnnnnnnnnnnnnnnnnnnnnnnnnnnnnnnnnnnnnnnnnnnnnnnnnnnnnnnnnnnnnnnnnnnnnnnnnnnnnnnnnnnnnnnnnnnnnnnnnnnnnnnnnnnnnnnnnnnnnnnnnnnnnnnnnnnnnnnnnnnnnnnnnnnnnnnnnnnnnnnnnnnnnnnnnnnnnnnnnnnnnnnnnnnnnnnnnnnnnnnnnnnnnnnnnnnnnnnnnnnnnnnnnnnnnnnnnnnnnnnnnnnnnnnnnnnnnnnnnnnnnnnnnnnnnnnnnnnnnnnnnnnnnnnnnnnnnnnnnnnnnnnnnnnnnnnnnnnnnnnnnnnnnnnnnnnnnnnnnnnnnnnnnnnnnnnnnnnnnnnnnnnnnnnnnnnnnnnnnnnnnnnnnnnnnnnnnnnnnnnnnnnnnnnnnnnnnnnnnnnnnnnnnnnnnnnnnnnnnnnnnnnnnnnnnnnnnnnnnnnnnnnnnnnnnnnnnnnnnnnnnnnnnnnnnnnnnnnnnnnnnnnnnnnnnnnnnnnnnnnnnnnnnnnnnnnnnnnnnnnnnnnnnnnnnnnnnnnnnnnnnnnnnnnnnnnnnnnnnnnnnnnnnnnnnnnnnnnnnnnnnnnnnnnnnnnnnnnnnnnnnnnnnnnnnnnnnnnnnnnnnnnnnnnnnnnnnnnnnnnnnnnnnnnnnnnnnnnnnnnnnnnnnnnnnnnnnnnnnnnnnnnnnnnnnnnnnnnnnnnnnnnnnnnnnnnnnnnnnnnnnnnnnnnnnnnnnnnnnnnnnnnnnnnnnnnnnnnnnnnnnnnnnnnnnnnnnnnnnnnnnnnnnnnnnnnnnnnnnnnnnnnnnnnnnnnnnnnnnnnnnnnnnnnnnnnnnnnnnnnnnnnnnnnnnnnnnnnnnnnnnnnnnnnnnnnnnnnnnnnnnnnnnnnnnnnnnnnnnnnnnnnnnnnnnnnnnnnnnnnnnnnnnnnnnnnnnnnnnnnnnnnnnnnnnnnnnnnnnnnnnnnnnnnnnnnnnnnnnnnnnnnnnnnnnnnnnnnnnnnnnnnnnnnnnnnnnnnnnnnnnnnnnnnnnnnnnnnnnnnnnnnnnnnnnnnnnnnnnnnnnnnnnnnnnnnnnnnnnnnnnnnnnnnnnnnnnnnnnnnnnnnnnnnnnnnnnnnnnnnnnnnnnnnnnnnnnnnnnnnnnnnnnnnnnnnnnnnnnnnnnnnnnnnnnnnnnnnnnnnnnnnnnnnnnnnnnnnnnnnnnnnnnnnnnnnnnnnnnnnnnnnnnnnnnnnnnnnnnnnnnnnnnnnnnnnnnnnnnnnnnnnnnnnnnnnnnnnnnnnnnnnnnnnnnnnnnnnnnnnnnnnnnnnnnnnnnnnnnnnnnnnnnnnnnnnnnnnnnnnnnnnnnnnnnnnnnnnnnnnnnnnnnnnnnnnnnnnnnnnnnnnnnnnnnnnnnnnnnnnnnnnnnnnnnnnnnnnnnnnnnnnnnnnnnnnnnnnnnnnnnnnnnnnnnnnnnnnnnnnnnnnnnnnnnnnnnnnnnnnnnnnnnnnnnnnnnnnnnnnnnnnnnnnnnnnnnnnnnnnnnnnnnnnnnnnnnnnnnnnnnnnnnnnnnnnnnnnnnnnnnnnnnnnnnnnnnnnnnnnnnnnnnnnnnnnnnnnnnnnnnnnnnnnnnnnnnnnnnnnnnnnnnnnnnnnnnnnnnnnnnnnnnnnnnnnnnnnnnnnnnnnnnnnnnnnnnnnnnnnnnnnnnnnnnnnnnnnnnnnnnnnnnnnnnnnnnnnnnnnnnnnnnnnnnnnnnnnnnnnnnnnnnnnnnnnnnnnnnnnnnnnnnnnnnnnnnnnnnnnnnnnnnnnnnnnnnnnnnnnnnnnnnnnnnnnnnnnnnnnnnnnnnnnnnnnnnnnnnnnnnnnnnnnnnnnnnnnnnnnnnnnnnnnnnnnnnnnnnnnnnnnnnnnnnnnnnnnnnnnnnnnnnnnnnnnnnnnnnnnnnnnnnnnnnnnnnnnnnnnnnnnnnnnnnnnnnnnnnnnnnnnnnnnnnnnnnnnnnnnnnnnnnnnnnnnnnnnnnnnnnnnnnnnnnnnnnnnnnnnnnnnnnnnnnnnnnnnnnnnnnnnnnnnnnnnnnnnnnnnnnnnnnnnnnnnnnnnnnnnnnnnnnnnnnnnnnnnnnnnnnnnnnnnnnnnnnnnnnnnnnnnnnnnnnnnnnnnnnnnnnnnnnnnnnnnnnnnnnnnnnnnnnnnnnnnnnnnnnnnnnnnnnnnnnnnnnnnnnnnnnnnnnnnnnnnnnnnnnnnnnnnnnnnnnnnnnnnnnnnnnnnnnnnnnnnnnnnnnnnnnnnnnnnnnnnnnnnnnnnnnnnnnnnnnnnnnnnnnnnnnnnnnnnnnnnnnnnnnnnnnnnnnnnnnnnnnnnnnnnnnnnnnnnnnnnnnnnnnnnnnnnnnnnnnnnnnnnnnnnnnnnnnnnnnnnnnnnnnnnnnnnnnnnnnnnnnnnnnnnnnnnnnnnnnnnnnnnnnnnnnnnnnnnnnnnnnnnnnnnnnnnnnnnnnnnnnnnnnnnnnnnnnnnnnnnnnnnnnnnnnnnnnnnnnnnnnnnnnnnnnnnnnnnnnnnnnnnnnnnnnnnnnnnnnnnnnnnnnnnnnnnnnnnnnnnnnnnnnnnnnnnnnnnnnnnnnnnnnnnnnnnnnnnnnnnnnnnnnnnnnnnnnnnnnnnnnnnnnnnnnnnnnnnnnnnnnnnnnnnnnnnnnnnnnnnnnnnnnnnnnnnnnnnnnnnnnnnnnnnnnnnnnnnnnnnnnnnnnnnnnnnnnnnnnnnnnnnnnnnnnnnnnnnnnnnnnnnnnnnnnnnnnnnnnnnnnnnnnnnnnnnnnnnnnnnnnnnnnnnnnnnnnnnnnnnnnnnnnnnnnnnnnnnnnnnnnnnnnnnnnnnnnnnnnnnnnnnnnnnnnnnnnnnnnnnnnnnnnnnnnnnnnnnnnnnnnnnnnnnnnnnnnnnnnnnnnnnnnnnnnnnnnnnnnnnnnnnnnnnnnnnnnnnnnnnnnnnnnnnnnnnnnnnnnnnnnnnnnnnnnnnnnnnnnnnnnnnnnnnnnnnnnnnnnnnnnnnnnnnnnnnnnnnnnnnnnnnnnnnnnnnnnnnnnnnnnnnnnnnnnnnnnnnnnnnnnnnnnnnnnnnnnnnnnnnnnnnnnnnnnnnnnnnnnnnnnnnnnnnnnnnnnnnnnnnnnnnnnnnnnnnnnnnnnnnnnnnnnnnnnnnnnnnnnnnnnnnnnnnnnnnnnnnnnnnnnnnnnnnnnnnnnnnnnnnnnnnnnnnnnnnnnnnnnnnnnnnnnnnnnnnnnnnnnnnnnnnnnnnnnnnnnnnnnnnnnnnnnnnnnnnnnnnnnnnnnnnnnnnnnnnnnnnnnnnnnnnnnnnnnnnnnnnnnnnnnnnnnnnnnnnnnnnnnnnnnnnnnnnnnnnnnnnnnnnnnnnnnnnnnnnnnnnnnnnnnnnnnnnnnnnnnnnnnnnnnnnnnnnnnnnnnnnnnnnnnnnnnnnnnnnnnnnnnnnnnnnnnnnnnnnnnnnnnnnnnnnnnnnnnnnnnnnnnnnnnnnnnnnnnnnnnnnnnnnnnnnnnnnnnnnnnnnnnnnnnnnnnnnnnnnnnnnnnnnnnnnnnnnnnnnnnnnnnnnnnnnnnnnnnnnnnnnnnnnnnnnnnnnnnnnnnnnnnnnnnnnnnnnnnnnnnnnnnnnnnnnnnnnnnnnnnnnnnnnnnnnnnnnnnnnnnnnnnnnnnnnnnnnnnnnnnnnnnnnnnnnnnnnnnnnnnnnnnnnnnnnnnnnnnnnnnnnnnnnnnnnnnnnnnnnnnnnnnnnnnnnnnnnnnnnnnnnnnnnnnnnnnnnnnnnnnnnnnnnnnnnnnnnnnnnnnnnnnnnnnnnnnnnnnnnnnnnnnnnnnnnnnnnnnnnnnnnnnnnnnnnnnnnnnnnnnnnnnnnnnnnnnnnnnnnnnnnnnnnnnnnnnnnnnnnnnnnnnnnnnnnnnnnnnnnnnnnnnnnnnnnnnnnnnnnnnnnnnnnnnnnnnnnnnnnnnnnnnnnnnnnnnnnnnnnnnnnnnnnnnnnnnnnnnnnnnnnnnnnnnnnnnnnnnnnnnnnnnnnnnnnnnnnnnnnnnnnnnnnnnnnnnnnnnnnnnnnnnnnnnnnnnnnnnnnnnnnnnnnnnnnnnnnnnnnnnnnnnnnnnnnnnnnnnnnnnnnnnnnnnnnnnnnnnnnnnnnnnnnnnnnnnnnnnnnnnnnnnnnnnnnnnnnnnnnnnnnnnnnnnnnnnnnnnnnnnnnnnnnnnnnnnnnnnnnnnnnnnnnnnnnnnnnnnnnnnnnnnnnnnnnnnnnnnnnnnnnnnnnnnnnnnnnnnnnnnnnnnnnnnnnnnnnnnnnnnnnnnnnnnnnnnnnnnnnnnnnnnnnnnnnnnnnnnnnnnnnnnnnnnnnnnnnnnnnnnnnnnnnnnnnnnnnnnnnnnnnnnnnnnnnnnnnnnnnnnnnnnnnnnnnnnnnnnnnnnnnnnnnnnnnnnnnnnnnnnnnnnnnnnnnnnnnnnnnnnnnnnnnnnnnnnnnnnnnnnnnnnnnnnnnnnnnnnnnnnnnnnnnnnnnnnnnnnnnnnnnnnnnnnnnnnnnnnnnnnnnnnnnnnnnnnnnnnnnnnnnnnnnnnnnnnnnnnnnnnnnnnnnnnnnnnnnnnnnnnnnnnnnnnnnnnnnnnnnnnnnnnnnnnnnnnnnnnnnnnnnnnnnnnnnnnnnnnnnnnnnnnnnnnnnnnnnnnnnnnnnnnnnnnnnnnnnnnnnnnnnnnnnnnnnnnnnnnnnnnnnnnnnnnnnnnnnnnnnnnnnnnnnnnnnnnnnnnnnnnnnnnnnnnnnnnnnnnnnnnnnnnnnnnnnnnnnnnnnnnnnnnnnnnnnnnnnnnnnnnnnnnnnnnnnnnnnnnnnnnnnnnnnnnnnnnnnnnnnnnnnnnnnnnnnnnnnnnnnnnnnnnnnnnnnnnnnnnnnnnnnnnnnnnnnnnnnnnnnnnnnnnnnnnnnnnnnnnnnnnnnnnnnnnnnnnnnnnnnnnnnnnnnnnnnnnnnnnnnnnnnnnnnnnnnnnnnnnnnnnnnnnnnnnnnnnnnnnnnnnnnnnnnnnnnnnnnnnnnnnnnnnnnnnnnnnnnnnnnnnnnnnnnnnnnnnnnnnnnnnnnnnnnnnnnnnnnnnnnnnnnnnnnnnnnnnnnnnnnnnnnnnnnnnnnnnnnnnnnnnnnnnnnnnnnnnnnnnnnnnnnnnnnnnnnnnnnnnnnnnnnnnnnnnnnnnnnnnnnnnnnnnnnnnnnnnnnnnnnnnnnnnnnnnnnnnnnnnnnnnnnnnnnnnnnnnnnnnnnnnnnnnnnnnnnnnnnnnnnnnnnnnnnnnnnnnnnnnnnnnnnnnnnnnnnnnnnnnnnnnnnnnnnnnnnnnnnnnnnnnnnnnnnnnnnnnnnnnnnnnnnnnnnnnnnnnnnnnnnnnnnnnnnnnnnnnnnnnnnnnnnnnnnnnnnnnnnnnnnnnnnnnnnnnnnnnnnnnnnnnnnnnnnnnnnnnnnnnnnnnnnnnnnnnnnnnnnnnnnnnnnnnnnnnnnnnnnnnnnnnnnnnnnnnnnnnnnnnnnnnnnnnnnnnnnnnnnnnnnnnnnnnnnnnnnnnnnnnnnnnnnnnnnnnnnnnnnnnnnnnnnnnnnnnnnnnnnnnnnnnnnnnnnnnnnnnnnnnnnnnnnnnnnnnnnnnnnnnnnnnnnnnnnnnnnnnnnnnnnnnnnnnnnnnnnnnnnnnnnnnnnnnnnnnnnnnnnnnnnnnnnnnnnnnnnnnnnnnnnnnnnnnnnnnnnnnnnnnnnnnnnnnnnnnnnnnnnnnnnnnnnnnnnnnnnnnnnnnnnnnnnnnnnnnnnnnnnnnnnnnnnnnnnnnnnnnnnnnnnnnnnnnnnnnnnnnnnnnnnnnnnnnnnnnnnnnnnnnnnnnnnnnnnnnnnnnnnnnnnnnnnnnnnnnnnnnnnnnnnnnnnnnnnnnnnnnnnnnnnnnnnnnnnnnnnnnnnnnnnnnnnnnnnnnnnnnnnnnnnnnnnnnnnnnnnnnnnnnnnnnnnnnnnnnnnnnnnnnnnnnnnnnnnnnnnnnnnnnnnnnnnnnnnnnnnnnnnnnnnnnnnnnnnnnnnnnnnnnnnnnnnnnnnnnnnnnnnnnnnnnnnnnnnnnnnnnnnnnnnnnnnnnnnnnnnnnnnnnnnnnnnnnnnnnnnnnnnnnnnnnnnnnnnnnnnnnnnnnnnnnnnnnnnnnnnnnnnnnnnnnnnnnnnnnnnnnnnnnnnnnnnnnnnnnnnnnnnnnnnnnnnnnnnnnnnnnnnnnnnnnnnnnnnnnnnnnnnnnnnnnnnnnnnnnnnnnnnnnnnnnnnnnnnnnnnnnnnnnnnnnnnnnnnnnnnnnnnnnnnnnnnnnnnnnnnnnnnnnnnnnnnnnnnnnnnnnnnnnnnnnnnnnnnnnnnnnnnnnnnnnnnnnnnnnnnnnnnnnnnnnnnnnnnnnnnnnnnnnnnnnnnnnnnnnnnnnnnnnnnnnnnnnnnnnnnnnnnnnnnnnnnnnnnnnnnnnnnnnnnnnnnnnnnnnnnnnnnnnnnnnnnnnnnnnnnnnnnnnnnnnnnnnnnnnnnnnnnnnnnnnnnnnnnnnnnnnnnnnnnnnnnnnnnnnnnnnnnnnnnnnnnnnnnnnnnnnnnnnnnnnnnnnnnnnnnnnnnnnnnnnnnnnnnnnnnnnnnnnnnnnnnnnnnnnnnnnnnnnnnnnnnnnnnnnnnnnnnnnnnnnnnnnnnnnnnnnnnnnnnnnnnnnnnnnnnnnnnnnnnnnnnnnnnnnnnnnnnnnnnnnnnnnnnnnnnnnnnnnnnnnnnnnnnnnnnnnnnnnnnnnnnnnnnnnnnnnnnnnnnnnnnnnnnnnnnnnnnnnnnnnnnnnnnnnnnnnnnnnnnnnnnnnnnnnnnnnnnnnnnnnnnnnnnnnnnnnnnnnnnnnnnnnnnnnnnnnnnnnnnnnnnnnnnnnnnnnnnnnnnnnnnnnnnnnnnnnnnnnnnnnnnnnnnnnnnnnnnnnnnnnnnnnnnnnnnnnnnnnnnnnnnnnnnnnnnnnnnnnnnnnnnnnnnnnnnnnnnnnnnnnnnnnnnnnnnnnnnnnnnnnnnnnnnnnnnnnnnnnnnnnnnnnnnnnnnnnnnnnnnnnnnnnnnnnnnnnnnnnnnnnnnnnnnnnnnnnnnnnnnnnnnnnnnnnnnnnnnnnnnnnnnnnnnnnnnnnnnnnnnnnnnnnnnnnnnnnnnnnnnnnnnnnnnnnnnnnnnnnnnnnnnnnnnnnnnnnnnnnnnnnnnnnnnnnnnnnnnnnnnnnnnnnnnnnnnnnnnnnnnnnnnnnnnnnnnnnnnnnnnnnnnnnnnnnnnnnnnnnnnnnnnnnnnnnnnnnnnnnnnnnnnnnnnnnnnnnnnnnnnnnnnnnnnnnnnnnnnnnnnnnnnnnnnnnnnnnnnnnnnnnnnnnnnnnnnnnnnnnnnnnnnnnnnnnnnnnnnnnnnnnnnnnnnnnnnnnnnnnnnnnnnnnnnnnnnnnnnnnnnnnnnnnnnnnnnnnnnnnnnnnnnnnnnnnnnnnnnnnnnnnnnnnnnnnnnnnnnnnnnnnnnnnnnnnnnnnnnnnnnnnnnnnnnnnnnnnnnnnnnnnnnnnnnnnnnnnnnnnnnnnnnnnnnnnnnnnnnnnnnnnnnnnnnnnnnnnnnnnnnnnnnnnnnnnnnnnnnnnnnnnnnnnnnnnnnnnnnnnnnnnnnnnnnnnnnnnnnnnnnnnnnnnnnnnnnnnnnnnnnnnnnnnnnnnnnnnnnnnnnnnnnnnnnnnnnnnnnnnnnnnnnnnnnnnnnnnnnnnnnnnnnnnnnnnnnnnnnnnnnnnnnnnnnnnnnnnnnnnnnnnnnnnnnnnnnnnnnnnnnnnnnnnnnnnnnnnnnnnnnnnnnnnnnnnnnnnnnnnnnnnnnnnnnnnnnnnnnnnnnnnnnnnnnnnnnnnnnnnnnnnnnnnnnnnnnnnnnnnnnnnnnnnnnnnnnnnnnnnnnnnnnnnnnnnnnnnnnnnnnnnnnnnnnnnnnnnnnnnnnnnnnnnnnnnnnnnnnnnnnnnnnnnnnnnnnnnnnnnnnnnnnnnnnnnnnnnnnnnnnnnnnnnnnnnnnnnnnnnnnnnnnnnnnnnnnnnnnnnnnnnnnnnnnnnnnnnnnnnnnnnnnnnnnnnnnnnnnnnnnnnnnnnnnnnnnnnnnnnnnnnnnnnnnnnnnnnnnnnnnnnnnnnnnnnnnnnnnnnnnnnnnnnnnnnnnnnnnnnnnnnnnnnnnnnnnnnnnnnnnnnnnnnnnnnnnnnnnnnnnnnnnnnnnnnnnnnnnnnnnnnnnnnnnnnnnnnnnnnnnnnnnnnnnnnnnnnnnnnnnnnnnnnnnnnnnnnnnnnnnnnnnnnnnnnnnnnnnnnnnnnnnnnnnnnnnnnnnnnnnnnnnnnnnnnnnnnnnnnnnnnnnnnnnnnnnnnnnnnnnnnnnnnnnnnnnnnnnnnnnnnnnnnnnnnnnnnnnnnnnnnnnnnnnnnnnnnnnnnnnnnnnnnnnnnnnnnnnnnnnnnnnnnnnnnnnnnnnnnnnnnnnnnnnnnnnnnnnnnnnnnnnnnnnnnnnnnnnnnnnnnnnnnnnnnnnnnnnnnnnnnnnnnnnnnnnnnnnnnnnnnnnnnnnnnnnnnnnnnnnnnnnnnnnnnnnnnnnnnnnnnnnnnnnnnnnnnnnnnnnnnnnnnnnnnnnnnnnnnnnnnnnnnnnnnnnnnnnnnnnnnnnnnnnnnnnnnnnnnnnnnnnnnnnnnnnnnnnnnnnnnnnnnnnnnnnnnnnnnnnnnnnnnnnnnnnnnnnnnnnnnnnnnnnnnnnnnnnnnnnnnnnnnnnnnnnnnnnnnnnnnnnnnnnnnnnnnnnnnnnnnnnnnnnnnnnnnnnnnnnnnnnnnnnnnnnnnnnnnnnnnnnnnnnnnnnnnnnnnnnnnnnnnnnnnnnnnnnnnnnnnnnnnnnnnnnnnnnnnnnnnnnnnnnnnnnnnnnnnnnnnnnnnnnnnnnnnnnnnnnnnnnnnnnnnnnnnnnnnnnnnnnnnnnnnnnnnnnnnnnnnnnnnnnnnnnnnnnnnnnnnnnnnnnnnnnnnnnnnnnnnnnnnnnnnnnnnnnnnnnnnnnnnnnnnnnnnnnnnnnnnnnnnnnnnnnnnnnnnnnnnnnnnnnnnnnnnnnnnnnnnnnnnnnnnnnnnnnnnnnnnnnnnnnnnnnnnnnnnnnnnnnnnnnnnnnnnnnnnnnnnnnnnnnnnnnnnnnnnnnnnnnnnnnnnnnnnnnnnnnnnnnnnnnnnnnnnnnnnnnnnnnnnnnnnnnnnnnnnnnnnnnnnnnnnnnnnnnnnnnnnnnnnnnnnnnnnnnnnnnnnnnnnnnnnnnnnnnnnnnnnnnnnnnnnnnnnnnnnnnnnnnnnnnnnnnnnnnnnnnnnnnnnnnnnnnnnnnnnnnnnnnnnnnnnnnnnnnnnnnnnnnnnnnnnnnnnnnnnnnnnnnnnnnnnnnnnnnnnnnnnnnnnnnnnnnnnnnnnnnnnnnnnnnnnnnnnnnnnnnnnnnnnnnnnnnnnnnnnnnnnnnnnnnnnnnnnnnnnnnnnnnnnnnnnnnnnnnnnnnnnnnnnnnnnnnnnnnnnnnnnnnnnnnnnnnnnnnnnnnnnnnnnnnnnnnnnnnnnnnnnnnnnnnnnnnnnnnnnnnnnnnnnnnnnnnnnnnnnnnnnnnnnnnnnnnnnnnnnnnnnnnnnnnnnnnnnnnnnnnnnnnnnnnnnnnnnnnnnnnnnnnnnnnnnnnnnnnnnnnnnnnnnnnnnnnnnnnnnnnnnnnnnnnnnnnnnnnnnnnnnnnnnnnnnnnnnnnnnnnnnnnnnnnnnnnnnnnnnnnnnnnnnnnnnnnnnnnnnnnnnnnnnnnnnnnnnnnnnnnnnnnnnnnnnnnnnnnnnnnnnnnnnnnnnnnnnnnnnnnnnnnnnnnnnnnnnnnnnnnnnnnnnnnnnnnnnnnnnnnnnnnnnnnnnnnnnnnnnnnnnnnnnnnnnnnnnnnnnnnnnnnnnnnnnnnnnnnnnnnnnnnnnnnnnnnnnnnnnnnnnnnnnnnnnnnnnnnnnnnnnnnnnnnnnnnnnnnnnnnnnnnnnnnnnnnnnnnnnnnnnnnnnnnnnnnnnnnnnnnnnnnnnnnnnnnnnnnnnnnnnnnnnnnnnnnnnnnnnnnnnnnnnnnnnnnnnnnnnnnnnnnnnnnnnnnnnnnnnnnnnnnnnnnnnnnnnnnnnnnnnnnnnnnnnnnnnnnnnnnnnnnnnnnnnnnnnnnnnnnnnnnnnnnnnnnnnnnnnnnnnnnnnnnnnnnnnnnnnnnnnnnnnnnnnnnnnnnnnnnnnnnnnnnnnnnnnnnnnnnnnnnnnnnnnnnnnnnnnnnnnnnnnnnnnnnnnnnnnnnnnnnnnnnnnnnnnnnnnnnnnnnnnnnnnnnnnnnnnnnnnnnnnnnnnnnnnnnnnnnnnnnnnnnnnnnnnnnnnnnnnnnnnnnnnnnnnnnnnnnnnnnnnnnnnnnnnnnnnnnnnnnnnnnnnnnnnnnnnnnnnnnnnnnnnnnnnnnnnnnnnnnnnnnnnnnnnnnnnnnnnnnnnnnnnnnnnnnnnnnnnnnnnnnnnnnnnnnnnnnnnnnnnnnnnnnnnnnnnnnnnnnnnnnnnnnnnnnnnnnnnnnnnnnnnnnnnnnnnnnnnnnnnnnnnnnnnnnnnnnnnnnnnnnnnnnnnnnnnnnnnnnnnnnnnnnnnnnnnnnnnnnnnnnnnnnnnnnnnnnnnnnnnnnnnnnnnnnnnnnnnnnnnnnnnnnnnnnnnnnnnnnnnnnnnnnnnnnnnnnnnnnnnnnnnnnnnnnnnnnnnnnnnnnnnnnnnnnnnnnnnnnnnnnnnnnnnnnnnnnnnnnnnnnnnnnnnnnnnnnnnnnnnnnnnnnnnnnnnnnnnnnnnnnnnnnnnnnnnnnnnnnnnnnnnnnnnnnnnnnnnnnnnnnnnnnnnnnnnnnnnnnnnnnnnnnnnnnnnnnnnnnnnnnnnnnnnnnnnnnnnnnnnnnnnnnnnnnnnnnnnnnnnnnnnnnnnnnnnnnnnnnnnnnnnnnnnnnnnnnnnnnnnnnnnnnnnnnnnnnnnnnnnnnnnnnnnnnnnnnnnnnnnnnnnnnnnnnnnnnnnnnnnnnnnnnnnnnnnnnnnnnnnnnnnnnnnnnnnnnnnnnnnnnnnnnnnnnnnnnnnnnnnnnnnnnnnnnnnnnnnnnnnnnnnnnnnnnnnnnnnnnnnnnnnnnnnnnnnnnnnnnnnnnnnnnnnnnnnnnnnnnnnnnnnnnnnnnnnnnnnnnnnnnnnnnnnnnnnnnnnnnnnnnnnnnnnnnnnnnnnnnnnnnnnnnnnnnnnnnnnnnnnnnnnnnnnnnnnnnnnnnnnnnnnnnnnnnnnnnnnnnnnnnnnnnnnnnnnnnnnnnnnnnnnnnnnnnnnnnnnnnnnnnnnnnnnnnnnnnnnnnnnnnnnnnnnnnnnnnnnnnnnnnnnnnnnnnnnnnnnnnnnnnnnnnnnnnnnnnnnnnnnnnnnnnnnnnnnnnnnnnnnnnnnnnnnnnnnnnnnnnnnnnnnnnnnnnnnnnnnnnnnnnnnnnnnnnnnnnnnnnnnnnnnnnnnnnnnnnnnnnnnnnnnnnnnnnnnnnnnnnnnnnnnnnnnnnnnnnnnnnnnnnnnnnnnnnnnnnnnnnnnnnnnnnnnnnnnnnnnnnnnnnnnnnnnnnnnnnnnnnnnnnnnnnnnnnnnnnnnnnnnnnnnnnnnnnnnnnnnnnnnnnnnnnnnnnnnnnnnnnnnnnnnnnnnnnnnnnnnnnnnnnnnnnnnnnnnnnnnnnnnnnnnnnnnnnnnnnnnnnnnnnnnnnnnnnnnnnnnnnnnnnnnnnnnnnnnnnnnnnnnnnnnnnnnnnnnnnnnnnnnnnnnnnnnnnnnnnnnnnnnnnnnnnnnnnnnnnnnnnnnnnnnnnnnnnnnnnnnnnnnnnnnnnnnnnnnnnnnnnnnnnnnnnnnnnnnnnnnnnnnnnnnnnnnnnnnnnnnnnnnnnnnnnnnnnnnnnnnnnnnnnnnnnnnnnnnnnnnnnnnnnnnnnnnnnnnnnnnnnnnnnnnnnnnnnnnnnnnnnnnnnnnnnnnnnnnnnnnnnnnnnnnnnnnnnnnnnnnnnnnnnnnnnnnnnnnnnnnnnnnnnnnnnnnnnnnnnnnnnnnnnnnnnnnnnnnnnnnnnnnnnnnnnnnnnnnnnnnnnnnnnnnnnnnnnnnnnnnnnnnnnnnnnnnnnnnnnnnnnnnnnnnnnnnnnnnnnnnnnnnnnnnnnnnnnnnnnnnnnnnnnnnnnnnnnnnnnnnnnnnnnnnnnnnnnnnnnnnnnnnnnnnnnnnnnnnnnnnnnnnnnnnnnnnnnnnnnnnnnnnnnnnnnnnnnnnnnnnnnnnnnnnnnnnnnnnnnnnnnnnnnnnnnnnnnnnnnnnnnnnnnnnnnnnnnnnnnnnnnnnnnnnnnnnnnnnnnnnnnnnnnnnnnnnnnnnnnnnnnnnnnnnnnnnnnnnnnnnnnnnnnnnnnnnnnnnnnnnnnnnnnnnnnnnnnnnnnnnnnnnnnnnnnnnnnnnnnnnnnnnnnnnnnnnnnnnnnnnnnnnnnnnnnnnnnnnnnnnnnnnnnnnnnnnnnnnnnnnnnnnnnnnnnnnnnnnnnnnnnnnnnnnnnnnnnnnnnnnnnnnnnnnnnnnnnnnnnnnnnnnnnnnnnnnnnnnnnnnnnnnnnnnnnnnnnnnnnnnnnnnnnnnnnnnnnnnnnnnnnnnnnnnnnnnnnnnnnnnnnnnnnnnnnnnnnnnnnnnnnnnnnnnnnnnnnnnnnnnnnnnnnnnnnnnnnnnnnnnnnnnnnnnnnnnnnnnnnnnnnnnnnnnnnnnnnnnnnnnnnnnnnnnnnnnnnnnnnnnnnnnnnnnnnnnnnnnnnnnnnnnnnnnnnnnnnnnnnnnnnnnnnnnnnnnnnnnnnnnnnnnnnnnnnnnnnnnnnnnnnnnnnnnnnnnnnnnnnnnnnnnnnnnnnnnnnnnnnnnnnnnnnnnnnnnnnnnnnnnnnnnnnnnnnnnnnnnnnnnnnnnnnnnnnnnnnnnnnnnnnnnnnnnnnnnnnnnnnnnnnnnnnnnnnnnnnnnnnnnnnnnnnnnnnnnnnnnnnnnnnnnnnnnnnnnnnnnnnnnnnnnnnnnnnnnnnnnnnnnnnnnnnnnnnnnnnnnnnnnnnnnnnnnnnnnnnnnnnnnnnnnnnnnnnnnnnnnnnnnnnnnnnnnnnnnnnnnnnnnnnnnnnnnnnnnnnnnnnnnnnnnnnnnnnnnnnnnnnnnnnnnnnnnnnnnnnnnnnnnnnnnnnnnnnnnnnnnnnnnnnnnnnnnnnnnnnnnnnnnnnnnnnnnnnnnnnnnnnnnnnnnnnnnnnnnnnnnnnnnnnnnnnnnnnnnnnnnnnnnnnnnnnnnnnnnnnnnnnnnnnnnnnnnnnnnnnnnnnnnnnnnnnnnnnnnnnnnnnnnnnnnnnnnnnnnnnnnnnnnnnnnnnnnnnnnnnnnnnnnnnnnnnnnnnnnnnnnnnnnnnnnnnnnnnnnnnnnnnnnnnnnnnnnnnnnnnnnnnnnnnnnnnnnnnnnnnnnnnnnnnnnnnnnnnnnnnnnnnnnnnnnnnnnnnnnnnnnnnnnnnnnnnnnnnnnnnnnnnnnnnnnnnnnnnnnnnnnnnnnnnnnnnnnnnnnnnnnnnnnnnnnnnnnnnnnnnnnnnnnnnnnnnnnnnnnnnnnnnnnnnnnnnnnnnnnnnnnnnnnnnnnnnnnnnnnnnnnnnnnnnnnnnnnnnnnnnnnnnnnnnnnnnnnnnnnnnnnnnnnnnnnnnnnnnnnnnnnnnnnnnnnnnnnnnnnnnnnnnnnnnnnnnnnnnnnnnnnnnnnnnnnnnnnnnnnnnnnnnnnnnnnnnnnnnnnnnnnnnnnnnnnnnnnnnnnnnnnnnnnnnnnnnnnnnnnnnnnnnnnnnnnnnnnnnnnnnnnnnnnnnnnnnnnnnnnnnnnnnnnnnnnnnnnnnnnnnnnnnnnnnnnnnnnnnnnnnnnnnnnnnnnnnnnnnnnnnnnnnnnnnnnnnnnnnnnnnnnnnnnnnnnnnnnnnnnnnnnnnnnnnnnnnnnnnnnnnnnnnnnnnnnnnnnnnnnnnnnnnnnnnnnnnnnnnnnnnnnnnnnnnnnnnnnnnnnnnnnnnnnnnnnnnnnnnnnnnnnnnnnnnnnnnnnnnnnnnnnnnnnnnnnnnnnnnnnnnnnnnnnnnnnnnnnnnnnnnnnnnnnnnnnnnnnnnnnnnnnnnnnnnnnnnnnnnnnnnnnnnnnnnnnnnnnnnnnnnnnnnnnnnnnnnnnnnnnnnnnnnnnnnnnnnnnnnnnnnnnnnnnnnnnnnnnnnnnnnnnnnnnnnnnnnnnnnnnnnnnnnnnnnnnnnnnnnnnnnnnnnnnnnnnnnnnnnnnnnnnnnnnnnnnnnnnnnnnnnnnnnnnnnnnnnnnnnnnnnnnnnnnnnnnnnnnnnnnnnnnnnnnnnnnnnnnnnnnnnnnnnnnnnnnnnnnnnnnnnnnnnnnnnnnnnnnnnnnnnnnnnnnnnnnnnnnnnnnnnnnnnnnnnnnnnnnnnnnnnnnnnnnnnnnnnnnnnnnnnnnnnnnnnnnnnnnnnnnnnnnnnnnnnnnnnnnnnnnnnnnnnnnnnnnnnnnnnnnnnnnnnnnnnnnnnnnnnnnnnnnnnnnnnnnnnnnnnnnnnnnnnnnnnnnnnnnnnnnnnnnnnnnnnnnnnnnnnnnnnnnnnnnnnnnnnnnnnnnnnnnnnnnnnnnnnnnnnnnnnnnnnnnnnnnnnnnnnnnnnnnnnnnnnnnnnnnnnnnnnnnnnnnnnnnnnnnnnnnnnnnnnnnnnnnnnnnnnnnnnnnnnnnnnnnnnnnnnnnnnnnnnnnnnnnnnnnnnnnnnnnnnnnnnnnnnnnnnnnnnnnnnnnnnnnnnnnnnnnnnnnnnnnnnnnnnnnnnnnnnnnnnnnnnnnnnnnnnnnnnnnnnnnnnnnnnnnnnnnnnnnnnnnnnnnnnnnnnnnnnnnnnnnnnnnnnnnnnnnnnnnnnnnnnnnnnnnnnnnnnnnnnnnnnnnnnnnnnnnnnnnnnnnnnnnnnnnnnnnnnnnnnnnnnnnnnnnnnnnnnnnnnnnnnnnnnnnnnnnnnnnnnnnnnnnnnnnnnnnnnnnnnnnnnnnnnnnnnnnnnnnnnnnnnnnnnnnnnnnnnnnnnnnnnnnnnnnnnnnnnnnnnnnnnnnnnnnnnnnnnnnnnnnnnnnnnnnnnnnnnnnnnnnnnnnnnnnnnnnnnnnnnnnnnnnnnnnnnnnnnnnnnnnnnnnnnnnnnnnnnnnnnnnnnnnnnnnnnnnnnnnnnnnnnnnnnnnnnnnnnnnnnnnnnnnnnnnnnnnnnnnnnnnnnnnnnnnnnnnnnnnnnnnnnnnnnnnnnnnnnnnnnnnnnnnnnnnnnnnnnnnnnnnnnnnnnnnnnnnnnnnnnnnnnnnnnnnnnnnnnnnnnnnnnnnnnnnnnnnnnnnnnnnnnnnnnnnnnnnnnnnnnnnnnnnnnnnnnnnnnnnnnnnnnnnnnnnnnnnnnnnnnnnnnnnnnnnnnnnnnnnnnnnnnnnnnnnnnnnnnnnnnnnnnnnnnnnnnnnnnnnnnnnnnnnnnnnnnnnnnnnnnnnnnnnnnnnnnnnnnnnnnnnnnnnnnnnnnnnnnnnnnnnnnnnnnnnnnnnnnnnnnnnnnnnnnnnnnnnnnnnnnnnnnnnnnnnnnnnnnnnnnnnnnnnnnnnnnnnnnnnnnnnnnnnnnnnnnnnnnnnnnnnnnnnnnnnnnnnnnnnnnnnnnnnnnnnnnnnnnnnnnnnnnnnnnnnnnnnnnnnnnnnnnnnnnnnnnnnnnnnnnnnnnnnnnnnnnnnnnnnnnnnnnnnnnnnnnnnnnnnnnnnnnnnnnnnnnnnnnnnnnnnnnnnnnnnnnnnnnnnnnnnnnnnnnnnnnnnnnnnnnnnnnnnnnnnnnnnnnnnnnnnnnnnnnnnnnnnnnnnnnnnnnnnnnnnnnnnnnnnnnnnnnnnnnnnnnnnnnnnnnnnnnnnnnnnnnnnnnnnnnnnnnnnnnnnnnnnnnnnnnnnnnnnnnnnnnnnnnnnnnnnnnnnnnnnnnnnnnnnnnnnnnnnnnnnnnnnnnnnnnnnnnnnnnnnnnnnnnnnnnnnnnnnnnnnnnnnnnnnnnnnnnnnnnnnnnnnnnnnnnnnnnnnnnnnnnnnnnnnnnnnnnnnnnnnnnnnnnnnnnnnnnnnnnnnnnnnnnnnnnnnnnnnnnnnnnnnnnnnnnnnnnnnnnnnnnnnnnnnnnnnnnnnnnnnnnnnnnnnnnnnnnnnnnnnnnnnnnnnnnnnnnnnnnnnnnnnnnnnnnnnnnnnnnnnnnnnnnnnnnnnnnnnnnnnnnnnnnnnnnnnnnnnnnnnnnnnnnnnnnnnnnnnnnnnnnnnnnnnnnnnnnnnnnnnnnnnnnnnnnnnnnnnnnnnnnnnnnnnnnnnnnnnnnnnnnnnnnnnnnnnnnnnnnnnnnnnnnnnnnnnnnnnnnnnnnnnnnnnnnnnnnnnnnnnnnnnnnnnnnnnnnnnnnnnnnnnnnnnnnnnnnnnnnnnnnnnnnnnnnnnnnnnnnnnnnnnnnnnnnnnnnnnnnnnnnnnnnnnnnnnnnnnnnnnnnnnnnnnnnnnnnnnnnnnnnnnnnnnnnnnnnnnnnnnnnnnnnnnnnnnnnnnnnnnnnnnnnnnnnnnnnnnnnnnnnnnnnnnnnnnnnnnnnnnnnnnnnnnnnnnnnnnnnnnnnnnnnnnnnnnnnnnnnnnnnnnnnnnnnnnnnnnnnnnnnnnnnnnnnnnnnnnnnnnnnnnnnnnnnnnnnnnnnnnnnnnnnnnnnnnnnnnnnnnnnnnnnnnnnnnnnnnnnnnnnnnnnnnnnnnnnnnnnnnnnnnnnnnnnnnnnnnnnnnnnnnnnnnnnnnnnnnnnnnnnnnnnnnnnnnnnnnnnnnnnnnnnnnnnnnnnnnnnnnnnnnnnnnnnnnnnnnnnnnnnnnnnnnnnnnnnnnnnnnnnnnnnnnnnnnnnnnnnnnnnnnnnnnnnnnnnnnnnnnnnnnnnnnnnnnnnnnnnnnnnnnnnnnnnnnnnnnnnnnnnnnnnnnnnnnnnnnnnnnnnnnnnnnnnnnnnnnnnnnnnnnnnnnnnnnnnnnnnnnnnnnnnnnnnnnnnnnnnnnnnnnnnnnnnnnnnnnnnnnnnnnnnnnnnnnnnnnnnnnnnnnnnnnnnnnnnnnnnnnnnnnnnnnnnnnnnnnnnnnnnnnnnnnnnnnnnnnnnnnnnnnnnnnnnnnnnnnnnnnnnnnnnnnnnnnnnnnnnnnnnnnnnnnnnnnnnnnnnnnnnnnnnnnnnnnnnnnnnnnnnnnnnnnnnnnnnnnnnnnnnnnnnnnnnnnnnnnnnnnnnnnnnnnnnnnnnnnnnnnnnnnnnnnnnnnnnnnnnnnnnnnnnnnnnnnnnnnnnnnnnnnnnnnnnnnnnnnnnnnnnnnnnnnnnnnnnnnnnnnnnnnnnnnnnnnnnnnnnnnnnnnnnnnnnnnnnnnnnnnnnnnnnnnnnnnnnnnnnnnnnnnnnnnnnnnnnnnnnnnnnnnnnnnnnnnnnnnnnnnnnnnnnnnnnnnnnnnnnnnnnnnnnnnnnnnnnnnnnnnnnnnnnnnnnnnnnnnnnnnnnnnnnnnnnnnnnnnnnnnnnnnnnnnnnnnnnnnnnnnnnnnnnnnnnnnnnnnnnnnnnnnnnnnnnnnnnnnnnnnnnnnnnnnnnnnnnnnnnnnnnnnnnnnnnnnnnnnnnnnnnnnnnnnnnnnnnnnnnnnnnnnnnnnnnnnnnnnnnnnnnnnnnnnnnnnnnnnnnnnnnnnnnnnnnnnnnnnnnnnnnnnnnnnnnnnnnnnnnnnnnnnnnnnnnnnnnnnnnnnnnnnnnnnnnnnnnnnnnnnnnnnnnnnnnnnnnnnnnnnnnnnnnnnnnnnnnnnnnnnnnnnnnnnnnnnnnnnnnnnnnnnnnnnnnnnnnnnnnnnnnnnnnnnnnnnnnnnnnnnnnnnnnnnnnnnnnnnnnnnnnnnnnnnnnnnnnnnnnnnnnnnnnnnnnnnnnnnnnnnnnnnnnnnnnnnnnnnnnnnnnnnnnnnnnnnnnnnnnnnnnnnnnnnnnnnnnnnnnnnnnnnnnnnnnnnnnnnnnnnnnnnnnnnnnnnnnnnnnnnnnnnnnnnnnnnnnnnnnnnnnnnnnnnnnnnnnnnnnnnnnnnnnnnnnnnnnnnnnnnnnnnnnnnnnnnnnnnnnnnnnnnnnnnnnnnnnnnnnnnnnnnnnnnnnnnnnnnnnnnnnnnnnnnnnnnnnnnnnnnnnnnnnnnnnnnnnnnnnnnnnnnnnnnnnnnnnnnnnnnnnnnnnnnnnnnnnnnnnnnnnnnnnnnnnnnnnnnnnnnnnnnnnnnnnnnnnnnnnnnnnnnnnnnnnnnnnnnnnnnnnnnnnnnnnnnnnnnnnnnnnnnnnnnnnnnnnnnnnnnnnnnnnnnnnnnnnnnnnnnnnnnnnnnnnnnnnnnnnnnnnnnnnnnnnnnnnnnnnnnnnnnnnnnnnnnnnnnnnnnnnnnnnnnnnnnnnnnnnnnnnnnnnnnnnnnnnnnnnnnnnnnnnnnnnnnnnnnnnnnnnnnnnnnnnnnnnnnnnnnnnnnnnnnnnnnnnnnnnnnnnnnnnnnnnnnnnnnnnnnnnnnnnnnnnnnnnnnnnnnnnnnnnnnnnnnnnnnnnnnnnnnnnnnnnnnnnnnnnnnnnnnnnnnnnnnnnnnnnnnnnnnnnnnnnnnnnnnnnnnnnnnnnnnnnnnnnnnnnnnnnnnnnnnnnnnnnnnnnnnnnnnnnnnnnnnnnnnnnnnnnnnnnnnnnnnnnnnnnnnnnnnnnnnnnnnnnnnnnnnnnnnnnnnnnnnnnnnnnnnnnnnnnnnnnnnnnnnnnnnnnnnnnnnnnnnnnnnnnnnnnnnnnnnnnnnnnnnnnnnnnnnnnnnnnnnnnnnnnnnnnnnnnnnnnnnnnnnnnnnnnnnnnnnnnnnnnnnnnnnnnnnnnnnnnnnnnnnnnnnnnnnnnnnnnnnnnnnnnnnnnnnnnnnnnnnnnnnnnnnnnnnnnnnnnnnnnnnnnnnnnnnnnnnnnnnnnnnnnnnnnnnnnnnnnnnnnnnnnnnnnnnnnnnnnnnnnnnnnnnnnnnnnnnnnnnnnnnnnnnnnnnnnnnnnnnnnnnnnnnnnnnnnnnnnnnnnnnnnnnnnnnnnnnnnnnnnnnnnnnnnnnnnnnnnnnnnnnnnnnnnnnnnnnnnnnnnnnnnnnnnnnnnnnnnnnnnnnnnnnnnnnnnnnnnnnnnnnnnnnnnnnnnnnnnnnnnnnnnnnnnnnnnnnnnnnnnnnnnnnnnnnnnnnnnnnnnnnnnnnnnnnnnnnnnnnnnnnnnnnnnnnnnnnnnnnnnnnnnnnnnnnnnnnnnnnnnnnnnnnnnnnnnnnnnnnnnnnnnnnnnnnnnnnnnnnnnnnnnnnnnnnnnnnnnnnnnnnnnnnnnnnnnnnnnnnnnnnnnnnnnnnnnnnnnnnnnnnnnnnnnnnnnnnnnnnnnnnnnnnnnnnnnnnnnnnnnnnnnnnnnnnnnnnnnnnnnnnnnnnnnnnnnnnnnnnnnnnnnnnnnnnnnnnnnnnnnnnnnnnnnnnnnnnnnnnnnnnnnnnnnnnnnnnnnnnnnnnnnnnnnnnnnnnnnnnnnnnnnnnnnnnnnnnnnnnnnnnnnnnnnnnnnnnnnnnnnnnnnnnnnnnnnnnnnnnnnnnnnnnnnnnnnnnnnnnnnnnnnnnnnnnnnnnnnnnnnnnnnnnnnnnnnnnnnnnnnnnnnnnnnnnnnnnnnnnnnnnnnnnnnnnnnnnnnnnnnnnnnnnnnnnnnnnnnnnnnnnnnnnnnnnnnnnnnnnnnnnnnnnnnnnnnnnnnnnnnnnnnnnnnnnnnnnnnnnnnnnnnnnnnnnnnnnnnnnnnnnnnnnnnnnnnnnnnnnnnnnnnnnnnnnnnnnnnnnnnnnnnnnnnnnnnnnnnnnnnnnnnnnnnnnnnnnnnnnnnnnnnnnnnnnnnnnnnnnnnnnnnnnnnnnnnnnnnnnnnnnnnnnnnnnnnnnnnnnnnnnnnnnnnnnnnnnnnnnnnnnnnnnnnnnnnnnnnnnnnnnnnnnnnnnnnnnnnnnnnnnnnnnnnnnnnnnnnnnnnnnnnnnnnnnnnnnnnnnnnnnnnnnnnnnnnnnnnnnnnnnnnnnnnnnnnnnnnnnnnnnnnnnnnnnnnnnnnnnnnnnnnnnnnnnnnnnnnnnnnnnnnnnnnnnnnnnnnnnnnnnnnnnnnnnnnnnnnnnnnnnnnnnnnnnnnnnnnnnnnnnnnnnnnnnnnnnnnnnnnnnnnnnnnnnnnnnnnnnnnnnnnnnnnnnnnnnnnnnnnnnnnnnnnnnnnnnnnnnnnnnnnnnnnnnnnnnnnnnnnnnnnnnnnnnnnnnnnnnnnnnnnnnnnnnnnnnnnnnnnnnnnnnnnnnnnnnnnnnnnnnnnnnnnnnnnnnnnnnnnnnnnnnnnnnnnnnnnnnnnnnnnnnnnnnnnnnnnnnnnnnnnnnnnnnnnnnnnnnnnnnnnnnnnnnnnnnnnnnnnnnnnnnnnnnnnnnnnnnnnnnnnnnnnnnnnnnnnnnnnnnnnnnnnnnnnnnnnnnnnnnnnnnnnnnnnnnnnnnnnnnnnnnnnnnnnnnnnnnnnnnnnnnnnnnnnnnnnnnnnnnnnnnnnnnnnnnnnnnnnnnnnnnnnnnnnnnnnnnnnnnnnnnnnnnnnnnnnnnnnnnnnnnnnnnnnnnnnnnnnnnnnnnnnnnnnnnnnnnnnnnnnnnnnnnnnnnnnnnnnnnnnnnnnnnnnnnnnnnnnnnnnnnnnnnnnnnnnnnnnnnnnnnnnnnnnnnnnnnnnnnnnnnnnnnnnnnnnnnnnnnnnnnnnnnnnnnnnnnnnnnnnnnnnnnnnnnnnnnnnnnnnnnnnnnnnnnnnnnnnnnnnnnnnnnnnnnnnnnnnnnnnnnnnnnnnnnnnnnnnnnnnnnnnnnnnnnnnnnnnnnnnnnnnnnnnnnnnnnnnnnnnnnnnnnnnnnnnnnnnnnnnnnnnnnnnnnnnnnnnnnnnnnnnnnnnnnnnnnnnnnnnnnnnnnnnnnnnnnnnnnnnnnnnnnnnnnnnnnnnnnnnnnnnnnnnnnnnnnnnnnnnnnnnnnnnnnnnnnnnnnnnnnnnnnnnnnnnnnnnnnnnnnnnnnnnnnnnnnnnnnnnnnnnnnnnnnnnnnnnnnnnnnnnnnnnnnnnnnnnnnnnnnnnnnnnnnnnnnnnnnnnnnnnnnnnnnnnnnnnnnnnnnnnnnnnnnnnnnnnnnnnnnnnnnnnnnnnnnnnnnnnnnnnnnnnnnnnnnnnnnnnnnnnnnnnnnnnnnnnnnnnnnnnnnnnnnnnnnnnnnnnnnnnnnnnnnnnnnnnnnnnnnnnnnnnnnnnnnnnnnnnnnnnnnnnnnnnnnnnnnnnnnnnnnnnnnnnnnnnnnnnnnnnnnnnnnnnnnnnnnnnnnnnnnnnnnnnnnnnnnnnnnnnnnnnnnnnnnnnnnnnnnnnnnnnnnnnnnnnnnnnnnnnnnnnnnnnnnnnnnnnnnnnnnnnnnnnnnnnnnnnnnnnnnnnnnnnnnnnnnnnnnnnnnnnnnnnnnnnnnnnnnnnnnnnnnnnnnnnnnnnnnnnnnnnnnnnnnnnnnnnnnnnnnnnnnnnnnnnnnnnnnnnnnnnnnnnnnnnnnnnnnnnnnnnnnnnnnnnnnnnnnnnnnnnnnnnnnnnnnnnnnnnnnnnnnnnnnnnnnnnnnnnnnnnnnnnnnnnnnnnnnnnnnnnnnnnnnnnnnnnnnnnnnnnnnnnnnnnnnnnnnnnnnnnnnnnnnnnnnnnnnnnnnnnnnnnnnnnnnnnnnnnnnnnnnnnnnnnnnnnnnnnnnnnnnnnnnnnnnnnnnnnnnnnnnnnnnnnnnnnnnnnnnnnnnnnnnnnnnnnnnnnnnnnnnnnnnnnnnnnnnnnnnnnnnnnnnnnnnnnnnnnnnnnnnnnnnnnnnnnnnnnnnnnnnnnnnnnnnnnnnnnnnnnnnnnnnnnnnnnnnnnnnnnnnnnnnnnnnnnnnnnnnnnnnnnnnnnnnnnnnnnnnnnnnnnnnnnnnnnnnnnnnnnnnnnnnnnnnnnnnnnnnnnnnnnnnnnnnnnnnnnnnnnnnnnnnnnnnnnnnnnnnnnnnnnnnnnnnnnnnnnnnnnnnnnnnnnnnnnnnnnnnnnnnnnnnnnnnnnnnnnnnnnnnnnnnnnnnnnnnnnnnnnnnnnnnnnnnnnnnnnnnnnnnnnnnnnnnnnnnnnnnnnnnnnnnnnnnnnnnnnnnnnnnnnnnnnnnnnnnnnnnnnnnnnnnnnnnnnnnnnnnnnnnnnnnnnnnnnnnnnnnnnnnnnnnnnnnnnnnnnnnnnnnnnnnnnnnnnnnnnnnnnnnnnnnnnnnnnnnnnnnnnnnnnnnnnnnnnnnnnnnnnnnnnnnnnnnnnnnnnnnnnnnnnnnnnnnnnnnnnnnnnnnnnnnnnnnnnnnnnnnnnnnnnnnnnnnnnnnnnnnnnnnnnnnnnnnnnnnnnnnnnnnnnnnnnnnnnnnnnnnnnnnnnnnnnnnnnnnnnnnnnnnnnnnnnnnnnnnnnnnnnnnnnnnnnnnnnnnnnnnnnnnnnnnnnnnnnnnnnnnnnnnnnnnnnnnnnnnnnnnnnnnnnnnnnnnnnnnnnnnnnnnnnnnnnnnnnnnnnnnnnnnnnnnnnnnnnnnnnnnnnnnnnnnnnnnnnnnnnnnnnnnnnnnnnnnnnnnnnnnnnnnnnnnnnnnnnnnnnnnnnnnnnnnnnnnnnnnnnnnnnnnnnnnnnnnnnnnnnnnnnnnnnnnnnnnnnnnnnnnnnnnnnnnnnnnnnnnnnnnnnnnnnnnnnnnnnnnnnnnnnnnnnnnnnnnnnnnnnnnnnnnnnnnnnnnnnnnnnnnnnnnnnnnnnnnnnnnnnnnnnnnnnnnnnnnnnnnnnnnnnnnnnnnnnnnnnnnnnnnnnnnnnnnnnnnnnnnnnnnnnnnnnnnnnnnnnnnnnnnnnnnnnnnnnnnnnnnnnnnnnnnnnnnnnnnnnnnnnnnnnnnnnnnnnnnnnnnnnnnnnnnnnnnnnnnnnnnnnnnnnnnnnnnnnnnnnnnnnnnnnnnnnnnnnnnnnnnnnnnnnnnnnnnnnnnnnnnnnnnnnnnnnnnnnnnnnnnnnnnnnnnnnnnnnnnnnnnnnnnnnnnnnnnnnnnnnnnnnnnnnnnnnnnnnnnnnnnnnnnnnnnnnnnnnnnnnnnnnnnnnnnnnnnnnnnnnnnnnnnnnnnnnnnnnnnnnnnnnnnnnnnnnnnnnnnnnnnnnnnnnnnnnnnnnnnnnnnnnnnnnnnnnnnnnnnnnnnnnnnnnnnnnnnnnnnnnnnnnnnnnnnnnnnnnnnnnnnnnnnnnnnnnnnnnnnnnnnnnnnnnnnnnnnnnnnnnnnnnnnnnnnnnnnnnnnnnnnnnnnnnnnnnnnnnnnnnnnnnnnnnnnnnnnnnnnnnnnnnnnnnnnnnnnnnnnnnnnnnnnnnnnnnnnnnnnnnnnnnnnnnnnnnnnnnnnnnnnnnnnnnnnnnnnnnnnnnnnnnnnnnnnnnnnnnnnnnnnnnnnnnnnnnnnnnnnnnnnnnnnnnnnnnnnnnnnnnnnnnnnnnnnnnnnnnnnnnnnnnnnnnnnnnnnnnnnnnnnnnnnnnnnnnnnnnnnnnnnnnnnnnnnnnnnnnnnnnnnnnnnnnnnnnnnnnnnnnnnnnnnnnnnnnnnnnnnnnnnnnnnnnnnnnnnnnnnnnnnnnnnnnnnnnnnnnnnnnnnnnnnnnnnnnnnnnnnnnnnnnnnnnnnnnnnnnnnnnnnnnnnnnnnnnnnnnnnnnnnnnnnnnnnnnnnnnnnnnnnnnnnnnnnnnnnnnnnnnnnnnnnnnnnnnnnnnnnnnnnnnnnnnnnnnnnnnnnnnnnnnnnnnnnnnnnnnnnnnnnnnnnnnnnnnnnnnnnnnnnnnnnnnnnnnnnnnnnnnnnnnnnnnnnnnnnnnnnnnnnnnnnnnnnnnnnnnnnnnnnnnnnnnnnnnnnnnnnnnnnnnnnnnnnnnnnnnnnnnnnnnnnnnnnnnnnnnnnnnnnnnnnnnnnnnnnnnnnnnnnnnnnnnnnnnnnnnnnnnnnnnnnnnnnnnnnnnnnnnnnnnnnnnnnnnnnnnnnnnnnnnnnnnnnnnnnnnnnnnnnnnnnnnnnnnnnnnnnnnnnnnnnnnnnnnnnnnnnnnnnnnnnnnnnnnnnnnnnnnnnnnnnnnnnnnnnnnnnnnnnnnnnnnnnnnnnnnnnnnnnnnnnnnnnnnnnnnnnnnnnnnnnnnnnnnnnnnnnnnnnnnnnnnnnnnnnnnnnnnnnnnnnnnnnnnnnnnnnnnnnnnnnnnnnnnnnnnnnnnnnnnnnnnnnnnnnnnnnnnnnnnnnnnnnnnnnnnnnnnnnnnnnnnnnnnnnnnnnnnnnnnnnnnnnnnnnnnnnnnnnnnnnnnnnnnnnnnnnnnnnnnnnnnnnnnnnnnnnnnnnnnnnnnnnnnnnnnnnnnnnnnnnnnnnnnnnnnnnnnnnnnnnnnnnnnnnnnnnnnnnnnnnnnnnnnnnnnnnnnnnnnnnnnnnnnnnnnnnnnnnnnnnnnnnnnnnnnnnnnnnnnnnnnnnnnnnnnnnnnnnnnnnnnnnnnnnnnnnnnnnnnnnnnnnnnnnnnnnnnnnnnnnnnnnnnnnnnnnnnnnnnnnnnnnnnnnnnnnnnnnnnnnnnnnnnnnnnnnnnnnnnnnnnnnnnnnnnnnnnnnnnnnnnnnnnnnnnnnnnnnnnnnnnnnnnnnnnnnnnnnnnnnnnnnnnnnnnnnnnnnnnnnnnnnnnnnnnnnnnnnnnnnnnnnnnnnnnnnnnnnnnnnnnnnnnnnnnnnnnnnnnnnnnnnnnnnnnnnnnnnnnnnnnnnnnnnnnnnnnnnnnnnnnnnnnnnnnnnnnnnnnnnnnnnnnnnnnnnnnnnnnnnnnnnnnnnnnnnnnnnnnnnnnnnnnnnnnnnnnnnnnnnnnnnnnnnnnnnnnnnnnnnnnnnnnnnnnnnnnnnnnnnnnnnnnnnnnnnnnnnnnnnnnnnnnnnnnnnnnnnnnnnnnnnnnnnnnnnnnnnnnnnnnnnnnnnnnnnnnnnnnnnnnnnnnnnnnnnnnnnnnnnnnnnnnnnnnnnnnnnnnnnnnnnnnnnnnnnnnnnnnnnnnnnnnnnnnnnnnnnnnnnnnnnnnnnnnnnnnnnnnnnnnnnnnnnnnnnnnnnnnnnnnnnnnnnnnnnnnnnnnnnnnnnnnnnnnnnnnnnnnnnnnnnnnnnnnnnnnnnnnnnnnnnnnnnnnnnnnnnnnnnnnnnnnnnnnnnnnnnnnnnnnnnnnnnnnnnnnnnnnnnnnnnnnnnnnnnnnnnnnnnnnnnnnnnnnnnnnnnnnnnnnnnnnnnnnnnnnnnnnnnnnnnnnnnnnnnnnnnnnnnnnnnnnnnnnnnnnnnnnnnnnnnnnnnnnnnnnnnnnnnnnnnnnnnnnnnnnnnnnnnnnnnnnnnnnnnnnnnnnnnnnnnnnnnnnnnnnnnnnnnnnnnnnnnnnnnnnnnnnnnnnnnnnnnnnnnnnnnnnnnnnnnnnnnnnnnnnnnnnnnnnnnnnnnnnnnnnnnnnnnnnnnnnnnnnnnnnnnnnnnnnnnnnnnnnnnnnnnnnnnnnnnnnnnnnnnnnnnnnnnnnnnnnnnnnnnnnnnnnnnnnnnnnnnnnnnnnnnnnnnnnnnnnnnnnnnnnnnnnnnnnnnnnnnnnnnnnnnnnnnnnnnnnnnnnnnnnnnnnnnnnnnnnnnnnnnnnnnnnnnnnnnnnnnnnnnnnnnnnnnnnnnnnnnnnnnnnnnnnnnnnnnnnnnnnnnnnnnnnnnnnnnnnnnnnnnnnnnnnnnnnnnnnnnnnnnnnnnnnnnnnnnnnnnnnnnnnnnnnnnnnnnnnnnnnnnnnnnnnnnnnnnnnnnnnnnnnnnnnnnnnnnnnnnnnnnnnnnnnnnnnnnnnnnnnnnnnnnnnnnnnnnnnnnnnnnnnnnnnnnnnnnnnnnnnnnnnnnnnnnnnnnnnnnnnnnnnnnnnnnnnnnnnnnnnnnnnnnnnnnnnnnnnnnnnnnnnnnnnnnnnnnnnnnnnnnnnnnnnnnnnnnnnnnnnnnnnnnnnnnnnnnnnnnnnnnnnnnnnnnnnnnnnnnnnnnnnnnnnnnnnnnnnnnnnnnnnnnnnnnnnnnnnnnnnnnnnnnnnnnnnnnnnnnnnnnnnnnnnnnnnnnnnnnnnnnnnnnnnnnnnnnnnnnnnnnnnnnnnnnnnnnnnnnnnnnnnnnnnnnnnnnnnnnnnnnnnnnnnnnnnnnnnnnnnnnnnnnnnnnnnnnnnnnnnnnnnnnnnnnnnnnnnnnnnnnnnnnnnnnnnnnnnnnnnnnnnnnnnnnnnnnnnnnnnnnnnnnnnnnnnnnnnnnnnnnnnnnnnnnnnnnnnnnnnnnnnnnnnnnnnnnnnnnnnnnnnnnnnnnnnnnnnnnnnnnnnnnnnnnnnnnnnnnnnnnnnnnnnnnnnnnnnnnnnnnnnnnnnnnnnnnnnnnnnnnnnnnnnnnnnnnnnnnnnnnnnnnnnnnnnnnnnnnnnnnnnnnnnnnnnnnnnnnnnnnnnnnnnnnnnnnnnnnnnnnnnnnnnnnnnnnnnnnnnnnnnnnnnnnnnnnnnnnnnnnnnnnnnnnnnnnnnnnnnnnnnnnnnnnnnnnnnnnnnnnnnnnnnnnnnnnnnnnnnnnnnnnnnnnnnnnnnnnnnnnnnnnnnnnnnnnnnnnnnnnnnnnnnnnnnnnnnnnnnnnnnnnnnnnnnnnnnnnnnnnnnnnnnnnnnnnnnnnnnnnnnnnnnnnnnnnnnnnnnnnnnnnnnnnnnnnnnnnnnnnnnnnnnnnnnnnnnnnnnnnnnnnnnnnnnnnnnnnnnnnnnnnnnnnnnnnnnnnnnnnnnnnnnnnnnnnnnnnnnnnnnnnnnnnnnnnnnnnnnnnnnnnnnnnnnnnnnnnnnnnnnnnnnnnnnnnnnnnnnnnnnnnnnnnnnnnnnnnnnnnnnnnnnnnnnnnnnnnnnnnnnnnnnnnnnnnnnnnnnnnnnnnnnnnnnnnnnnnnnnnnnnnnnnnnnnnnnnnnnnnnnnnnnnnnnnnnnnnnnnnnnnnnnnnnnnnnnnnnnnnnnnnnnnnnnnnnnnnnnnnnnnnnnnnnnnnnnnnnnnnnnnnnnnnnnnnnnnnnnnnnnnnnnnnnnnnnnnnnnnnnnnnnnnnnnnnnnnnnnnnnnnnnnnnnnnnnnnnnnnnnnnnnnnnnnnnnnnnnnnnnnnnnnnnnnnnnnnnnnnnnnnnnnnnnnnnnnnnnnnnnnnnnnnnnnnnnnnnnnnnnnnnnnnnnnnnnnnnnnnnnnnnnnnnnnnnnnnnnnnnnnnnnnnnnnnnnnnnnnnnnnnnnnnnnnnnnnnnnnnnnnnnnnnnnnnnnnnnnnnnnnnnnnnnnnnnnnnnnnnnnnnnnnnnnnnnnnnnnnnnnnnnnnnnnnnnnnnnnnnnnnnnnnnnnnnnnnnnnnnnnnnnnnnnnnnnnnnnnnnnnnnnnnnnnnnnnnnnnnnnnnnnnnnnnnnnnnnnnnnnnnnnnnnnnnnnnnnnnnnnnnnnnnnnnnnnnnnnnnnnnnnnnnnnnnnnnnnnnnnnnnnnnnnnnnnnnnnnnnnnnnnnnnnnnnnnnnnnnnnnnnnnnnnnnnnnnnnnnnnnnnnnnnnnnnnnnnnnnnnnnnnnnnnnnnnnnnnnnnnnnnnnnnnnnnnnnnnnnnnnnnnnnnnnnnnnnnnnnnnnnnnnnnnnnnnnnnnnnnnnnnnnnnnnnnnnnnnnnnnnnnnnnnnnnnnnnnnnnnnnnnnnnnnnnnnnnnnnnnnnnnnnnnnnnnnnnnnnnnnnnnnnnnnnnnnnnnnnnnnnnnnnnnnnnnnnnnnnnnnnnnnnnnnnnnnnnnnnnnnnnnnnnnnnnnnnnnnnnnnnnnnnnnnnnnnnnnnnnnnnnnnnnnnnnnnnnnnnnnnnnnnnnnnnnnnnnnnnnnnnnnnnnnnnnnnnnnnnnnnnnnnnnnnnnnnnnnnnnnnnnnnnnnnnnnnnnnnnnnnnnnnnnnnnnnnnnnnnnnnnnnnnnnnnnnnnnnnnnnnnnnnnnnnnnnnnnnnnnnnnnnnnnnnnnnnnnnnnnnnnnnnnnnnnnnnnnnnnnnnnnnnnnnnnnnnnnnnnnnnnnnnnnnnnnnnnnnnnnnnnnnnnnnnnnnnnnnnnnnnnnnnnnnnnnnnnnnnnnnnnnnnnnnnnnnnnnnnnnnnnnnnnnnnnnnnnnnnnnnnnnnnnnnnnnnnnnnnnnnnnnnnnnnnnnnnnnnnnnnnnnnnnnnnnnnnnnnnnnnnnnnnnnnnnnnnnnnnnnnnnnnnnnnnnnnnnnnnnnnnnnnnnnnnnnnnnnnnnnnnnnnnnnnnnnnnnnnnnnnnnnnnnnnnnnnnnnnnnnnnnnnnnnnnnnnnnnnnnnnnnnnnnnnnnnnnnnnnnnnnnnnnnnnnnnnnnnnnnnnnnnnnnnnnnnnnnnnnnnnnnnnnnnnnnnnnnnnnnnnnnnnnnnnnnnnnnnnnnnnnnnnnnnnnnnnnnnnnnnnnnnnnnnnnnnnnnnnnnnnnnnnnnnnnnnnnnnnnnnnnnnnnnnnnnnnnnnnnnnnnnnnnnnnnnnnnnnnnnnnnnnnnnnnnnnnnnnnnnnnnnnnnnnnnnnnnnnnnnnnnnnnnnnnnnnnnnnnnnnnnnnnnnnnnnnnnnnnnnnnnnnnnnnnnnnnnnnnnnnnnnnnnnnnnnnnnnnnnnnnnnnnnnnnnnnnnnnnnnnnnnnnnnnnnnnnnnnnnnnnnnnnnnnnnnnnnnnnnnnnnnnnnnnnnnnnnnnnnnnnnnnnnnnnnnnnnnnnnnnnnnnnnnnnnnnnnnnnnnnnnnnnnnnnnnnnnnnnnnnnnnnnnnnnnnnnnnnnnnnnnnnnnnnnnnnnnnnnnnnnnnnnnnnnnnnnnnnnnnnnnnnnnnnnnnnnnnnnnnnnnnnnnnnnnnnnnnnnnnnnnnnnnnnnnnnnnnnnnnnnnnnnnnnnnnnnnnnnnnnnnnnnnnnnnnnnnnnnnnnnnnnnnnnnnnnnnnnnnnnnnnnnnnnnnnnnnnnnnnnnnnnnnnnnnnnnnnnnnnnnnnnnnnnnnnnnnnnnnnnnnnnnnnnnnnnnnnnnnnnnnnnnnnnnnnnnnnnnnnnnnnnnnnnnnnnnnnnnnnnnnnnnnnnnnnnnnnnnnnnnnnnnnnnnnnnnnnnnnnnnnnnnnnnnnnnnnnnnnnnnnnnnnnnnnnnnnnnnnnnnnnnnnnnnnnnnnnnnnnnnnnnnnnnnnnnnnnnnnnnnnnnnnnnnnnnnnnnnnnnnnnnnnnnnnnnnnnnnnnnnnnnnnnnnnnnnnnnnnnnnnnnnnnnnnnnnnnnnnnnnnnnnnnnnnnnnnnnnnnnnnnnnnnnnnnnnnnnnnnnnnnnnnnnnnnnnnnnnnnnnnnnnnnnnnnnnnnnnnnnnnnnnnnnnnnnnnnnnnnnnnnnnnnnnnnnnnnnnnnnnnnnnnnnnnnnnnnnnnnnnnnnnnnnnnnnnnnnnnnnnnnnnnnnnnnnnnnnnnnnnnnnnnnnnnnnnnnnnnnnnnnnnnnnnnnnnnnnnnnnnnnnnnnnnnnnnnnnnnnnnnnnnnnnnnnnnnnnnnnnnnnnnnnnnnnnnnnnnnnnnnnnnnnnnnnnnnnnnnnnnnnnnnnnnnnnnnnnnnnnnnnnnnnnnnnnnnnnnnnnnnnnnnnnnnnnnnnnnnnnnnnnnnnnnnnnnnnnnnnnnnnnnnnnnnnnnnnnnnnnnnnnnnnnnnnnnnnnnnnnnnnnnnnnnnnnnnnnnnnnnnnnnnnnnnnnnnnnnnnnnnnnnnnnnnnnnnnnnnnnnnnnnnnnnnnnnnnnnnnnnnnnnnnnnnnnnnnnnnnnnnnnnnnnnnnnnnnnnnnnnnnnnnnnnnnnnnnnnnnnnnnnnnnnnnnnnnnnnnnnnnnnnnnnnnnnnnnnnnnnnnnnnnnnnnnnnnnnnnnnnnnnnnnnnnnnnnnnnnnnnnnnnnnnnnnnnnnnnnnnnnnnnnnnnnnnnnnnnnnnnnnnnnnnnnnnnnnnnnnnnnnnnnnnnnnnnnnnnnnnnnnnnnnnnnnnnnnnnnnnnnnnnnnnnnnnnnnnnnnnnnnnnnnnnnnnnnnnnnnnnnnnnnnnnnnnnnnnnnnnnnnnnnnnnnnnnnnnnnnnnnnnnnnnnnnnnnnnnnnnnnnnnnnnnnnnnnnnnnnnnnnnnnnnnnnnnnnnnnnnnnnnnnnnnnnnnnnnnnnnnnnnnnnnnnnnnnnnnnnnnnnnnnnnnnnnnnnnnnnnnnnnnnnnnnnnnnnnnnnnnnnnnnnnnnnnnnnnnnnnnnnnnnnnnnnnnnnnnnnnnnnnnnnnnnnnnnnnnnnnnnnnnnnnnnnnnnnnnnnnnnnnnnnnnnnnnnnnnnnnnnnnnnnnnnnnnnnnnnnnnnnnnnnnnnnnnnnnnnnnnnnnnnnnnnnnnnnnnnnnnnnnnnnnnnnnnnnnnnnnnnnnnnnnnnnnnnnnnnnnnnnnnnnnnnnnnnnnnnnnnnnnnnnnnnnnnnnnnnnnnnnnnnnnnnnnnnnnnnnnnnnnnnnnnnnnnnnnnnnnnnnnnnnnnnnnnnnnnnnnnnnnnnnnnnnnnnnnnnnnnnnnnnnnnnnnnnnnnnnnnnnnnnnnnnnnnnnnnnnnnnnnnnnnnnnnnnnnnnnnnnnnnnnnnnnnnnnnnnnnnnnnnnnnnnnnnnnnnnnnnnnnnnnnnnnnnnnnnnnnnnnnnnnnnnnnnnnnnnnnnnnnnnnnnnnnnnnnnnnnnnnnnnnnnnnnnnnnnnnnnnnnnnnnnnnnnnnnnnnnnnnnnnnnnnnnnnnnnnnnnnnnnnnnnnnnnnnnnnnnnnnnnnnnnnnnnnnnnnnnnnnnnnnnnnnnnnnnnnnnnnnnnnnnnnnnnnnnnnnnnnnnnnnnnnnnnnnnnnnnnnnnnnnnnnnnnnnnnnnnnnnnnnnnnnnnnnnnnnnnnnnnnnnnnnnnnnnnnnnnnnnnnnnnnnnnnnnnnnnnnnnnnnnnnnnnnnnnnnnnnnnnnnnnnnnnnnnnnnnnnnnnnnnnnnnnnnnnnnnnnnnnnnnnnnnnnnnnnnnnnnnnnnnnnnnnnnnnnnnnnnnnnnnnnnnnnnnnnnnnnnnnnnnnnnnnnnnnnnnnnnnnnnnnnnnnnnnnnnnnnnnnnnnnnnnnnnnnnnnnnnnnnnnnnnnnnnnnnnnnnnnnnnnnnnnnnnnnnnnnnnnnnnnnnnnnnnnnnnnnnnnnnnnnnnnnnnnnnnnnnnnnnnnnnnnnnnnnnnnnnnnnnnnnnnnnnnnnnnnnnnnnnnnnnnnnnnnnnnnnnnnnnnnnnnnnnnnnnnnnnnnnnnnnnnnnnnnnnnnnnnnnnnnnnnnnnnnnnnnnnnnnnnnnnnnnnnnnnnnnnnnnnnnnnnnnnnnnnnnnnnnnnnnnnnnnnnnnnnnnnnnnnnnnnnnnnnnnnnnnnnnnnnnnnnnnnnnnnnnnnnnnnnnnnnnnnnnnnnnnnnnnnnnnnnnnnnnnnnnnnnnnnnnnnnnnnnnnnnnnnnnnnnnnnnnnnnnnnnnnnnnnnnnnnnnnnnnnnnnnnnnnnnnnnnnnnnnnnnnnnnnnnnnnnnnnnnnnnnnnnnnnnnnnnnnnnnnnnnnnnnnnnnnnnnnnnnnnnnnnnnnnnnnnnnnnnnnnnnnnnnnnnnnnnnnnnnnnnnnnnnnnnnnnnnnnnnnnnnnnnnnnnnnnnnnnnnnnnnnnnnnnnnnnnnnnnnnnnnnnnnnnnnnnnnnnnnnnnnnnnnnnnnnnnnnnnnnnnnnnnnnnnnnnnnnnnnnnnnnnnnnnnnnnnnnnnnnnnnnnnnnnnnnnnnnnnnnnnnnnnnnnnnnnnnnnnnnnnnnnnnnnnnnnnnnnnnnnnnnnnnnnnnnnnnnnnnnnnnnnnnnnnnnnnnnnnnnnnnnnnnnnnnnnnnnnnnnnnnnnnnnnnnnnnnnnnnnnnnnnnnnnnnnnnnnnnnnnnnnnnnnnnnnnnnnnnnnnnnnnnnnnnnnnnnnnnnnnnnnnnnnnnnnnnnnnnnnnnnnnnnnnnnnnnnnnnnnnnnnnnnnnnnnnnnnnnnnnnnnnnnnnnnnnnnnnnnnnnnnnnnnnnnnnnnnnnnnnnnnnnnnnnnnnnnnnnnnnnnnnnnnnnnnnnnnnnnnnnnnnnnnnnnnnnnnnnnnnnnnnnnnnnnnnnnnnnnnnnnnnnnnnnnnnnnnnnnnnnnnnnnnnnnnnnnnnnnnnnnnnnnnnnnnnnnnnnnnnnnnnnnnnnnnnnnnnnnnnnnnnnnnnnnnnnnnnnnnnnnnnnnnnnnnnnnnnnnnnnnnnnnnnnnnnnnnnnnnnnnnnnnnnnnnnnnnnnnnnnnnnnnnnnnnnnnnnnnnnnnnnnnnnnnnnnnnnnnnnnnnnnnnnnnnnnnnnnnnnnnnnnnnnnnnnnnnnnnnnnnnnnnnnnnnnnnnnnnnnnnnnnnnnnnnnnnnnnnnnnnnnnnnnnnnnnnnnnnnnnnnnnnnnnnnnnnnnnnnnnnnnnnnnnnnnnnnnnnnnnnnnnnnnnnnnnnnnnnnnnnnnnnnnnnnnnnnnnnnnnnnnnnnnnnnnnnnnnnnnnnnnnnnnnnnnnnnnnnnnnnnnnnnnnnnnnnnnnnnnnnnnnnnnnnnnnnnnnnnnnnnnnnnnnnnnnnnnnnnnnnnnnnnnnnnnnnnnnnnnnnnnnnnnnnnnnnnnnnnnnnnnnnnnnnnnnnnnnnnnnnnnnnnnnnnnnnnnnnnnnnnnnnnnnnnnnnnnnnnnnnnnnnnnnnnnnnnnnnnnnnnnnnnnnnnnnnnnnnnnnnnnnnnnnnnnnnnnnnnnnnnnnnnnnnnnnnnnnnnnnnnnnnnnnnnnnnnnnnnnnnnnnnnnnnnnnnnnnnnnnnnnnnnnnnnnnnnnnnnnnnnnnnnnnnnnnnnnnnnnnnnnnnnnnnnnnnnnnnnnnnnnnnnnnnnnnnnnnnnnnnnnnnnnnnnnnnnnnnnnnnnnnnnnnnnnnnnnnnnnnnnnnnnnnnnnnnnnnnnnnnnnnnnnnnnnnnnnnnnnnnnnnnnnnnnnnnnnnnnnnnnnnnnnnnnnnnnnnnnnnnnnnnnnnnnnnnnnnnnnnnnnnnnnnnnnnnnnnnnnnnnnnnnnnnnnnnnnnnnnnnnnnnnnnnnnnnnnnnnnnnnnnnnnnnnnnnnnnnnnnnnnnnnnnnnnnnnnnnnnnnnnnnnnnnnnnnnnnnnnnnnnnnnnnnnnnnnnnnnnnnnnnnnnnnnnnnnnnnnnnnnnnnnnnnnnnnnnnnnnnnnnnnnnnnnnnnnnnnnnnnnnnnnnnnnnnnnnnnnnnnnnnnnnnnnnnnnnnnnnnnnnnnnnnnnnnnnnnnnnnnnnnnnnnnnnnnnnnnnnnnnnnnnnnnnnnnnnnnnnnnnnnnnnnnnnnnnnnnnnnnnnnnnnnnnnnnnnnnnnnnnnnnnnnnnnnnnnnnnnnnnnnnnnnnnnnnnnnnnnnnnnnnnnnnnnnnnnnnnnnnnnnnnnnnnnnnnnnnnnnnnnnnnnnnnnnnnnnnnnnnnnnnnnnnnnnnnnnnnnnnnnnnnnnnnnnnnnnnnnnnnnnnnnnnnnnnnnnnnnnnnnnnnnnnnnnnnnnnnnnnnnnnnnnnnnnnnnnnnnnnnnnnnnnnnnnnnnnnnnnnnnnnnnnnnnnnnnnnnnnnnnnnnnnnnnnnnnnnnnnnnnnnnnnnnnnnnnnnnnnnnnnnnnnnnnnnnnnnnnnnnnnnnnnnnnnnnnnnnnnnnnnnnnnnnnnnnnnnnnnnnnnnnnnnnnnnnnnnnnnnnnnnnnnnnnnnnnnnnnnnnnnnnnnnnnnnnnnnnnnnnnnnnnnnnnnnnnnnnnnnnnnnnnnnnnnnnnnnnnnnnnnnnnnnnnnnnnnnnnnnnnnnnnnnnnnnnnnnnnnnnnnnnnnnnnnnnnnnnnnnnnnnnnnnnnnnnnnnnnnnnnnnnnnnnnnnnnnnnnnnnnnnnnnnnnnnnnnnnnnnnnnnnnnnnnnnnnnnnnnnnnnnnnnnnnnnnnnnnnnnnnnnnnnnnnnnnnnnnnnnnnnnnnnnnnnnnnnnnnnnnnnnnnnnnnnnnnnnnnnnnnnnnnnnnnnnnnnnnnnnnnnnnnnnnnnnnnnnnnnnnnnnnnnnnnnnnnnnnnnnnnnnnnnnnnnnnnnnnnnnnnnnnnnnnnnnnnnnnnnnnnnnnnnnnnnnnnnnnnnnnnnnnnnnnnnnnnnnnnnnnnnnnnnnnnnnnnnnnnnnnnnnnnnnnnnnnnnnnnnnnnnnnnnnnnnnnnnnnnnnnnnnnnnnnnnnnnnnnnnnnnnnnnnnnnnnnnnnnnnnnnnnnnnnnnnnnnnnnnnnnnnnnnnnnnnnnnnnnnnnnnnnnnnnnnnnnnnnnnnnnnnnnnnnnnnnnnnnnnnnnnnnnnnnnnnnnnnnnnnnnnnnnnnnnnnnnnnnnnnnnnnnnnnnnnnnnnnnnnnnnnnnnnnnnnnnnnnnnnnnnnnnnnnnnnnnnnnnnnnnnnnnnnnnnnnnnnnnnnnnnnnnnnnnnnnnnnnnnnnnnnnnnnnnnnnnnnnnnnnnnnnnnnnnnnnnnnnnnnnnnnnnnnnnnnnnnnnnnnnnnnnnnnnnnnnnnnnnnnnnnnnnnnnnnnnnnnnnnnnnnnnnnnnnnnnnnnnnnnnnnnnnnnnnnnnnnnnnnnnnnnnnnnnnnnnnnnnnnnnnnnnnnnnnnnnnnnnnnnnnnnnnnnnnnnnnnnnnnnnnnnnnnnnnnnnnnnnnnnnnnnnnnnnnnnnnnnnnnnnnnnnnnnnnnnnnnnnnnnnnnnnnnnnnnnnnnnnnnnnnnnnnnnnnnnnnnnnnnnnnnnnnnnnnnnnnnnnnnnnnnnnnnnnnnnnnnnnnnnnnnnnnnnnnnnnnnnnnnnnnnnnnnnnnnnnnnnnnnnnnnnnnnnnnnnnnnnnnnnnnnnnnnnnnnnnnnnnnnnnnnnnnnnnnnnnnnnnnnnnnnnnnnnnnnnnnnnnnnnnnnnnnnnnnnnnnnnnnnnnnnnnnnnnnnnnnnnnnnnnnnnnnnnnnnnnnnnnnnnnnnnnnnnnnnnnnnnnnnnnnnnnnnnnnnnnnnnnnnnnnnnnnnnnnnnnnnnnnnnnnnnnnnnnnnnnnnnnnnnnnnnnnnnnnnnnnnnnnnnnnnnnnnnnnnnnnnnnnnnnnnnnnnnnnnnnnnnnnnnnnnnnnnnnnnnnnnnnnnnnnnnnnnnnnnnnnnnnnnnnnnnnnnnnnnnnnnnnnnnnnnnnnnnnnnnnnnnnnnnnnnnnnnnnnnnnnnnnnnnnnnnnnnnnnnnnnnnnnnnnnnnnnnnnnnnnnnnnnnnnnnnnnnnnnnnnnnnnnnnnnnnnnnnnnnnnnnnnnnnnnnnnnnnnnnnnnnnnnnnnnnnnnnnnnnnnnnnnnnnnnnnnnnnnnnnnnnnnnnnnnnnnnnnnnnnnnnnnnnnnnnnnnnnnnnnnnnnnnnnnnnnnnnnnnnnnnnnnnnnnnnnnnnnnnnnnnnnnnnnnnnnnnnnnnnnnnnnnnnnnnnnnnnnnnnnnnnnnnnnnnnnnnnnnnnnnnnnnnnnnnnnnnnnnnnnnnnnnnnnnnnnnnnnnnnnnnnnnnnnnnnnnnnnnnnnnnnnnnnnnnnnnnnnnnnnnnnnnnnnnnnnnnnnnnnnnnnnnnnnnnnnnnnnnnnnnnnnnnnnnnnnnnnnnnnnnnnnnnnnnnnnnnnnnnnnnnnnnnnnnnnnnnnnnnnnnnnnnnnnnnnnnnnnnnnnnnnnnnnnnnnnnnnnnnnnnnnnnnnnnnnnnnnnnnnnnnnnnnnnnnnnnnnnnnnnnnnnnnnnnnnnnnnnnnnnnnnnnnnnnnnnnnnnnnnnnnnnnnnnnnnnnnnnnnnnnnnnnnnnnnnnnnnnnnnnnnnnnnnnnnnnnnnnnnnnnnnnnnnnnnnnnnnnnnnnnnnnnnnnnnnnnnnnnnnnnnnnnnnnnnnnnnnnnnnnnnnnnnnnnnnnnnnnnnnnnnnnnnnnnnnnnnnnnnnnnnnnnnnnnnnnnnnnnnnnnnnnnnnnnnnnnnnnnnnnnnnnnnnnnnnnnnnnnnnnnnnnnnnnnnnnnnnnnnnnnnnnnnnnnnnnnnnnnnnnnnnnnnnnnnnnnnnnnnnnnnnnnnnnnnnnnnnnnnnnnnnnnnnnnnnnnnnnnnnnnnnnnnnnnnnnnnnnnnnnnnnnnnnnnnnnnnnnnnnnnnnnnnnnnnnnnnnnnnnnnnnnnnnnnnnnnnnnnnnnnnnnnnnnnnnnnnnnnnnnnnnnnnnnnnnnnnnnnnnnnnnnnnnnnnnnnnnnnnnnnnnnnnnnnnnnnnnnnnnnnnnnnnnnnnnnnnnnnnnnnnnnnnnnnnnnnnnnnnnnnnnnnnnnnnnnnnnnnnnnnnnnnnnnnnnnnnnnnnnnnnnnnnnnnnnnnnnnnnnnnnnnnnnnnnnnnnnnnnnnnnnnnnnnnnnnnnnnnnnnnnnnnnnnnnnnnnnnnnnnnnnnnnnnnnnnnnnnnnnnnnnnnnnnnnnnnnnnnnnnnnnnnnnnnnnnnnnnnnnnnnnnnnnnnnnnnnnnnnnnnnnnnnnnnnnnnnnnnnnnnnnnnnnnnnnnnnnnnnnnnnnnnnnnnnnnnnnnnnnnnnnnnnnnnnnnnnnnnnnnnnnnnnnnnnnnnnnnnnnnnnnnnnnnnnnnnnnnnnnnnnnnnnnnnnnnnnnnnnnnnnnnnnnnnnnnnnnnnnnnnnnnnnnnnnnnnnnnnnnnnnnnnnnnnnnnnnnnnnnnnnnnnnnnnnnnnnnnnnnnnnnnnnnnnnnnnnnnnnnnnnnnnnnnnnnnnnnnnnnnnnnnnnnnnnnnnnnnnnnnnnnnnnnnnnnnnnnnnnnnnnnnnnnnnnnnnnnnnnnnnnnnnnnnnnnnnnnnnnnnnnnnnnnnnnnnnnnnnnnnnnnnnnnnnnnnnnnnnnnnnnnnnnnnnnnnnnnnnnnnnnnnnnnnnnnnnnnnnnnnnnnnnnnnnnnnnnnnnnnnnnnnnnnnnnnnnnnnnnnnnnnnnnnnnnnnnnnnnnnnnnnnnnnnnnnnnnnnnnnnnnnnnnnnnnnnnnnnnnnnnnnnnnnnnnnnnnnnnnnnnnnnnnnnnnnnnnnnnnnnnnnnnnnnnnnnnnnnnnnnnnnnnnnnnnnnnnnnnnnnnnnnnnnnnnnnnnnnnnnnnnnnnnnnnnnnnnnnnnnnnnnnnnnnnnnnnnnnnnnnnnnnnnnnnnnnnnnnnnnnnnnnnnnnnnnnnnnnnnnnnnnnnnnnnnnnnnnnnnnnnnnnnnnnnnnnnnnnnnnnnnnnnnnnnnnnnnnnnnnnnnnnnnnnnnnnnnnnnnnnnnnnnnnnnnnnnnnnnnnnnnnnnnnnnnnnnnnnnnnnnnnnnnnnnnnnnnnnnnnnnnnnnnnnnnnnnnnnnnnnnnnnnnnnnnnnnnnnnnnnnnnnnnnnnnnnnnnnnnnnnnnnnnnnnnnnnnnnnnnnnnnnnnnnnnnnnnnnnnnnnnnnnnnnnnnnnnnnnnnnnnnnnnnnnnnnnnnnnnnnnnnnnnnnnnnnnnnnnnnnnnnnnnnnnnnnnnnnnnnnnnnnnnnnnnnnnnnnnnnnnnnnnnnnnnnnnnnnnnnnnnnnnnnnnnnnnnnnnnnnnnnnnnnnnnnnnnnnnnnnnnnnnnnnnnnnnnnnnnnnnnnnnnnnnnnnnnnnnnnnnnnnnnnnnnnnnnnnnnnnnnnnnnnnnnnnnnnnnnnnnnnnnnnnnnnnnnnnnnnnnnnnnnnnnnnnnnnnnnnnnnnnnnnnnnnnnnnnnnnnnnnnnnnnnnnnnnnnnnnnnnnnnnnnnnnnnnnnnnnnnnnnnnnnnnnnnnnnnnnnnnnnnnnnnnnnnnnnnnnnnnnnnnnnnnnnnnnnnnnnnnnnnnnnnnnnnnnnnnnnnnnnnnnnnnnnnnnnnnnnnnnnnnnnnnnnnnnnnnnnnnnnnnnnnnnnnnnnnnnnnnnnnnnnnnnnnnnnnnnnnnnnnnnnnnnnnnnnnnnnnnnnnnnnnnnnnnnnnnnnnnnnnnnnnnnnnnnnnnnnnnnnnnnnnnnnnnnnnnnnnnnnnnnnnnnnnnnnnnnnnnnnnnnnnnnnnnnnnnnnnnnnnnnnnnnnnnnnnnnnnnnnnnnnnnnnnnnnnnnnnnnnnnnnnnnnnnnnnnnnnnnnnnnnnnnnnnnnnnnnnnnnnnnnnnnnnnnnnnnnnnnnnnnnnnnnnnnnnnnnnnnnnnnnnnnnnnnnnnnnnnnnnnnnnnnnnnnnnnnnnnnnnnnnnnnnnnnnnnnnnnnnnnnnnnnnnnnnnnnnnnnnnnnnnnnnnnnnnnnnnnnnnnnnnnnnnnnnnnnnnnnnnnnnnnnnnnnnnnnnnnnnnnnnnnnnnnnnnnnnnnnnnnnnnnnnnnnnnnnnnnnnnnnnnnnnnnnnnnnnnnnnnnnnnnnnnnnnnnnnnnnnnnnnnnnnnnnnnnnnnnnnnnnnnnnnnnnnnnnnnnnnnnnnnnnnnnnnnnnnnnnnnnnnnnnnnnnnnnnnnnnnnnnnnnnnnnnnnnnnnnnnnnnnnnnnnnnnnnnnnnnnnnnnnnnnnnnnnnnnnnnnnnnnnnnnnnnnnnnnnnnnnnnnnnnnnnnnnnnnnnnnnnnnnnnnnnnnnnnnnnnnnnnnnnnnnnnnnnnnnnnnnnnnnnnnnnnnnnnnnnnnnnnnnnnnnnnnnnnnnnnnnnnnnnnnnnnnnnnnnnnnnnnnnnnnnnnnnnnnnnnnnnnnnnnnnnnnnnnnnnnnnnnnnnnnnnnnnnnnnnnnnnnnnnnnnnnnnnnnnnnnnnnnnnnnnnnnnnnnnnnnnnnnnnnnnnnnnnnnnnnnnnnnnnnnnnnnnnnnnnnnnnnnnnnnnnnnnnnnnnnnnnnnnnnnnnnnnnnnnnnnnnnnnnnnnnnnnnnnnnnnnnnnnnnnnnnnnnnnnnnnnnnnnnnnnnnnnnnnnnnnnnnnnnnnnnnnnnnnnnnnnnnnnnnnnnnnnnnnnnnnnnnnnnnnnnnnnnnnnnnnnnnnnnnnnnnnnnnnnnnnnnnnnnnnnnnnnnnnnnnnnnnnnnnnnnnnnnnnnnnnnnnnnnnnnnnnnnnnnnnnnnnnnnnnnnnnnnnnnnnnnnnnnnnnnnnnnnnnnnnnnnnnnnnnnnnnnnnnnnnnnnnnnnnnnnnnnnnnnnnnnnnnnnnnnnnnnnnnnnnnnnnnnnnnnnnnnnnnnnnnnnnnnnnnnnnnnnnnnnnnnnnnnnnnnnnnnnnnnnnnnnnnnnnnnnnnnnnnnnnnnnnnnnnnnnnnnnnnnnnnnnnnnnnnnnnnnnnnnnnnnnnnnnnnnnnnnnnnnnnnnnnnnnnnnnnnnnnnnnnnnnnnnnnnnnnnnnnnnnnnnnnnnnnnnnnnnnnnnnnnnnnnnnnnnnnnnnnnnnnnnnnnnnnnnnnnnnnnnnnnnnnnnnnnnnnnnnnnnnnnnnnnnnnnnnnnnnnnnnnnnnnnnnnnnnnnnnnnnnnnnnnnnnnnnnnnnnnnnnnnnnnnnnnnnnnnnnnnnnnnnnnnnnnnnnnnnnnnnnnnnnnnnnnnnnnnnnnnnnnnnnnnnnnnnnnnnnnnnnnnnnnnnnnnnnnnnnnnnnnnnnnnnnnnnnnnnnnnnnnnnnnnnnnnnnnnnnnnnnnnnnnnnnnnnnnnnnnnnnnnnnnnnnnnnnnnnnnnnnnnnnnnnnnnnnnnnnnnnnnnnnnnnnnnnnnnnnnnnnnnnnnnnnnnnnnnnnnnnnnnnnnnnnnnnnnnnnnnnnnnnnnnnnnnnnnnnnnnnnnnnnnnnnnnnnnnnnnnnnnnnnnnnnnnnnnnnnnnnnnnnnnnnnnnnnnnnnnnnnnnnnnnnnnnnnnnnnnnnnnnnnnnnnnnnnnnnnnnnnnnnnnnnnnnnnnnnnnnnnnnnnnnnnnnnnnnnnnnnnnnnnnnnnnnnnnnnnnnnnnnnnnnnnnnnnnnnnnnnnnnnnnnnnnnnnnnnnnnnnnnnnnnnnnnnnnnnnnnnnnnnnnnnnnnnnnnnnnnnnnnnnnnnnnnnnnnnnnnnnnnnnnnnnnnnnnnnnnnnnnnnnnnnnnnnnnnnnnnnnnnnnnnnnnnnnnnnnnnnnnnnnnnnnnnnnnnnnnnnnnnnnnnnnnnnnnnnnnnnnnnnnnnnnnnnnnnnnnnnnnnnnnnnnnnnnnnnnnnnnnnnnnnnnnnnnnnnnnnnnnnnnnnnnnnnnnnnnnnnnnnnnnnnnnnnnnnnnnnnnnnnnnnnnnnnnnnnnnnnnnnnnnnnnnnnnnnnnnnnnnnnnnnnnnnnnnnnnnnnnnnnnnnnnnnnnnnnnnnnnnnnnnnnnnnnnnnnnnnnnnnnnnnnnnnnnnnnnnnnnnnnnnnnnnnnnnnnnnnnnnnnnnnnnnnnnnnnnnnnnnnnnnnnnnnnnnnnnnnnnnnnnnnnnnnnnnnnnnnnnnnnnnnnnnnnnnnnnnnnnnnnnnnnnnnnnnnnnnnnnnnnnnnnnnnnnnnnnnnnnnnnnnnnnnnnnnnnnnnnnnnnnnnnnnnnnnnnnnnnnnnnnnnnnnnnnnnnnnnnnnnnnnnnnnnnnnnnnnnnnnnnnnnnnnnnnnnnnnnnnnnnnnnnnnnnnnnnnnnnnnnnnnnnnnnnnnnnnnnnnnnnnnnnnnnnnnnnnnnnnnnnnnnnnnnnnnnnnnnnnnnnnnnnnnnnnnnnnnnnnnnnnnnnnnnnnnnnnnnnnnnnnnnnnnnnnnnnnnnnnnnnnnnnnnnnnnnnnnnnnnnnnnnnnnnnnnnnnnnnnnnnnnnnnnnnnnnnnnnnnnnnnnnnnnnnnnnnnnnnnnnnnnnnnnnnnnnnnnnnnnnnnnnnnnnnnnnnnnnnnnnnnnnnnnnnnnnnnnnnnnnnnnnnnnnnnnnnnnnnnnnnnnnnnnnnnnnnnnnnnnnnnnnnnnnnnnnnnnnnnnnnnnnnnnnnnnnnnnnnnnnnnnnnnnnnnnnnnnnnnnnnnnnnnnnnnnnnnnnnnnnnnnnnnnnnnnnnnnnnnnnnnnnnnnnnnnnnnnnnnnnnnnnnnnnnnnnnnnnnnnnnnnnnnnnnnnnnnnnnnnnnnnnnnnnnnnnnnnnnnnnnnnnnnnnnnnnnnnnnnnnnnnnnnnnnnnnnnnnnnnnnnnnnnnnnnnnnnnnnnnnnnnnnnnnnnnnnnnnnnnnnnnnnnnnnnnnnnnnnnnnnnnnnnnnnnnnnnnnnnnnnnnnnnnnnnnnnnnnnnnnnnnnnnnnnnnnnnnnnnnnnnnnnnnnnnnnnnnnnnnnnnnnnnnnnnnnnnnnnnnnnnnnnnnnnnnnnnnnnnnnnnnnnnnnnnnnnnnnnnnnnnnnnnnnnnnnnnnnnnnnnnnnnnnnnnnnnnnnnnnnnnnnnnnnnnnnnnnnnnnnnnnnnnnnnnnnnnnnnnnnnnnnnnnnnnnnnnnnnnnnnnnnnnnnnnnnnnnnnnnnnnnnnnnnnnnnnnnnnnnnnnnnnnnnnnnnnnnnnnnnnnnnnnnnnnnnnnnnnnnnnnnnnnnnnnnnnnnnnnnnnnnnnnnnnnnnnnnnnnnnnnnnnnnnnnnnnnnnnnnnnnnnnnnnnnnnnnnnnnnnnnnnnnnnnnnnnnnnnnnnnnnnnnnnnnnnnnnnnnnnnnnnnnnnnnnnnnnnnnnnnnnnnnnnnnnnnnnnnnnnnnnnnnnnnnnnnnnnnnnnnnnnnnnnnnnnnnnnnnnnnnnnnnnnnnnnnnnnnnnnnnnnnnnnnnnnnnnnnnnnnnnnnnnnnnnnnnnnnnnnnnnnnnnnnnnnnnnnnnnnnnnnnnnnnnnnnnnnnnnnnnnnnnnnnnnnnnnnnnnnnnnnnnnnnnnnnnnnnnnnnnnnnnnnnnnnnnnnnnnnnnnnnnnnnnnnnnnnnnnnnnnnnnnnnnnnnnnnnnnnnnnnnnnnnnnnnnnnnnnnnnnnnnnnnnnnnnnnnnnnnnnnnnnnnnnnnnnnnnnnnnnnnnnnnnnnnnnnnnnnnnnnnnnnnnnnnnnnnnnnnnnnnnnnnnnnnnnnnnnnnnnnnnnnnnnnnnnnnnnnnnnnnnnnnnnnnnnnnnnnnnnnnnnnnnnnnnnnnnnnnnnnnnnnnnnnnnnnnnnnnnnnnnnnnnnnnnnnnnnnnnnnnnnnnnnnnnnnnnnnnnnnnnnnnnnnnnnnnnnnnnnnnnnnnnnnnnnnnnnnnnnnnnnnnnnnnnnnnnnnnnnnnnnnnnnnnnnnnnnnnnnnnnnnnnnnnnnnnnnnnnnnnnnnnnnnnnnnnnnnnnnnnnnnnnnnnnnnnnnnnnnnnnnnnnnnnnnnnnnnnnnnnnnnnnnnnnnnnnnnnnnnnnnnnnnnnnnnnnnnnnnnnnnnnnnnnnnnnnnnnnnnnnnnnnnnnnnnnnnnnnnnnnnnnnnnnnnnnnnnnnnnnnnnnnnnnnnnnnnnnnnnnnnnnnnnnnnnnnnnnnnnnnnnnnnnnnnnnnnnnnnnnnnnnnnnnnnnnnnnnnnnnnnnnnnnnnnnnnnnnnnnnnnnnnnnnnnnnnnnnnnnnnnnnnnnnnnnnnnnnnnnnnnnnnnnnnnnnnnnnnnnnnnnnnnnnnnnnnnnnnnnnnnnnnnnnnnnnnnnnnnnnnnnnnnnnnnnnnnnnnnnnnnnnnnnnnnnnnnnnnnnnnnnnnnnnnnnnnnnnnnnnnnnnnnnnnnnnnnnnnnnnnnnnnnnnnnnnnnnnnnnnnnnnnnnnnnnnnnnnnnnnnnnnnnnnnnnnnnnnnnnnnnnnnnnnnnnnnnnnnnnnnnnnnnnnnnnnnnnnnnnnnnnnnnnnnnnnnnnnnnnnnnnnnnnnnnnnnnnnnnnnnnnnnnnnnnnnnnnnnnnnnnnnnnnnnnnnnnnnnnnnnnnnnnnnnnnnnnnnnnnnnnnnnnnnnnnnnnnnnnnnnnnnnnnnnnnnnnnnnnnnnnnnnnnnnnnnnnnnnnnnnnnnnnnnnnnnnnnnnnnnnnnnnnnnnnnnnnnnnnnnnnnnnnnnnnnnnnnnnnnnnnnnnnnnnnnnnnnnnnnnnnnnnnnnnnnnnnnnnnnnnnnnnnnnnnnnnnnnnnnnnnnnnnnnnnnnnnnnnnnnnnnnnnnnnnnnnnnnnnnnnnnnnnnnnnnnnnnnnnnnnnnnnnnnnnnnnnnnnnnnnnnnnnnnnnnnnnnnnnnnnnnnnnnnnnnnnnnnnnnnnnnnnnnnnnnnnnnnnnnnnnnnnnnnnnnnnnnnnnnnnnnnnnnnnnnnnnnnnnnnnnnnnnnnnnnnnnnnnnnnnnnnnnnnnnnnnnnnnnnnnnnnnnnnnnnnnnnnnnnnnnnnnnnnnnnnnnnnnnnnnnnnnnnnnnnnnnnnnnnnnnnnnnnnnnnnnnnnnnnnnnnnnnnnnnnnnnnnnnnnnnnnnnnnnnnnnnnnnnnnnnnnnnnnnnnnnnnnnnnnnnnnnnnnnnnnnnnnnnnnnnnnnnnnnnnnnnnnnnnnnnnnnnnnnnnnnnnnnnnnnnnnnnnnnnnnnnnnnnnnnnnnnnnnnnnnnnnnnnnnnnnnnnnnnnnnnnnnnnnnnnnnnnnnnnnnnnnnnnnnnnnnnnnnnnnnnnnnnnnnnnnnnnnnnnnnnnnnnnnnnnnnnnnnnnnnnnnnnnnnnnnnnnnnnnnnnnnnnnnnnnnnnnnnnnnnnnnnnnnnnnnnnnnnnnnnnnnnnnnnnnnnnnnnnnnnnnnnnnnnnnnnnnnnnnnnnnnnnnnnnnnnnnnnnnnnnnnnnnnnnnnnnnnnnnnnnnnnnnnnnnnnnnnnnnnnnnnnnnnnnnnnnnnnnnnnnnnnnnnnnnnnnnnnnnnnnnnnnnnnnnnnnnnnnnnnnnnnnnnnnnnnnnnnnnnnnnnnnnnnnnnnnnnnnnnnnnnnnnnnnnnnnnnnnnnnnnnnnnnnnnnnnnnnnnnnnnnnnnnnnnnnnnnnnnnnnnnnnnnnnnnnnnnnnnnnnnnnnnnnnnnnnnnnnnnnnnnnnnnnnnnnnnnnnnnnnnnnnnnnnnnnnnnnnnnnnnnnnnnnnnnnnnnnnnnnnnnnnnnnnnnnnnnnnnnnnnnnnnnnnnnnnnnnnnnnnnnnnnnnnnnnnnnnnnnnnnnnnnnnnnnnnnnnnnnnnnnnnnnnnnnnnnnnnnnnnnnnnnnnnnnnnnnnnnnnnnnnnnnnnnnnnnnnnnnnnnnnnnnnnnnnnnnnnnnnnnnnnnnnnnnnnnnnnnnnnnnnnnnnnnnnnnnnnnnnnnnnnnnnnnnnnnnnnnnnnnnnnnnnnnnnnnnnnnnnnnnnnnnnnnnnnnnnnnnnnnnnnnnnnnnnnnnnnnnnnnnnnnnnnnnnnnnnnnnnnnnnnnnnnnnnnnnnnnnnnnnnnnnnnnnnnnnnnnnnnnnnnnnnnnnnnnnnnnnnnnnnnnnnnnnnnnnnnnnnnnnnnnnnnnnnnnnnnnnnnnnnnnnnnnnnnnnnnnnnnnnnnnnnnnnnnnnnnnnnnnnnnnnnnnnnnnnnnnnnnnnnnnnnnnnnnnnnnnnnnnnnnnnnnnnnnnnnnnnnnnnnnnnnnnnnnnnnnnnnnnnnnnnnnnnnnnnnnnnnnnnnnnnnnnnnnnnnnnnnnnnnnnnnnnnnnnnnnnnnnnnnnnnnnnnnnnnnnnnnnnnnnnnnnnnnnnnnnnnnnnnnnnnnnnnnnnnnnnnnnnnnnnnnnnnnnnnnnnnnnnnnnnnnnnnnnnnnnnnnnnnnnnnnnnnnnnnnnnnnnnnnnnnnnnnnnnnnnnnnnnnnnnnnnnnnnnnnnnnnnnnnnnnnnnnnnnnnnnnnnnnnnnnnnnnnnnnnnnnnnnnnnnnnnnnnnnnnnnnnnnnnnnnnnnnnnnnnnnnnnnnnnnnnnnnnnnnnnnnnnnnnnnnnnnnnnnnnnnnnnnnnnnnnnnnnnnnnnnnnnnnnnnnnnnnnnnnnnnnnnnnnnnnnnnnnnnnnnnnnnnnnnnnnnnnnnnnnnnnnnnnnnnnnnnnnnnnnnnnnnnnnnnnnnnnnnnnnnnnnnnnnnnnnnnnnnnnnnnnnnnnnnnnnnnnnnnnnnnnnnnnnnnnnnnnnnnnnnnnnnnnnnnnnnnnnnnnnnnnnnnnnnnnnnnnnnnnnnnnnnnnnnnnnnnnnnnnnnnnnnnnnnnnnnnnnnnnnnnnnnnnnnnnnnnnnnnnnnnnnnnnnnnnnnnnnnnnnnnnnnnnnnnnnnnnnnnnnnnnnnnnnnnnnnnnnnnnnnnnnnnnnnnnnnnnnnnnnnnnnnnnnnnnnnnnnnnnnnnnnnnnnnnnnnnnnnnnnnnnnnnnnnnnnnnnnnnnnnnnnnnnnnnnnnnnnnnnnnnnnnnnnnnnnnnnnnnnnnnnnnnnnnnnnnnnnnnnnnnnnnnnnnnnnnnnnnnnnnnnnnnnnnnnnnnnnnnnnnnnnnnnnnnnnnnnnnnnnnnnnnnnnnnnnnnnnnnnnnnnnnnnnnnnnnnnnnnnnnnnnnnnnnnnnnnnnnnnnnnnnnnnnnnnnnnnnnnnnnnnnnnnnnnnnnnnnnnnnnnnnnnnnnnnnnnnnnnnnnnnnnnnnnnnnnnnnnnnnnnnnnnnnnnnnnnnnnnnnnnnnnnnnnnnnnnnnnnnnnnnnnnnnnnnnnnnnnnnnnnnnnnnnnnnnnnnnnnnnnnnnnnnnnnnnnnnnnnnnnnnnnnnnnnnnnnnnnnnnnnnnnnnnnnnnnnnnnnnnnnnnnnnnnnnnnnnnnnnnnnnnnnnnnnnnnnnnnnnnnnnnnnnnnnnnnnnnnnnnnnnnnnnnnnnnnnnnnnnnnnnnnnnnnnnnnnnnnnnnnnnnnnnnnnnnnnnnnnnnnnnnnnnnnnnnnnnnnnnnnnnnnnnnnnnnnnnnnnnnnnnnnnnnnnnnnnnnnnnnnnnnnnnnnnnnnnnnnnnnnnnnnnnnnnnnnnnnnnnnnnnnnnnnnnnnnnnnnnnnnnnnnnnnnnnnnnnnnnnnnnnnnnnnnnnnnnnnnnnnnnnnnnnnnnnnnnnnnnnnnnnnnnnnnnnnnnnnnnnnnnnnnnnnnnnnnnnnnnnnnnnnnnnnnnnnnnnnnnnnnnnnnnnnnnnnnnnnnnnnnnnnnnnnnnnnnnnnnnnnnnnnnnnnnnnnnnnnnnnnnnnnnnnnnnnnnnnnnnnnnnnnnnnnnnnnnnnnnnnnnnnnnnnnnnnnnnnnnnnnnnnnnnnnnnnnnnnnnnnnnnnnnnnnnnnnnnnnnnnnnnnnnnnnnnnnnnnnnnnnnnnnnnnnnnnnnnnnnnnnnnnnnnnnnnnnnnnnnnnnnnnnnnnnnnnnnnnnnnnnnnnnnnnnnnnnnnnnnnnnnnnnnnnnnnnnnnnnnnnnnnnnnnnnnnnnnnnnnnnnnnnnnnnnnnnnnnnnnnnnnnnnnnnnnnnnnnnnnnnnnnnnnnnnnnnnnnnnnnnnnnnnnnnnnnnnnnnnnnnnnnnnnnnnnnnnnnnnnnnnnnnnnnnnnnnnnnnnnnnnnnnnnnnnnnnnnnnnnnnnnnnnnnnnnnnnnnnnnnnnnnnnnnnnnnnnnnnnnnnnnnnnnnnnnnnnnnnnnnnnnnnnnnnnnnnnnnnnnnnnnnnnnnnnnnnnnnnnnnnnnnnnnnnnnnnnnnnnnnnnnnnnnnnnnnnnnnnnnnnnnnnnnnnnnnnnnnnnnnnnnnnnnnnnnnnnnnnnnnnnnnnnnnnnnnnnnnnnnnnnnnnnnnnnnnnnnnnnnnnnnnnnnnnnnnnnnnnnnnnnnnnnnnnnnnnnnnnnnnnnnnnnnnnnnnnnnnnnnnnnnnnnnnnnnnnnnnnnnnnnnnnnnnnnnnnnnnnnnnnnnnnnnnnnnnnnnnnnnnnnnnnnnnnnnnnnnnnnnnnnnnnnnnnnnnnnnnnnnnnnnnnnnnnnnnnnnnnnnnnnnnnnnnnnnnnnnnnnnnnnnnnnnnnnnnnnnnnnnnnnnnnnnnnnnnnnnnnnnnnnnnnnnnnnnnnnnnnnnnnnnnnnnnnnnnnnnnnnnnnnnnnnnnnnnnnnnnnnnnnnnnnnnnnnnnnnnnnnnnnnnnnnnnnnnnnnnnnnnnnnnnnnnnnnnnnnnnnnnnnnnnnnnnnnnnnnnnnnnnnnnnnnnnnnnnnnnnnnnnnnnnnnnnnnnnnnnnnnnnnnnnnnnnnnnnnnnnnnnnnnnnnnnnnnnnnnnnnnnnnnnnnnnnnnnnnnnnnnnnnnnnnnnnnnnnnnnnnnnnnnnnnnnnnnnnnnnnnnnnnnnnnnnnnnnnnnnnnnnnnnnnnnnnnnnnnnnnnnnnnnnnnnnnnnnnnnnnnnnnnnnnnnnnnnnnnnnnnnnnnnnnnnnnnnnnnnnnnnnnnnnnnnnnnnnnnnnnnnnnnnnnnnnnnnnnnnnnnnnnnnnnnnnnnnnnnnnnnnnnnnnnnnnnnnnnnnnnnnnnnnnnnnnnnnnnnnnnnnnnnnnnnnnnnnnnnnnnnnnnnnnnnnnnnnnnnnnnnnnnnnnnnnnnnnnnnnnnnnnnnnnnnnnnnnnnnnnnnnnnnnnnnnnnnnnnnnnnnnnnnnnnnnnnnnnnnnnnnnnnnnnnnnnnnnnnnnnnnnnnnnnnnnnnnnnnnnnnnnnnnnnnnnnnnnnnnnnnnnnnnnnnnnnnnnnnnnnnnnnnnnnnnnnnnnnnnnnnnnnnnnnnnnnnnnnnnnnnnnnnnnnnnnnnnnnnnnnnnnnnnnnnnnnnnnnnnnnnnnnnnnnnnnnnnnnnnnnnnnnnnnnnnnnnnnnnnnnnnnnnnnnnnnnnnnnnnnnnnnnnnnnnnnnnnnnnnnnnnnnnnnnnnnnnnnnnnnnnnnnnnnnnnnnnnnnnnnnnnnnnnnnnnnnnnnnnnnnnnnnnnnnnnnnnnnnnnnnnnnnnnnnnnnnnnnnnnnnnnnnnnnnnnnnnnnnnnnnnnnnnnnnnnnnnnnnnnnnnnnnnnnnnnnnnnnnnnnnnnnnnnnnnnnnnnnnnnnnnnnnnnnnnnnnnnnnnnnnnnnnnnnnnnnnnnnnnnnnnnnnnnnnnnnnnnnnnnnnnnnnnnnnnnnnnnnnnnnnnnnnnnnnnnnnnnnnnnnnnnnnnnnnnnnnnnnnnnnnnnnnnnnnnnnnnnnnnnnnnnnnnnnnnnnnnnnnnnnnnnnnnnnnnnnnnnnnnnnnnnnnnnnnnnnnnnnnnnnnnnnnnnnnnnnnnnnnnnnnnnnnnnnnnnnnnnnnnnnnnnnnnnnnnnnnnnnnnnnnnnnnnnnnnnnnnnnnnnnnnnnnnnnnnnnnnnnnnnnnnnnnnnnnnnnnnnnnnnnnnnnnnnnnnnnnnnnnnnnnnnnnnnnnnnnnnnnnnnnnnnnnnnnnnnnnnnnnnnnnnnnnnnnnnnnnnnnnnnnnnnnnnnnnnnnnnnnnnnnnnnnnnnnnnnnnnnnnnnnnnnnnnnnnnnnnnnnnnnnnnnnnnnnnnnnnnnnnnnnnnnnnnnnnnnnnnnnnnnnnnnnnnnnnnnnnnnnnnnnnnnnnnnnnnnnnnnnnnnnnnnnnnnnnnnnnnnnnnnnnnnnnnnnnnnnnnnnnnnnnnnnnnnnnnnnnnnnnnnnnnnnnnnnnnnnnnnnnnnnnnnnnnnnnnnnnnnnnnnnnnnnnnnnnnnnnnnnnnnnnnnnnnnnnnnnnnnnnnnnnnnnnnnnnnnnnnnnnnnnnnnnnnnnnnnnnnnnnnnnnnnnnnnnnnnnnnnnnnnnnnnnnnnnnnnnnnnnnnnnnnnnnnnnnnnnnnnnnnnnnnnnnnnnnnnnnnnnnnnnnnnnnnnnnnnnnnnnnnnnnnnnnnnnnnnnnnnnnnnnnnnnnnnnnnnnnnnnnnnnnnnnnnnnnnnnnnnnnnnnnnnnnnnnnnnnnnnnnnnnnnnnnnnnnnnnnnnnnnnnnnnnnnnnnnnnnnnnnnnnnnnnnnnnnnnnnnnnnnnnnnnnnnnnnnnnnnnnnnnnnnnnnnnnnnnnnnnnnnnnnnnnnnnnnnnnnnnnnnnnnnnnnnnnnnnnnnnnnnnnnnnnnnnnnnnnnnnnnnnnnnnnnnnnnnnnnnnnnnnnnnnnnnnnnnnnnnnnnnnnnnnnnnnnnnnnnnnnnnnnnnnnnnnnnnnnnnnnnnnnnnnnnnnnnnnnnnnnnnnnnnnnnnnnnnnnnnnnnnnnnnnnnnnnnnnnnnnnnnnnnnnnnnnnnnnnnnnnnnnnnnnnnnnnnnnnnnnnnnnnnnnnnnnnnnnnnnnnnnnnnnnnnnnnnnnnnnnnnnnnnnnnnnnnnnnnnnnnnnnnnnnnnnnnnnnnnnnnnnnnnnnnnnnnnnnnnnnnnnnnnnnnnnnnnnnnnnnnnnnnnnnnnnnnnnnnnnnnnnnnnnnnnnnnnnnnnnnnnnnnnnnnnnnnnnnnnnnnnnnnnnnnnnnnnnnnnnnnnnnnnnnnnnnnnnnnnnnnnnnnnnnnnnnnnnnnnnnnnnnnnnnnnnnnnnnnnnnnnnnnnnnnnnnnnnnnnnnnnnnnnnnnnnnnnnnnnnnnnnnnnnnnnnnnnnnnnnnnnnnnnnnnnnnnnnnnnnnnnnnnnnnnnnnnnnnnnnnnnnnnnnnnnnnnnnnnnnnnnnnnnnnnnnnnnnnnnnnnnnnnnnnnnnnnnnnnnnnnnnnnnnnnnnnnnnnnnnnnnnnnnnnnnnnnnnnnnnnnnnnnnnnnnnnnnnnnnnnnnnnnnnnnnnnnnnnnnnnnnnnnnnnnnnnnnnnnnnnnnnnnnnnnnnnnnnnnnnnnnnnnnnnnnnnnnnnnnnnnnnnnnnnnnnnnnnnnnnnnnnnnnnnnnnnnnnnnnnnnnnnnnnnnnnnnnnnnnnnnnnnnnnnnnnnnnnnnnnnnnnnnnnnnnnnnnnnnnnnnnnnnnnnnnnnnnnnnnnnnnnnnnnnnnnnnnnnnnnnnnnnnnnnnnnnnnnnnnnnnnnnnnnnnnnnnnnnnnnnnnnnnnnnnnnnnnnnnnnnnnnnnnnnnnnnnnnnnnnnnnnnnnnnnnnnnnnnnnnnnnnnnnnnnnnnnnnnnnnnnnnnnnnnnnnnnnnnnnnnnnnnnnnnnnnnnnnnnnnnnnnnnnnnnnnnnnnnnnnnnnnnnnnnnnnnnnnnnnnnnnnnnnnnnnnnnnnnnnnnnnnnnnnnnnnnnnnnnnnnnnnnnnnnnnnnnnnnnnnnnnnnnnnnnnnnnnnnnnnnnnnnnnnnnnnnnnnnnnnnnnnnnnnnnnnnnnnnnnnnnnnnnnnnnnnnnnnnnnnnnnnnnnnnnnnnnnnnnnnnnnnnnnnnnnnnnnnnnnnnnnnnnnnnnnnnnnnnnnnnnnnnnnnnnnnnnnnnnnnnnnnnnnnnnnnnnnnnnnnnnnnnnnnnnnnnnnnnnnnnnnnnnnnnnnnnnnnnnnnnnnnnnnnnnnnnnnnnnnnnnnnnnnnnnnnnnnnnnnnnnnnnnnnnnnnnnnnnnnnnnnnnnnnnnnnnnnnnnnnnnnnnnnnnnnnnnnnnnnnnnnnnnnnnnnnnnnnnnnnnnnnnnnnnnnnnnnnnnnnnnnnnnnnnnnnnnnnnnnnnnnnnnnnnnnnnnnnnnnnnnnnnnnnnnnnnnnnnnnnnnnnnnnnnnnnnnnnnnnnnnnnnnnnnnnnnnnnnnnnnnnnnnnnnnnnnnnnnnnnnnnnnnnnnnnnnnnnnnnnnnnnnnnnnnnnnnnnnnnnnnnnnnnnnnnnnnnnnnnnnnnnnnnnnnnnnnnnnnnnnnnnnnnnnnnnnnnnnnnnnnnnnnnnnnnnnnnnnnnnnnnnnnnnnnnnnnnnnnnnnnnnnnnnnnnnnnnnnnnnnnnnnnnnnnnnnnnnnnnnnnnnnnnnnnnnnnnnnnnnnnnnnnnnnnnnnnnnnnnnnnnnnnnnnnnnnnnnnnnnnnnnnnnnnnnnnnnnnnnnnnnnnnnnnnnnnnnnnnnnnnnnnnnnnnnnnnnnnnnnnnnnnnnnnnnnnnnnnnnnnnnnnnnnnnnnnnnnnnnnnnnnnnnnnnnnnnnnnnnnnnnnnnnnnnnnnnnnnnnnnnnnnnnnnnnnnnnnnnnnnnnnnnnnnnnnnnnnnnnnnnnnnnnnnnnnnnnnnnnnnnnnnnnnnnnnnnnnnnnnnnnnnnnnnnnnnnnnnnnnnnnnnnnnnnnnnnnnnnnnnnnnnnnnnnnnnnnnnnnnnnnnnnnnnnnnnnnnnnnnnnnnnnnnnnnnnnnnnnnnnnnnnnnnnnnnnnnnnnnnnnnnnnnnnnnnnnnnnnnnnnnnnnnnnnnnnnnnnnnnnnnnnnnnnnnnnnnnnnnnnnnnnnnnnnnnnnnnnnnnnnnnnnnnnnnnnnnnnnnnnnnnnnnnnnnnnnnnnnnnnnnnnnnnnnnnnnnnnnnnnnnnnnnnnnnnnnnnnnnnnnnnnnnnnnnnnnnnnnnnnnnnnnnnnnnnnnnnnnnnnnnnnnnnnnnnnnnnnnnnnnnnnnnnnnnnnnnnnnnnnnnnnnnnnnnnnnnnnnnnnnnnnnnnnnnnnnnnnnnnnnnnnnnnnnnnnnnnnnnnnnnnnnnnnnnnnnnnnnnnnnnnnnnnnnnnnnnnnnnnnnnnnnnnnnnnnnnnnnnnnnnnnnnnnnnnnnnnnnnnnnnnnnnnnnnnnnnnnnnnnnnnnnnnnnnnnnnnnnnnnnnnnnnnnnnnnnnnnnnnnnnnnnnnnnnnnnnnnnnnnnnnnnnnnnnnnnnnnnnnnnnnnnnnnnnnnnnnnnnnnnnnnnnnnnnnnnnnnnnnnnnnnnnnnnnnnnnnnnnnnnnnnnnnnnnnnnnnnnnnnnnnnnnnnnnnnnnnnnnnnnnnnnnnnnnnnnnnnnnnnnnnnnnnnnnnnnnnnnnnnnnnnnnnnnnnnnnnnnnnnnnnnnnnnnnnnnnnnnnnnnnnnnnnnnnnnnnnnnnnnnnnnnnnnnnnnnnnnnnnnnnnnnnnnnnnnnnnnnnnnnnnnnnnnnnnnnnnnnnnnnnnnnnnnnnnnnnnnnnnnnnnnnnnnnnnnnnnnnnnnnnnnnnnnnnnnnnnnnnnnnnnnnnnnnnnnnnnnnnnnnnnnnnnnnnnnnnnnnnnnnnnnnnnnnnnnnnnnnnnnnnnnnnnnnnnnnnnnnnnnnnnnnnnnnnnnnnnnnnnnnnnnnnnnnnnnnnnnnnnnnnnnnnnnnnnnnnnnnnnnnnnnnnnnnnnnnnnnnnnnnnnnnnnnnnnnnnnnnnnnnnnnnnnnnnnnnnnnnnnnnnnnnnnnnnnnnnnnnnnnnnnnnnnnnnnnnnnnnnnnnnnnnnnnnnnnnnnnnnnnnnnnnnnnnnnnnnnnnnnnnnnnnnnnnnnnnnnnnnnnnnnnnnnnnnnnnnnnnnnnnnnnnnnnnnnnnnnnnnnnnnnnnnnnnnnnnnnnnnnnnnnnnnnnnnnnnnnnnnnnnnnnnnnnnnnnnnnnnnnnnnnnnnnnnnnnnnnnnnnnnnnnnnnnnnnnnnnnnnnnnnnnnnnnnnnnnnnnnnnnnnnnnnnnnnnnnnnnnnnnnnnnnnnnnnnnnnnnnnnnnnnnnnnnnnnnnnnnnnnnnnnnnnnnnnnnnnnnnnnnnnnnnnnnnnnnnnnnnnnnnnnnnnnnnnnnnnnnnnnnnnnnnnnnnnnnnnnnnnnnnnnnnnnnnnnnnnnnnnnnnnnnnnnnnnnnnnnnnnnnnnnnnnnnnnnnnnnnnnnnnnnnnnnnnnnnnnnnnnnnnnnnnnnnnnnnnnnnnnnnnnnnnnnnnnnnnnnnnnnnnnnnnnnnnnnnnnnnnnnnnnnnnnnnnnnnnnnnnnnnnnnnnnnnnnnnnnnnnnnnnnnnnnnnnnnnnnnnnnnnnnnnnnnnnnnnnnnnnnnnnnnnnnnnnnnnnnnnnnnnnnnnnnnnnnnnnnnnnnnnnnnnnnnnnnnnnnnnnnnnnnnnnnnnnnnnnnnnnnnnnnnnnnnnnnnnnnnnnnnnnnnnnnnnnnnnnnnnnnnnnnnnnnnnnnnnnnnnnnnnnnnnnnnnnnnnnnnnnnnnnnnnnnnnnnnnnnnnnnnnnnnnnnnnnnnnnnnnnnnnnnnnnnnnnnnnnnnnnnnnnnnnnnnnnnnnnnnnnnnnnnnnnnnnnnnnnnnnnnnnnnnnnnnnnnnnnnnnnnnnnnnnnnnnnnnnnnnnnnnnnnnnnnnnnnnnnnnnnnnnnnnnnnnnnnnnnnnnnnnnnnnnnnnnnnnnnnnnnnnnnnnnnnnnnnnnnnnnnnnnnnnnnnnnnnnnnnnnnnnnnnnnnnnnnnnnnnnnnnnnnnnnnnnnnnnnnnnnnnnnnnnnnnnnnnnnnnnnnnnnnnnnnnnnnnnnnnnnnnnnnnnnnnnnnnnnnnnnnnnnnnnnnnnnnnnnnnnnnnnnnnnnnnnnnnnnnnnnnnnnnnnnnnnnnnnnnnnnnnnnnnnnnnnnnnnnnnnnnnnnnnnnnnnnnnnnnnnnnnnnnnnnnnnnnnnnnnnnnnnnnnnnnnnnnnnnnnnnnnnnnnnnnnnnnnnnnnnnnnnnnnnnnnnnnnnnnnnnnnnnnnnnnnnnnnnnnnnnnnnnnnnnnnnnnnnnnnnnnnnnnnnnnnnnnnnnnnnnnnnnnnnnnnnnnnnnnnnnnnnnnnnnnnnnnnnnnnnnnnnnnnnnnnnnnnnnnnnnnnnnnnnnnnnnnnnnnnnnnnnnnnnnnnnnnnnnnnnnnnnnnnnnnnnnnnnnnnnnnnnnnnnnnnnnnnnnnnnnnnnnnnnnnnnnnnnnnnnnnnnnnnnnnnnnnnnnnnnnnnnnnnnnnnnnnnnnnnnnnnnnnnnnnnnnnnnnnnnnnnnnnnnnnnnnnnnnnnnnnnnnnnnnnnnnnnnnnnnnnnnnnnnnnnnnnnnnnnnnnnnnnnnnnnnnnnnnnnnnnnnnnnnnnnnnnnnnnnnnnnnnnnnnnnnnnnnnnnnnnnnnnnnnnnnnnnnnnnnnnnnnnnnnnnnnnnnnnnnnnnnnnnnnnnnnnnnnnnnnnnnnnnnnnnnnnnnnnnnnnnnnnnnnnnnnnnnnnnnnnnnnnnnnnnnnnnnnnnnnnnnnnnnnnnnnnnnnnnnnnnnnnnnnnnnnnnnnnnnnnnnnnnnnnnnnnnnnnnnnnnnnnnnnnnnnnnnnnnnnnnnnnnnnnnnnnnnnnnnnnnnnnnnnnnnnnnnnnnnnnnnnnnnnnnnnnnnnnnnnnnnnnnnnnnnnnnnnnnnnnnnnnnnnnnnnnnnnnnnnnnnnnnnnnnnnnnnnnnnnnnnnnnnnnnnnnnnnnnnnnnnnnnnnnnnnnnnnnnnnnnnnnnnnnnnnnnnnnnnnnnnnnnnnnnnnnnnnnnnnnnnnnnnnnnnnnnnnnnnnnnnnnnnnnnnnnnnnnnnnnnnnnnnnnnnnnnnnnnnnnnnnnnnnnnnnnnnnnnnnnnnnnnnnnnnnnnnnnnnnnnnnnnnnnnnnnnnnnnnnnnnnnnnnnnnnnnnnnnnnnnnnnnnnnnnnnnnnnnnnnnnnnnnnnnnnnnnnnnnnnnnnnnnnnnnnnnnnnnnnnnnnnnnnnnnnnnnnnnnnnnnnnnnnnnnnnnnnnnnnnnnnnnnnnnnnnnnnnnnnnnnnnnnnnnnnnnnnnnnnnnnnnnnnnnnnnnnnnnnnnnnnnnnnnnnnnnnnnnnnnnnnnnnnnnnnnnnnnnnnnnnnnnnnnnnnnnnnnnnnnnnnnnnnnnnnnnnnnnnnnnnnnnnnnnnnnnnnnnnnnnnnnnnnnnnnnnnnnnnnnnnnnnnnnnnnnnnnnnnnnnnnnnnnnnnnnnnnnnnnnnnnnnnnnnnnnnnnnnnnnnnnnnnnnnnnnnnnnnnnnnnnnnnnnnnnnnnnnnnnnnnnnnnnnnnnnnnnnnnnnnnnnnnnnnnnnnnnnnnnnnnnnnnnnnnnnnnnnnnnnnnnnnnnnnnnnnnnnnnnnnnnnnnnnnnnnnnnnnnnnnnnnnnnnnnnnnnnnnnnnnnnnnnnnnnnnnnnnnnnnnnnnnnnnnnnnnnnnnnnnnnnnnnnnnnnnnnnnnnnnnnnnnnnnnnnnnnnnnnnnnnnnnnnnnnnnnnnnnnnnnnnnnnnnnnnnnnnnnnnnnnnnnnnnnnnnnnnnnnnnnnnnnnnnnnnnnnnnnnnnnnnnnnnnnnnnnnnnnnnnnnnnnnnnnnnnnnnnnnnnnnnnnnnnnnnnnnnnnnnnnnnnnnnnnnnnnnnnnnnnnnnnnnnnnnnnnnnnnnnnnnnnnnnnnnnnnnnnnnnnnnnnnnnnnnnnnnnnnnnnnnnnnnnnnnnnnnnnnnnnnnnnnnnnnnnnnnnnnnnnnnnnnnnnnnnnnnnnnnnnnnnnnnnnnnnnnnnnnnnnnnnnnnnnnnnnnnnnnnnnnnnnnnnnnnnnnnnnnnnnnnnnnnnnnnnnnnnnnnnnnnnnnnnnnnnnnnnnnnnnnnnnnnnnnnnnnnnnnnnnnnnnnnnnnnnnnnnnnnnnnnnnnnnnnnnnnnnnnnnnnnnnnnnnnnnnnnnnnnnnnnnnnnnnnnnnnnnnnnnnnnnnnnnnnnnnnnnnnnnnnnnnnnnnnnnnnnnnnnnnnnnnnnnnnnnnnnnnnnnnnnnnnnnnnnnnnnnnnnnnnnnnnnnnnnnnnnnnnnnnnnnnnnnnnnnnnnnnnnnnnnnnnnnnnnnnnnnnnnnnnnnnnnnnnnnnnnnnnnnnnnnnnnnnnnnnnnnnnnnnnnnnnnnnnnnnnnnnnnnnnnnnnnnnnnnnnnnnnnnnnnnnnnnnnnnnnnnnnnnnnnnnnnnnnnnnnnnnnnnnnnnnnnnnnnnnnnnnnnnnnnnnnnnnnnnnnnnnnnnnnnnnnnnnnnnnnnnnnnnnnnnnnnnnnnnnnnnnnnnnnnnnnnnnnnnnnnnnnnnnnnnnnnnnnnnnnnnnnnnnnnnnnnnnnnnnnnnnnnnnnnnnnnnnnnnnnnnnnnnnnnnnnnnnnnnnnnnnnnnnnnnnnnnnnnnnnnnnnnnnnnnnnnnnnnnnnnnnnnnnnnnnnnnnnnnnnnnnnnnnnnnnnnnnnnnnnnnnnnnnnnnnnnnnnnnnnnnnnnnnnnnnnnnnnnnnnnnnnnnnnnnnnnnnnnnnnnnnnnnnnnnnnnnnnnnnnnnnnnnnnnnnnnnnnnnnnnnnnnnnnnnnnnnnnnnnnnnnnnnnnnnnnnnnnnnnnnnnnnnnnnnnnnnnnnnnnnnnnnnnnnnnnnnnnnnnnnnnnnnnnnnnnnnnnnnnnnnnnnnnnnnnnnnnnnnnnnnnnnnnnnnnnnnnnnnnnnnnnnnnnnnnnnnnnnnnnnnnnnnnnnnnnnnnnnnnnnnnnnnnnnnnnnnnnnnnnnnnnnnnnnnnnnnnnnnnnnnnnnnnnnnnnnnnnnnnnnnnnnnnnnnnnnnnnnnnnnnnnnnnnnnnnnnnnnnnnnnnnnnnnnnnnnnnnnnnnnnnnnnnnnnnnnnnnnnnnnnnnnnnnnnnnnnnnnnnnnnnnnnnnnnnnnnnnnnnnnnnnnnnnnnnnnnnnnnnnnnnnnnnnnnnnnnnnnnnnnnnnnnnnnnnnnnnnnnnnnnnnnnnnnnnnnnnnnnnnnnnnnnnnnnnnnnnnnnnnnnnnnnnnnnnnnnnnnnnnnnnnnnnnnnnnnnnnnnnnnnnnnnnnnnnnnnnnnnnnnnnnnnnnnnnnnnnnnnnnnnnnnnnnnnnnnnnnnnnnnnnnnnnnnnnnnnnnnnnnnnnnnnnnnnnnnnnnnnnnnnnnnnnnnnnnnnnnnnnnnnnnnnnnnnnnnnnnnnnnnnnnnnnnnnnnnnnnnnnnnnnnnnnnnnnnnnnnnnnnnnnnnnnnnnnnnnnnnnnnnnnnnnnnnnnnnnnnnnnnnnnnnnnnnnnnnnnnnnnnnnnnnnnnnnnnnnnnnnnnnnnnnnnnnnnnnnnnnnnnnnnnnnnnnnnnnnnnnnnnnnnnnnnnnnnnnnnnnnnnnnnnnnnnnnnnnnnnnnnnnnnnnnnnnnnnnnnnnnnnnnnnnnnnnnnnnnnnnnnnnnnnnnnnnnnnnnnnnnnnnnnnnnnnnnnnnnnnnnnnnnnnnnnnnnnnnnnnnnnnnnnnnnnnnnnnnnnnnnnnnnnnnnnnnnnnnnnnnnnnnnnnnnnnnnnnnnnnnnnnnnnnnnnnnnnnnnnnnnnnnnnnnnnnnnnnnnnnnnnnnnnnnnnnnnnnnnnnnnnnnnnnnnnnnnnnnnnnnnnnnnnnnnnnnnnnnnnnnnnnnnnnnnnnnnnnnnnnnnnnnnnnnnnnnnnnnnnnnnnnnnnnnnnnnnnnnnnnnnnnnnnnnnnnnnnnnnnnnnnnnnnnnnnnnnnnnnnnnnnnnnnnnnnnnnnnnnnnnnnnnnnnnnnnnnnnnnnnnnnnnnnnnnnnnnnnnnnnnnnnnnnnnnnnnnnnnnnnnnnnnnnnnnnnnnnnnnnnnnnnnnnnnnnnnnnnnnnnnnnnnnnnnnnnnnnnnnnnnnnnnnnnnnnnnnnnnnnnnnnnnnnnnnnnnnnnnnnnnnnnnnnnnnnnnnnnnnnnnnnnnnnnnnnnnnnnnnnnnnnnnnnnnnnnnnnnnnnnnnnnnnnnnnnnnnnnnnnnnnnnnnnnnnnnnnnnnnnnnnnnnnnnnnnnnnnnnnnnnnnnnnnnnnnnnnnnnnnnnnnnnnnnnnnnnnnnnnnnnnnnnnnnnnnnnnnnnnnnnnnnnnnnnnnnnnnnnnnnnnnnnnnnnnnnnnnnnnnnnnnnnnnnnnnnnnnnnnnnnnnnnnnnnnnnnnnnnnnnnnnnnnnnnnnnnnnnnnnnnnnnnnnnnnnnnnnnnnnnnnnnnnnnnnnnnnnnnnnnnnnnnnnnnnnnnnnnnnnnnnnnnnnnnnnnnnnnnnnnnnnnnnnnnnnnnnnnnnnnnnnnnnnnnnnnnnnnnnnnnnnnnnnnnnnnnnnnnnnnnnnnnnnnnnnnnnnnnnnnnnnnnnnnnnnnnnnnnnnnnnnnnnnnnnnnnnnnnnnnnnnnnnnnnnnnnnnnnnnnnnnnnnnnnnnnnnnnnnnnnnnnnnnnnnnnnnnnnnnnnnnnnnnnnnnnnnnnnnnnnnnnnnnnnnnnnnnnnnnnnnnnnnnnnnnnnnnnnnnnnnnnnnnnnnnnnnnnnnnnnnnnnnnnnnnnnnnnnnnnnnnnnnnnnnnnnnnnnnnnnnnnnnnnnnnnnnnnnnnnnnnnnnnnnnnnnnnnnnnnnnnnnnnnnnnnnnnnnnnnnnnnnnnnnnnnnnnnnnnnnnnnnnnnnnnnnnnnnnnnnnnnnnnnnnnnnnnnnnnnnnnnnnnnnnnnnnnnnnnnnnnnnnnnnnnnnnnnnnnnnnnnnnnnnnnnnnnnnnnnnnnnnnnnnnnnnnnnnnnnnnnnnnnnnnnnnnnnnnnnnnnnnnnnnnnnnnnnnnnnnnnnnnnnnnnnnnnnnnnnnnnnnnnnnnnnnnnnnnnnnnnnnnnnnnnnnnnnnnnnnnnnnnnnnnnnnnnnnnnnnnnnnnnnnnnnnnnnnnnnnnnnnnnnnnnnnnnnnnnnnnnnnnnnnnnnnnnnnnnnnnnnnnnnnnnnnnnnnnnnnnnnnnnnnnnnnnnnnnnnnnnnnnnnnnnnnnnnnnnnnnnnnnnnnnnnnnnnnnnnnnnnnnnnnnnnnnnnnnnnnnnnnnnnnnnnnnnnnnnnnnnnnnnnnnnnnnnnnnnnnnnnnnnnnnnnnnnnnnnnnnnnnnnnnnnnnnnnnnnnnnnnnnnnnnnnnnnnnnnnnnnnnnnnnnnnnnnnnnnnnnnnnnnnnnnnnnnnnnnnnnnnnnnnnnnnnnnnnnnnnnnnnnnnnnnnnnnnnnnnnnnnnnnnnnnnnnnnnnnnnnnnnnnnnnnnnnnnnnnnnnnnnnnnnnnnnnnnnnnnnnnnnnnnnnnnnnnnnnnnnnnnnnnnnnnnnnnnnnnnnnnnnnnnnnnnnnnnnnnnnnnnnnnnnnnnnnnnnnnnnnnnnnnnnnnnnnnnnnnnnnnnnnnnnnnnnnnnnnnnnnnnnnnnnnnnnnnnnnnnnnnnnnnnnnnnnnnnnnnnnnnnnnnnnnnnnnnnnnnnnnnnnnnnnnnnnnnnnnnnnnnnnnnnnnnnnnnnnnnnnnnnnnnnnnnnnnnnnnnnnnnnnnnnnnnnnnnnnnnnnnnnnnnnnnnnnnnnnnnnnnnnnnnnnnnnnnnnnnnnnnnnnnnnnnnnnnnnnnnnnnnnnnnnnnnnnnnnnnnnnnnnnnnnnnnnnnnnnnnnnnnnnnnnnnnnnnnnnnnnnnnnnnnnnnnnnnnnnnnnnnnnnnnnnnnnnnnnnnnnnnnnnnnnnnnnnnnnnnnnnnnnnnnnnnnnnnnnnnnnnnnnnnnnnnnnnnnnnnnnnnnnnnnnnnnnnnnnnnnnnnnnnnnnnnnnnnnnnnnnnnnnnnnnnnnnnnnnnnnnnnnnnnnnnnnnnnnnnnnnnnnnnnnnnnnnnnnnnnnnnnnnnnnnnnnnnnnnnnnnnnnnnnnnnnnnnnnnnnnnnnnnnnnnnnnnnnnnnnnnnnnnnnnnnnnnnnnnnnnnnnnnnnnnnnnnnnnnnnnnnnnnnnnnnnnnnnnnnnnnnnnnnnnnnnnnnnnnnnnnnnnnnnnnnnnnnnnnnnnnnnnnnnnnnnnnnnnnnnnnnnnnnnnnnnnnnnnnnnnnnnnnnnnnnnnnnnnnnnnnnnnnnnnnnnnnnnnnnnnnnnnnnnnnnnnnnnnnnnnnnnnnnnnnnnnnnnnnnnnnnnnnnnnnnnnnnnnnnnnnnnnnnnnnnnnnnnnnnnnnnnnnnnnnnnnnnnnnnnnnnnnnnnnnnnnnnnnnnnnnnnnnnnnnnnnnnnnnnnnnnnnnnnnnnnnnnnnnnnnnnnnnnnnnnnnnnnnnnnnnnnnnnnnnnnnnnnnnnnnnnnnnnnnnnnnnnnnnnnnnnnnnnnnnnnnnnnnnnnnnnnnnnnnnnnnnnnnnnnnnnnnnnnnnnnnnnnnnnnnnnnnnnnnnnnnnnnnnnnnnnnnnnnnnnnnnnnnnnnnnnnnnnnnnnnnnnnnnnnnnnnnnnnnnnnnnnnnnnnnnnnnnnnnnnnnnnnnnnnnnnnnnnnnnnnnnnnnnnnnnnnnnnnnnnnnnnnnnnnnnnnnnnnnnnnnnnnnnnnnnnnnnnnnnnnnnnnnnnnnnnnnnnnnnnnnnnnnnnnnnnnnnnnnnnnnnnnnnnnnnnnnnnnnnnnnnnnnnnnnnnnnnnnnnnnnnnnnnnnnnnnnnnnnnnnnnnnnnnnnnnnnnnnnnnnnnnnnnnnnnnnnnnnnnnnnnnnnnnnnnnnnnnnnnnnnnnnnnnnnnnnnnnnnnnnnnnnnnnnnnnnnnnnnnnnnnnnnnnnnnnnnnnnnnnnnnnnnnnnnnnnnnnnnnnnnnnnnnnnnnnnnnnnnnnnnnnnnnnnnnnnnnnnnnnnnnnnnnnnnnnnnnnnnnnnnnnnnnnnnnnnnnnnnnnnnnnnnnnnnnnnnnnnnnnnnnnnnnnnnnnnnnnnnnnnnnnnnnnnnnnnnnnnnnnnnnnnnnnnnnnnnnnnnnnnnnnnnnnnnnnnnnnnnnnnnnnnnnnnnnnnnnnnnnnnnnnnnnnnnnnnnnnnnnnnnnnnnnnnnnnnnnnnnnnnnnnnnnnnnnnnnnnnnnnnnnnnnnnnnnnnnnnnnnnnnnnnnnnnnnnnnnnnnnnnnnnnnnnnnnnnnnnnnnnnnnnnnnnnnnnnnnnnnnnnnnnnnnnnnnnnnnnnnnnnnnnnnnnnnnnnnnnnnnnnnnnnnnnnnnnnnnnnnnnnnnnnnnnnnnnnnnnnnnnnnnnnnnnnnnnnnnnnnnnnnnnnnnnnnnnnnnnnnnnnnnnnnnnnnnnnnnnnnnnnnnnnnnnnnnnnnnnnnnnnnnnnnnnnnnnnnnnnnnnnnnnnnnnnnnnnnnnnnnnnnnnnnnnnnnnnnnnnnnnnnnnnnnnnnnnnnnnnnnnnnnnnnnnnnnnnnnnnnnnnnnnnnnnnnnnnnnnnnnnnnnnnnnnnnnnnnnnnnnnnnnnnnnnnnnnnnnnnnnnnnnnnnnnnnnnnnnnnnnnnnnnnnnnnnnnnnnnnnnnnnnnnnnnnnnnnnnnnnnnnnnnnnnnnnnnnnnnnnnnnnnnnnnnnnnnnnnnnnnnnnnnnnnnnnnnnnnnnnnnnnnnnnnnnnnnnnnnnnnnnnnnnnnnnnnnnnnnnnnnnnnnnnnnnnnnnnnnnnnnagcatccgcaaaggatgagcagcaccgccgcgaacagtacgatctgctttttcaccatgttcaaatcctcccaggggaataaaatttatgattatgcatatagtagatgcaagaatcgttccgaatctgccacaataactgcggattcctttcccaaagcctttttcgcccacggacaggccgtttgccccttcccactaacatcccgtaaacctccccttaaattcccgcccggccaatgggaactcagcgggaagtattttagatgtgtatgggatggggcaaatggggcttctattgatagtgggtatcaaaatgggaggaagtccacaaattgcgcgaattcatacgaattgcttttccagttacgctaccaactgtggtagataacctaaaataaaggacttacttcccaatcgggcaagtaatccatatgtttggagcccgaaggtcccagaacgattggccgacggggacatcgaccttcctgacgctggcgtcgagcgaggcacgagcatggacgccagcaacatctcctgtagtccatactcgcaagctcgctgcactccaggctcaccaacgttggaaggcaaattcacaaattcacaaccggtaaatatggcttgtgaatttgcaacctgctgatagacgggtaattatgaggctaattcacaaaaaaggggtctcttatacatccgcggaagccgattgtaaacaggatatgatgtatccacgctaccagtctataatacatatagaaatagtatatataatatataatagtattatatattattatatattgatattatatcatctctaccttcccttcatctcttgtttgcggcatgagccactgcaaaccggcattctcccctggtccggctggatataagagataagcgtattttgtgaatttgtcccccaactcactgtgccacaataacacacggattcacaagccatatttaccggttgtgaatttgtgaatctgaccttgccggccttaaggaagtttgaaattagagccctattttggacttgacaaattattccttggtaaatttggtgtataatagctatggggcataatgatgttagcctgtggaacggcctctgtaaaggatcaacaagctatcaaccctccccatgcgacaggagcttcaatgtattataatttgacagacaaaccctggatcagtgtgctacagcttgacgggcattctgccaggctcggcctggctgaggtcctgcgaaaagcacacacactgcgtttggcttacggcaatccgatggaccgcatgtccgttttccgtttcctcctcgccctgggctattggtgttttgccaatacaaaacaagcgccggtatcagataagccactgcctcaggcatggacggactggcttgaacaaaaccaagaatatttcgaattgttcggtgatggccccagattctaccaatccccaggaacatccagaatacgccccagcacggaccttatccacgagcttcccacggcaaacaatttctggcacttccgccatgtgaccgatttcatcgatggcatttgcccagcttgctgcgttaccggtctgctgcgcctgccactctttaccaccgtaggcggcagcggaatcggagccggcatcaacagaactcctcccttctatgccatctggcagggtgatagtctgtcggaatcgatattcctgaattgggaacccacttcccggttgggtgttcctgcctggctgaacccgtttggatcccaaaacgagaaggatgtagccttgctgactggcctcacctggctgccccgcaaggtattcctgcttggcccggtgtcagacggagcaaaatgcagcgcctgcggagaagagcatgagcctctggtctatgcctgcaacaatgaggcggtgaaagtgcctccgaaccttgtctggaacgaccctcacgcgatttaccgggatgacaataatggcctgactgcccaggtggctctgatgtccggggacaaatacactttcgctaacagggattggcataaacccctggtcggcttcttacgggcgaaaggcatgtctcggaccgccacgctgtttttagtgggcttcacaagcgttcaagccaaatgtgtggacgtttgggaaaagaccattgccctatccggaaaaacaagctccgaggaactgctggaccagatatccgaaagagcctactccctgcacaggatgaggaaacaagaccgccggggcgattacaaggaatccgtgggaatcaccgccgtggcggacatcatcccgcacgtagagcatcgggttgacgtccattcgggcgagatggtggaaaacagcggcaatgtctggcaggaagcggatgaagattacggattcttcatgaagcgttttgccgtttctctagtgccggaaattacggttgccgccaagcttgaacgagaacaactggctcggcgcaagccctggcccctaaaaccaaaatcaattaaaaaaccttcatccggaggcgataatgaatgagagcaccgtgaaatttgttcggagcctgggcgaactcaaagagggcgacctgggcttgctcagaaagctcaggggtcgccgtctggatgaatccctgccgggtttcgacctgttttccggcctgtggtggccactccgcagtataagccccaaaacccccaggcggaaggtggtctggctagtcaccaagcttttcgcggaattccgctttgagcaaaagaaaggcgccagcctgccttggctcatgggcagaatatgccgtggacttaaagaagaaaaagagttcccacgtgttttagccaggttcgaccgcttgctcacgctcgagttgaaccaactggaggaaccgctggcgcaagtgctcgcgattttaaaaagacatgacattgccagtctggactgggttgccctcatcgatgacctctccgcttgggaacgggaatcaaacagagcgatatggtcagacacatttatttcagcatttaataatcagcaaggaggaatcaaatgttgattgaaatacacatgatccaaaaccacagcccggccaacctgaaccgggacgacctgggcgcgcccaagacctgttatttcggtggggtgttgcggtcccgcatctccagccagtgcctaaagcggagcatcaggatgagcgatgaattcaaaaacttgctcgggggtatccgtacccgtcggttggccgagttgattacaaaagctacaggacaggactgcaggaatcaggcagaggaagttctgaacaaagccggtttgaaacacgaaaacggacatagtaagatgctggtgttcatgacccggaacaagatcgatgcccttgctcaaattgtcaccagcgaaggcctgagtgttgcagagaaagccaagaaagcggcagatgtaatatcgggggcaatacattcccctgacatcgctctgtgcggaagaatgctcgagcccgataccaaggacaagaacacagacaaggtcaagtgggaaaataccactgttgaagcagccctgcaggtgtcgcacgccatttcaacccacatcgcccgcccagaaatagattactatgtagcagctgatgacgagcctggcgacgacacaggtgctggattcatagacgaggcgatgtttgcttcggcctgtttctacaaatattactcaattgattggaataccttgataatcaacctccagggtaatgaaaagttggcagctcatactgtcggagcctttatccaggccgctgcactcactaatcccagcggaaagcagaacagctttgccgcacataaccttcccgatggaatattggtagaaataaaagagacacctgtcagctatgcaaatgcctttgtgcgaccggtgggaatcgttaaggattctgacttggtagaacaaagcattggccaactggccaactatgtgaaggatataagtgccggtttcttccctggacagatgaaaggcaacgctctgtggttctcgcccaatggacgttatcccctaaagcctcaacagggcacgctggacataaagccagtttgcaacctgctagaacttgttcgcgaagcagttgagatgttgggttttgaatgggatgatgtaaaaaacgagaaagtagagagttgaaatgtcttctccgcctaataccctgttcctgagattggaggctccccttcaggcctggggaagcaatgaggccaaattcgccgtgcgcaggacagccgacgcgcccaccaaatccggagtggcaggcctgctctgcgctgccctgggaatcagccgggccgaagccggacagtattggctgggtgaaattgccaaattgcgcatgggggtgcggatagaccgcccgggcatccgctggtgggattaccatactgtgggagcggagcagaagctgcgcatttctgacctgaaaatgcccaacggcctagttctggttggcactgccctggccaaaaacctgggcgcggacaagatcaaatccaaacccggggctttgctctcccgacgcgagtatttggctgatgccagcttcctggttgcgctccagggtgaaccggatatcgtggcacaactggctgaagcgctgaaaaaaccagtctggacgctttatctggggcgaaaatcctgtcccccctcccgtccggtggatgaacacccgccagggttttatgccagtctgaaagaggctttgcggtcgatcccggcgcaactgagggaaaaaggcgaaccgatacctgacagtgttccctgtgtgctcgactgggttccggcccatgatgacgtgcacgctccgccgaacgccgaagcgcattacgacgtgccggtgtcctttgagcctccccaccacttgccccggctggtgatccgctgtaacctgccattggaccgcaacttcgaggcagagaccgtgctttccggcaaagcctggcaaccgccccgcaaccgggcaaattacgacaatcctgaatacaaaagggtccgcgctgagcgtttggtgatggacaatgccgcctgcatgttctgcaaggcacccgccactactgtgcagcacgtgaattaccgacgcgccggaggcagcgagaagccggaggacttgcgcgccctctgccgcctctgccacgatgcctgcaccatgctggaatatggcagcggcatgaccatggaccgcatagatccctgtgaccccgcctggcgtgagcgcatcttggccaaacgcgaggaaataatcaaattccgctcgctggagcagcgcaggcgcaaactcgatccgaaggaggagaacggatgatgtatctatcccaactgctcatcgacacaggcggcaaccctgaccggccaaggcccgggcgcttgtggctgaacaatatctataatgtccaccggcggctcagcatggctttccccatgcgcaagcgcaaggaaggagacccgaggtttctgcagccctttgaccccgcagattttgaaaagcgccagttcctctttcgggtggacaacaacaccgatggagaaaatcaaagggcgatggttttggtgcagtcgtccctgccgccggattgggactgggctttccagaatgccacgggatttttggcagcccctccccaggttaaggaatacgatccccagttctcagcaggtcagcggctgcgcttccgcatcctcgtgaatgccagtgtcaaacgcaaaatcgacgagttgcgggaaggacccggaggaaaggaaaaaacgggaagggttctgcacaaacgggtcgcccttacctgggacacaaattccaacccaaaggatgcggtggcgcaatggtttgccgccaaggctggcagactgggcttcacgcccggggagaccgaactggtaagcctgggctgggtatacggttccaaaccggagccccggggaaattcgccccggcgtgagaacgaataccgtcccctgagataccgttccgccctgctggaaggttatctgacagtggatgatgcctttctgttccgggaagccttggaaaaaggtatcggcagcgccaaaggaatgggcttcggcctcctttccgtggttccggcaagtgatgcgtaacagagaccttcacctaatgccaaaaatgcgggaccgcttcacctatctctatgtggagcatgccaaaatagacaaagaacaacaggcaatcgcctttcacgatgccatgggctccactcctgttccctgcgctggactggccctgctgatgctggggccaggcgtatccatcacccatgcggccatccttgttttagcagaatgcggctgtttggtggcttgggtgggggaacagggagtccgcttttactcatccgggacagggaccacccgtagttccgccaaccttatgcgtcaggctgccgcctggtcaaatcgagatacgcatctgcggatagttcgcagaatgtatgaattgaggttcaaggaaaaactggacccaaccctctctcttgaacagataaggggaaaagagggagcgagagtacgggatacctatttcagactttcaaaagaattcgatgtgcccatgagtgcgaggaattacgacaggagcaactggaataaaaccgaccccatcaacagagccctgtccgttgccaattcctgtctctatggcatctgccacgccgcgatagtggccgctggctattcacctgccctgggtttcgttcatactggcaaacaactgtcatttgtttatgacattgccgatctttataaaatggaaacctccgtgcccgcggctttcatagccacagccgcaggggtcgataacctggacagaaggacacgcattgcctgccgtgaccagttctatcaatttggtctgctaaagaagatagtggccgacattcacgcccttttcggtattctggaaacttcggacgatgagccagaccttgctgatgtcgatccagccgtgccaggcgggctttggaacccagatgataaagtgagccccggcggcttgtcatggggtctggatgatcctggaggccatgatgatggttctggtgcttgaaaaagttccctctggcctgagaggagaaattacacgctggctcctcgaaatcaaggctggagtatttgtcggtcaggtatcggccatgataagggaaaagctgtgggacaaggccaggtctggttgtgccggtggaacttgtatcatgatttacagcaagcattgcgaacaaggctttggaattgagttttggggtgccgcggaaaggatagtgacagaatgggaaggattgaaattgatgaccaagcatccgtgatccatacttgaagcctgttcaatggcctcaaagcgtctactttcgaagtgtgttccccacctgcgtgggggtgaaccgatcgcagaggtgagcggctatactgtgataatgtgttccccacctgcgtgggggtgaaccgggcgcggtcaacgtggacgaagcgcgtccagcgtgttccccacctgcgtgggggtgaaccgacaaccgaatggaaaacaaaatccattgtcgagtgttccccacctgcgtgggggtgaaccgtccgcttgtttcggggctggctgttccaggatgtgttccccacctgcgtgggggtgaaccggtcggagactgggtggaatataagaaaggcaagtgttccccacctgcgtgggggtgaaccggtctgaagcgcatggacatagcgtccacgccagtgttccccacctgcgtgggggtgaaccggtattcttgcccatcatggaaatgccgtgtccgtgttccccacctgcgtgggggtgaaccggtagctcaactacaagcggcgagccga

SEQ ID NO: 1097 - DNA, 103779 bp, Artificial Sequence
  Synthetic Oligonucleotide
  misc_feature (1)..(95919): n is a, c, g, or t
nnnnnnnnnnnnnnnnnnnnnnnnnnnnnnnnnnnnnnnnnnnnnnnnnnnnnnnnnnnnnnnnnnnnnnnnnnnnnnnnnnnnnnnnnnnnnnnnnnnnnnnnnnnnnnnnnnnnnnnnnnnnnnnnnnnnnnnnnnnnnnnnnnnnnnnnnnnnnnnnnnnnnnnnnnnnnnnnnnnnnnnnnnnnnnnnnnnnnnnnnnnnnnnnnnnnnnnnnnnnnnnnnnnnnnnnnnnnnnnnnnnnnnnnnnnnnnnnnnnnnnnnnnnnnnnnnnnnnnnnnnnnnnnnnnnnnnnnnnnnnnnnnnnnnnnnnnnnnnnnnnnnnnnnnnnnnnnnnnnnnnnnnnnnnnnnnnnnnnnnnnnnnnnnnnnnnnnnnnnnnnnnnnnnnnnnnnnnnnnnnnnnnnnnnnnnnnnnnnnnnnnnnnnnnnnnnnnnnnnnnnnnnnnnnnnnnnnnnnnnnnnnnnnnnnnnnnnnnnnnnnnnnnnnnnnnnnnnnnnnnnnnnnnnnnnnnnnnnnnnnnnnnnnnnnnnnnnnnnnnnnnnnnnnnnnnnnnnnnnnnnnnnnnnnnnnnnnnnnnnnnnnnnnnnnnnnnnnnnnnnnnnnnnnnnnnnnnnnnnnnnnnnnnnnnnnnnnnnnnnnnnnnnnnnnnnnnnnnnnnnnnnnnnnnnnnnnnnnnnnnnnnnnnnnnnnnnnnnnnnnnnnnnnnnnnnnnnnnnnnnnnnnnnnnnnnnnnnnnnnnnnnnnnnnnnnnnnnnnnnnnnnnnnnnnnnnnnnnnnnnnnnnnnnnnnnnnnnnnnnnnnnnnnnnnnnnnnnnnnnnnnnnnnnnnnnnnnnnnnnnnnnnnnnnnnnnnnnnnnnnnnnnnnnnnnnnnnnnnnnnnnnnnnnnnnnnnnnnnnnnnnnnnnnnnnnnnnnnnnnnnnnnnnnnnnnnnnnnnnnnnnnnnnnnnnnnnnnnnnnnnnnnnnnnnnnnnnnnnnnnnnnnnnnnnnnnnnnnnnnnnnnnnnnnnnnnnnnnnnnnnnnnnnnnnnnnnnnnnnnnnnnnnnnnnnnnnnnnnnnnnnnnnnnnnnnnnnnnnnnnnnnnnnnnnnnnnnnnnnnnnnnnnnnnnnnnnnnnnnnnnnnnnnnnnnnnnnnnnnnnnnnnnnnnnnnnnnnnnnnnnnnnnnnnnnnnnnnnnnnnnnnnnnnnnnnnnnnnnnnnnnnnnnnnnnnnnnnnnnnnnnnnnnnnnnnnnnnnnnnnnnnnnnnnnnnnnnnnnnnnnnnnnnnnnnnnnnnnnnnnnnnnnnnnnnnnnnnnnnnnnnnnnnnnnnnnnnnnnnnnnnnnnnnnnnnnnnnnnnnnnnnnnnnnnnnnnnnnnnnnnnnnnnnnnnnnnnnnnnnnnnnnnnnnnnnnnnnnnnnnnnnnnnnnnnnnnnnnnnnnnnnnnnnnnnnnnnnnnnnnnnnnnnnnnnnnnnnnnnnnnnnnnnnnnnnnnnnnnnnnnnnnnnnnnnnnnnnnnnnnnnnnnnnnnnnnnnnnnnnnnnnnnnnnnnnnnnnnnnnnnnnnnnnnnnnnnnnnnnnnnnnnnnnnnnnnnnnnnnnnnnnnnnnnnnnnnnnnnnnnnnnnnnnnnnnnnnnnnnnnnnnnnnnnnnnnnnnnnnnnnnnnnnnnnnnnnnnnnnnnnnnnnnnnnnnnnnnnnnnnnnnnnnnnnnnnnnnnnnnnnnnnnnnnnnnnnnnnnnnnnnnnnnnnnnnnnnnnnnnnnnnnnnnnnnnnnnnnnnnnnnnnnnnnnnnnnnnnnnnnnnnnnnnnnnnnnnnnnnnnnnnnnnnnnnnnnnnnnnnnnnnnnnnnnnnnnnnnnnnnnnnnnnnnnnnnnnnnnnnnnnnnnnnnnnnnnnnnnnnnnnnnnnnnnnnnnnnnnnnnnnnnnnnnnnnnnnnnnnnnnnnnnnnnnnnnnnnnnnnnnnnnnnnnnnnnnnnnnnnnnnnnnnnnnnnnnnnnnnnnnnnnnnnnnnnnnnnnnnnnnnnnnnnnnnnnnnnnnnnnnnnnnnnnnnnnnnnnnnnnnnnnnnnnnnnnnnnnnnnnnnnnnnnnnnnnnnnnnnnnnnnnnnnnnnnnnnnnnnnnnnnnnnnnnnnnnnnnnnnnnnnnnnnnnnnnnnnnnnnnnnnnnnnnnnnnnnnnnnnnnnnnnnnnnnnnnnnnnnnnnnnnnnnnnnnnnnnnnnnnnnnnnnnnnnnnnnnnnnnnnnnnnnnnnnnnnnnnnnnnnnnnnnnnnnnnnnnnnnnnnnnnnnnnnnnnnnnnnnnnnnnnnnnnnnnnnnnnnnnnnnnnnnnnnnnnnnnnnnnnnnnnnnnnnnnnnnnnnnnnnnnnnnnnnnnnnnnnnnnnnnnnnnnnnnnnnnnnnnnnnnnnnnnnnnnnnnnnnnnnnnnnnnnnnnnnnnnnnnnnnnnnnnnnnnnnnnnnnnnnnnnnnnnnnnnnnnnnnnnnnnnnnnnnnnnnnnnnnnnnnnnnnnnnnnnnnnnnnnnnnnnnnnnnnnnnnnnnnnnnnnnnnnnnnnnnnnnnnnnnnnnnnnnnnnnnnnnnnnnnnnnnnnnnnnnnnnnnnnnnnnnnnnnnnnnnnnnnnnnnnnnnnnnnnnnnnnnnnnnnnnnnnnnnnnnnnnnnnnnnnnnnnnnnnnnnnnnnnnnnnnnnnnnnnnnnnnnnnnnnnnnnnnnnnnnnnnnnnnnnnnnnnnnnnnnnnnnnnnnnnnnnnnnnnnnnnnnnnnnnnnnnnnnnnnnnnnnnnnnnnnnnnnnnnnnnnnnnnnnnnnnnnnnnnnnnnnnnnnnnnnnnnnnnnnnnnnnnnnnnnnnnnnnnnnnnnnnnnnnnnnnnnnnnnnnnnnnnnnnnnnnnnnnnnnnnnnnnnnnnnnnnnnnnnnnnnnnnnnnnnnnnnnnnnnnnnnnnnnnnnnnnnnnnnnnnnnnnnnnnnnnnnnnnnnnnnnnnnnnnnnnnnnnnnnnnnnnnnnnnnnnnnnnnnnnnnnnnnnnnnnnnnnnnnnnnnnnnnnnnnnnnnnnnnnnnnnnnnnnnnnnnnnnnnnnnnnnnnnnnnnnnnnnnnnnnnnnnnnnnnnnnnnnnnnnnnnnnnnnnnnnnnnnnnnnnnnnnnnnnnnnnnnnnnnnnnnnnnnnnnnnnnnnnnnnnnnnnnnnnnnnnnnnnnnnnnnnnnnnnnnnnnnnnnnnnnnnnnnnnnnnnnnnnnnnnnnnnnnnnnnnnnnnnnnnnnnnnnnnnnnnnnnnnnnnnnnnnnnnnnnnnnnnnnnnnnnnnnnnnnnnnnnnnnnnnnnnnnnnnnnnnnnnnnnnnnnnnnnnnnnnnnnnnnnnnnnnnnnnnnnnnnnnnnnnnnnnnnnnnnnnnnnnnnnnnnnnnnnnnnnnnnnnnnnnnnnnnnnnnnnnnnnnnnnnnnnnnnnnnnnnnnnnnnnnnnnnnnnnnnnnnnnnnnnnnnnnnnnnnnnnnnnnnnnnnnnnnnnnnnnnnnnnnnnnnnnnnnnnnnnnnnnnnnnnnnnnnnnnnnnnnnnnnnnnnnnnnnnnnnnnnnnnnnnnnnnnnnnnnnnnnnnnnnnnnnnnnnnnnnnnnnnnnnnnnnnnnnnnnnnnnnnnnnnnnnnnnnnnnnnnnnnnnnnnnnnnnnnnnnnnnnnnnnnnnnnnnnnnnnnnnnnnnnnnnnnnnnnnnnnnnnnnnnnnnnnnnnnnnnnnnnnnnnnnnnnnnnnnnnnnnnnnnnnnnnnnnnnnnnnnnnnnnnnnnnnnnnnnnnnnnnnnnnnnnnnnnnnnnnnnnnnnnnnnnnnnnnnnnnnnnnnnnnnnnnnnnnnnnnnnnnnnnnnnnnnnnnnnnnnnnnnnnnnnnnnnnnnnnnnnnnnnnnnnnnnnnnnnnnnnnnnnnnnnnnnnnnnnnnnnnnnnnnnnnnnnnnnnnnnnnnnnnnnnnnnnnnnnnnnnnnnnnnnnnnnnnnnnnnnnnnnnnnnnnnnnnnnnnnnnnnnnnnnnnnnnnnnnnnnnnnnnnnnnnnnnnnnnnnnnnnnnnnnnnnnnnnnnnnnnnnnnnnnnnnnnnnnnnnnnnnnnnnnnnnnnnnnnnnnnnnnnnnnnnnnnnnnnnnnnnnnnnnnnnnnnnnnnnnnnnnnnnnnnnnnnnnnnnnnnnnnnnnnnnnnnnnnnnnnnnnnnnnnnnnnnnnnnnnnnnnnnnnnnnnnnnnnnnnnnnnnnnnnnnnnnnnnnnnnnnnnnnnnnnnnnnnnnnnnnnnnnnnnnnnnnnnnnnnnnnnnnnnnnnnnnnnnnnnnnnnnnnnnnnnnnnnnnnnnnnnnnnnnnnnnnnnnnnnnnnnnnnnnnnnnnnnnnnnnnnnnnnnnnnnnnnnnnnnnnnnnnnnnnnnnnnnnnnnnnnnnnnnnnnnnnnnnnnnnnnnnnnnnnnnnnnnnnnnnnnnnnnnnnnnnnnnnnnnnnnnnnnnnnnnnnnnnnnnnnnnnnnnnnnnnnnnnnnnnnnnnnnnnnnnnnnnnnnnnnnnnnnnnnnnnnnnnnnnnnnnnnnnnnnnnnnnnnnnnnnnnnnnnnnnnnnnnnnnnnnnnnnnnnnnnnnnnnnnnnnnnnnnnnnnnnnnnnnnnnnnnnnnnnnnnnnnnnnnnnnnnnnnnnnnnnnnnnnnnnnnnnnnnnnnnnnnnnnnnnnnnnnnnnnnnnnnnnnnnnnnnnnnnnnnnnnnnnnnnnnnnnnnnnnnnnnnnnnnnnnnnnnnnnnnnnnnnnnnnnnnnnnnnnnnnnnnnnnnnnnnnnnnnnnnnnnnnnnnnnnnnnnnnnnnnnnnnnnnnnnnnnnnnnnnnnnnnnnnnnnnnnnnnnnnnnnnnnnnnnnnnnnnnnnnnnnnnnnnnnnnnnnnnnnnnnnnnnnnnnnnnnnnnnnnnnnnnnnnnnnnnnnnnnnnnnnnnnnnnnnnnnnnnnnnnnnnnnnnnnnnnnnnnnnnnnnnnnnnnnnnnnnnnnnnnnnnnnnnnnnnnnnnnnnnnnnnnnnnnnnnnnnnnnnnnnnnnnnnnnnnnnnnnnnnnnnnnnnnnnnnnnnnnnnnnnnnnnnnnnnnnnnnnnnnnnnnnnnnnnnnnnnnnnnnnnnnnnnnnnnnnnnnnnnnnnnnnnnnnnnnnnnnnnnnnnnnnnnnnnnnnnnnnnnnnnnnnnnnnnnnnnnnnnnnnnnnnnnnnnnnnnnnnnnnnnnnnnnnnnnnnnnnnnnnnnnnnnnnnnnnnnnnnnnnnnnnnnnnnnnnnnnnnnnnnnnnnnnnnnnnnnnnnnnnnnnnnnnnnnnnnnnnnnnnnnnnnnnnnnnnnnnnnnnnnnnnnnnnnnnnnnnnnnnnnnnnnnnnnnnnnnnnnnnnnnnnnnnnnnnnnnnnnnnnnnnnnnnnnnnnnnnnnnnnnnnnnnnnnnnnnnnnnnnnnnnnnnnnnnnnnnnnnnnnnnnnnnnnnnnnnnnnnnnnnnnnnnnnnnnnnnnnnnnnnnnnnnnnnnnnnnnnnnnnnnnnnnnnnnnnnnnnnnnnnnnnnnnnnnnnnnnnnnnnnnnnnnnnnnnnnnnnnnnnnnnnnnnnnnnnnnnnnnnnnnnnnnnnnnnnnnnnnnnnnnnnnnnnnnnnnnnnnnnnnnnnnnnnnnnnnnnnnnnnnnnnnnnnnnnnnnnnnnnnnnnnnnnnnnnnnnnnnnnnnnnnnnnnnnnnnnnnnnnnnnnnnnnnnnnnnnnnnnnnnnnnnnnnnnnnnnnnnnnnnnnnnnnnnnnnnnnnnnnnnnnnnnnnnnnnnnnnnnnnnnnnnnnnnnnnnnnnnnnnnnnnnnnnnnnnnnnnnnnnnnnnnnnnnnnnnnnnnnnnnnnnnnnnnnnnnnnnnnnnnnnnnnnnnnnnnnnnnnnnnnnnnnnnnnnnnnnnnnnnnnnnnnnnnnnnnnnnnnnnnnnnnnnnnnnnnnnnnnnnnnnnnnnnnnnnnnnnnnnnnnnnnnnnnnnnnnnnnnnnnnnnnnnnnnnnnnnnnnnnnnnnnnnnnnnnnnnnnnnnnnnnnnnnnnnnnnnnnnnnnnnnnnnnnnnnnnnnnnnnnnnnnnnnnnnnnnnnnnnnnnnnnnnnnnnnnnnnnnnnnnnnnnnnnnnnnnnnnnnnnnnnnnnnnnnnnnnnnnnnnnnnnnnnnnnnnnnnnnnnnnnnnnnnnnnnnnnnnnnnnnnnnnnnnnnnnnnnnnnnnnnnnnnnnnnnnnnnnnnnnnnnnnnnnnnnnnnnnnnnnnnnnnnnnnnnnnnnnnnnnnnnnnnnnnnnnnnnnnnnnnnnnnnnnnnnnnnnnnnnnnnnnnnnnnnnnnnnnnnnnnnnnnnnnnnnnnnnnnnnnnnnnnnnnnnnnnnnnnnnnnnnnnnnnnnnnnnnnnnnnnnnnnnnnnnnnnnnnnnnnnnnnnnnnnnnnnnnnnnnnnnnnnnnnnnnnnnnnnnnnnnnnnnnnnnnnnnnnnnnnnnnnnnnnnnnnnnnnnnnnnnnnnnnnnnnnnnnnnnnnnnnnnnnnnnnnnnnnnnnnnnnnnnnnnnnnnnnnnnnnnnnnnnnnnnnnnnnnnnnnnnnnnnnnnnnnnnnnnnnnnnnnnnnnnnnnnnnnnnnnnnnnnnnnnnnnnnnnnnnnnnnnnnnnnnnnnnnnnnnnnnnnnnnnnnnnnnnnnnnnnnnnnnnnnnnnnnnnnnnnnnnnnnnnnnnnnnnnnnnnnnnnnnnnnnnnnnnnnnnnnnnnnnnnnnnnnnnnnnnnnnnnnnnnnnnnnnnnnnnnnnnnnnnnnnnnnnnnnnnnnnnnnnnnnnnnnnnnnnnnnnnnnnnnnnnnnnnnnnnnnnnnnnnnnnnnnnnnnnnnnnnnnnnnnnnnnnnnnnnnnnnnnnnnnnnnnnnnnnnnnnnnnnnnnnnnnnnnnnnnnnnnnnnnnnnnnnnnnnnnnnnnnnnnnnnnnnnnnnnnnnnnnnnnnnnnnnnnnnnnnnnnnnnnnnnnnnnnnnnnnnnnnnnnnnnnnnnnnnnnnnnnnnnnnnnnnnnnnnnnnnnnnnnnnnnnnnnnnnnnnnnnnnnnnnnnnnnnnnnnnnnnnnnnnnnnnnnnnnnnnnnnnnnnnnnnnnnnnnnnnnnnnnnnnnnnnnnnnnnnnnnnnnnnnnnnnnnnnnnnnnnnnnnnnnnnnnnnnnnnnnnnnnnnnnnnnnnnnnnnnnnnnnnnnnnnnnnnnnnnnnnnnnnnnnnnnnnnnnnnnnnnnnnnnnnnnnnnnnnnnnnnnnnnnnnnnnnnnnnnnnnnnnnnnnnnnnnnnnnnnnnnnnnnnnnnnnnnnnnnnnnnnnnnnnnnnnnnnnnnnnnnnnnnnnnnnnnnnnnnnnnnnnnnnnnnnnnnnnnnnnnnnnnnnnnnnnnnnnnnnnnnnnnnnnnnnnnnnnnnnnnnnnnnnnnnnnnnnnnnnnnnnnnnnnnnnnnnnnnnnnnnnnnnnnnnnnnnnnnnnnnnnnnnnnnnnnnnnnnnnnnnnnnnnnnnnnnnnnnnnnnnnnnnnnnnnnnnnnnnnnnnnnnnnnnnnnnnnnnnnnnnnnnnnnnnnnnnnnnnnnnnnnnnnnnnnnnnnnnnnnnnnnnnnnnnnnnnnnnnnnnnnnnnnnnnnnnnnnnnnnnnnnnnnnnnnnnnnnnnnnnnnnnnnnnnnnnnnnnnnnnnnnnnnnnnnnnnnnnnnnnnnnnnnnnnnnnnnnnnnnnnnnnnnnnnnnnnnnnnnnnnnnnnnnnnnnnnnnnnnnnnnnnnnnnnnnnnnnnnnnnnnnnnnnnnnnnnnnnnnnnnnnnnnnnnnnnnnnnnnnnnnnnnnnnnnnnnnnnnnnnnnnnnnnnnnnnnnnnnnnnnnnnnnnnnnnnnnnnnnnnnnnnnnnnnnnnnnnnnnnnnnnnnnnnnnnnnnnnnnnnnnnnnnnnnnnnnnnnnnnnnnnnnnnnnnnnnnnnnnnnnnnnnnnnnnnnnnnnnnnnnnnnnnnnnnnnnnnnnnnnnnnnnnnnnnnnnnnnnnnnnnnnnnnnnnnnnnnnnnnnnnnnnnnnnnnnnnnnnnnnnnnnnnnnnnnnnnnnnnnnnnnnnnnnnnnnnnnnnnnnnnnnnnnnnnnnnnnnnnnnnnnnnnnnnnnnnnnnnnnnnnnnnnnnnnnnnnnnnnnnnnnnnnnnnnnnnnnnnnnnnnnnnnnnnnnnnnnnnnnnnnnnnnnnnnnnnnnnnnnnnnnnnnnnnnnnnnnnnnnnnnnnnnnnnnnnnnnnnnnnnnnnnnnnnnnnnnnnnnnnnnnnnnnnnnnnnnnnnnnnnnnnnnnnnnnnnnnnnnnnnnnnnnnnnnnnnnnnnnnnnnnnnnnnnnnnnnnnnnnnnnnnnnnnnnnnnnnnnnnnnnnnnnnnnnnnnnnnnnnnnnnnnnnnnnnnnnnnnnnnnnnnnnnnnnnnnnnnnnnnnnnnnnnnnnnnnnnnnnnnnnnnnnnnnnnnnnnnnnnnnnnnnnnnnnnnnnnnnnnnnnnnnnnnnnnnnnnnnnnnnnnnnnnnnnnnnnnnnnnnnnnnnnnnnnnnnnnnnnnnnnnnnnnnnnnnnnnnnnnnnnnnnnnnnnnnnnnnnnnnnnnnnnnnnnnnnnnnnnnnnnnnnnnnnnnnnnnnnnnnnnnnnnnnnnnnnnnnnnnnnnnnnnnnnnnnnnnnnnnnnnnnnnnnnnnnnnnnnnnnnnnnnnnnnnnnnnnnnnnnnnnnnnnnnnnnnnnnnnnnnnnnnnnnnnnnnnnnnnnnnnnnnnnnnnnnnnnnnnnnnnnnnnnnnnnnnnnnnnnnnnnnnnnnnnnnnnnnnnnnnnnnnnnnnnnnnnnnnnnnnnnnnnnnnnnnnnnnnnnnnnnnnnnnnnnnnnnnnnnnnnnnnnnnnnnnnnnnnnnnnnnnnnnnnnnnnnnnnnnnnnnnnnnnnnnnnnnnnnnnnnnnnnnnnnnnnnnnnnnnnnnnnnnnnnnnnnnnnnnnnnnnnnnnnnnnnnnnnnnnnnnnnnnnnnnnnnnnnnnnnnnnnnnnnnnnnnnnnnnnnnnnnnnnnnnnnnnnnnnnnnnnnnnnnnnnnnnnnnnnnnnnnnnnnnnnnnnnnnnnnnnnnnnnnnnnnnnnnnnnnnnnnnnnnnnnnnnnnnnnnnnnnnnnnnnnnnnnnnnnnnnnnnnnnnnnnnnnnnnnnnnnnnnnnnnnnnnnnnnnnnnnnnnnnnnnnnnnnnnnnnnnnnnnnnnnnnnnnnnnnnnnnnnnnnnnnnnnnnnnnnnnnnnnnnnnnnnnnnnnnnnnnnnnnnnnnnnnnnnnnnnnnnnnnnnnnnnnnnnnnnnnnnnnnnnnnnnnnnnnnnnnnnnnnnnnnnnnnnnnnnnnnnnnnnnnnnnnnnnnnnnnnnnnnnnnnnnnnnnnnnnnnnnnnnnnnnnnnnnnnnnnnnnnnnnnnnnnnnnnnnnnnnnnnnnnnnnnnnnnnnnnnnnnnnnnnnnnnnnnnnnnnnnnnnnnnnnnnnnnnnnnnnnnnnnnnnnnnnnnnnnnnnnnnnnnnnnnnnnnnnnnnnnnnnnnnnnnnnnnnnnnnnnnnnnnnnnnnnnnnnnnnnnnnnnnnnnnnnnnnnnnnnnnnnnnnnnnnnnnnnnnnnnnnnnnnnnnnnnnnnnnnnnnnnnnnnnnnnnnnnnnnnnnnnnnnnnnnnnnnnnnnnnnnnnnnnnnnnnnnnnnnnnnnnnnnnnnnnnnnnnnnnnnnnnnnnnnnnnnnnnnnnnnnnnnnnnnnnnnnnnnnnnnnnnnnnnnnnnnnnnnnnnnnnnnnnnnnnnnnnnnnnnnnnnnnnnnnnnnnnnnnnnnnnnnnnnnnnnnnnnnnnnnnnnnnnnnnnnnnnnnnnnnnnnnnnnnnnnnnnnnnnnnnnnnnnnnnnnnnnnnnnnnnnnnnnnnnnnnnnnnnnnnnnnnnnnnnnnnnnnnnnnnnnnnnnnnnnnnnnnnnnnnnnnnnnnnnnnnnnnnnnnnnnnnnnnnnnnnnnnnnnnnnnnnnnnnnnnnnnnnnnnnnnnnnnnnnnnnnnnnnnnnnnnnnnnnnnnnnnnnnnnnnnnnnnnnnnnnnnnnnnnnnnnnnnnnnnnnnnnnnnnnnnnnnnnnnnnnnnnnnnnnnnnnnnnnnnnnnnnnnnnnnnnnnnnnnnnnnnnnnnnnnnnnnnnnnnnnnnnnnnnnnnnnnnnnnnnnnnnnnnnnnnnnnnnnnnnnnnnnnnnnnnnnnnnnnnnnnnnnnnnnnnnnnnnnnnnnnnnnnnnnnnnnnnnnnnnnnnnnnnnnnnnnnnnnnnnnnnnnnnnnnnnnnnnnnnnnnnnnnnnnnnnnnnnnnnnnnnnnnnnnnnnnnnnnnnnnnnnnnnnnnnnnnnnnnnnnnnnnnnnnnnnnnnnnnnnnnnnnnnnnnnnnnnnnnnnnnnnnnnnnnnnnnnnnnnnnnnnnnnnnnnnnnnnnnnnnnnnnnnnnnnnnnnnnnnnnnnnnnnnnnnnnnnnnnnnnnnnnnnnnnnnnnnnnnnnnnnnnnnnnnnnnnnnnnnnnnnnnnnnnnnnnnnnnnnnnnnnnnnnnnnnnnnnnnnnnnnnnnnnnnnnnnnnnnnnnnnnnnnnnnnnnnnnnnnnnnnnnnnnnnnnnnnnnnnnnnnnnnnnnnnnnnnnnnnnnnnnnnnnnnnnnnnnnnnnnnnnnnnnnnnnnnnnnnnnnnnnnnnnnnnnnnnnnnnnnnnnnnnnnnnnnnnnnnnnnnnnnnnnnnnnnnnnnnnnnnnnnnnnnnnnnnnnnnnnnnnnnnnnnnnnnnnnnnnnnnnnnnnnnnnnnnnnnnnnnnnnnnnnnnnnnnnnnnnnnnnnnnnnnnnnnnnnnnnnnnnnnnnnnnnnnnnnnnnnnnnnnnnnnnnnnnnnnnnnnnnnnnnnnnnnnnnnnnnnnnnnnnnnnnnnnnnnnnnnnnnnnnnnnnnnnnnnnnnnnnnnnnnnnnnnnnnnnnnnnnnnnnnnnnnnnnnnnnnnnnnnnnnnnnnnnnnnnnnnnnnnnnnnnnnnnnnnnnnnnnnnnnnnnnnnnnnnnnnnnnnnnnnnnnnnnnnnnnnnnnnnnnnnnnnnnnnnnnnnnnnnnnnnnnnnnnnnnnnnnnnnnnnnnnnnnnnnnnnnnnnnnnnnnnnnnnnnnnnnnnnnnnnnnnnnnnnnnnnnnnnnnnnnnnnnnnnnnnnnnnnnnnnnnnnnnnnnnnnnnnnnnnnnnnnnnnnnnnnnnnnnnnnnnnnnnnnnnnnnnnnnnnnnnnnnnnnnnnnnnnnnnnnnnnnnnnnnnnnnnnnnnnnnnnnnnnnnnnnnnnnnnnnnnnnnnnnnnnnnnnnnnnnnnnnnnnnnnnnnnnnnnnnnnnnnnnnnnnnnnnnnnnnnnnnnnnnnnnnnnnnnnnnnnnnnnnnnnnnnnnnnnnnnnnnnnnnnnnnnnnnnnnnnnnnnnnnnnnnnnnnnnnnnnnnnnnnnnnnnnnnnnnnnnnnnnnnnnnnnnnnnnnnnnnnnnnnnnnnnnnnnnnnnnnnnnnnnnnnnnnnnnnnnnnnnnnnnnnnnnnnnnnnnnnnnnnnnnnnnnnnnnnnnnnnnnnnnnnnnnnnnnnnnnnnnnnnnnnnnnnnnnnnnnnnnnnnnnnnnnnnnnnnnnnnnnnnnnnnnnnnnnnnnnnnnnnnnnnnnnnnnnnnnnnnnnnnnnnnnnnnnnnnnnnnnnnnnnnnnnnnnnnnnnnnnnnnnnnnnnnnnnnnnnnnnnnnnnnnnnnnnnnnnnnnnnnnnnnnnnnnnnnnnnnnnnnnnnnnnnnnnnnnnnnnnnnnnnnnnnnnnnnnnnnnnnnnnnnnnnnnnnnnnnnnnnnnnnnnnnnnnnnnnnnnnnnnnnnnnnnnnnnnnnnnnnnnnnnnnnnnnnnnnnnnnnnnnnnnnnnnnnnnnnnnnnnnnnnnnnnnnnnnnnnnnnnnnnnnnnnnnnnnnnnnnnnnnnnnnnnnnnnnnnnnnnnnnnnnnnnnnnnnnnnnnnnnnnnnnnnnnnnnnnnnnnnnnnnnnnnnnnnnnnnnnnnnnnnnnnnnnnnnnnnnnnnnnnnnnnnnnnnnnnnnnnnnnnnnnnnnnnnnnnnnnnnnnnnnnnnnnnnnnnnnnnnnnnnnnnnnnnnnnnnnnnnnnnnnnnnnnnnnnnnnnnnnnnnnnnnnnnnnnnnnnnnnnnnnnnnnnnnnnnnnnnnnnnnnnnnnnnnnnnnnnnnnnnnnnnnnnnnnnnnnnnnnnnnnnnnnnnnnnnnnnnnnnnnnnnnnnnnnnnnnnnnnnnnnnnnnnnnnnnnnnnnnnnnnnnnnnnnnnnnnnnnnnnnnnnnnnnnnnnnnnnnnnnnnnnnnnnnnnnnnnnnnnnnnnnnnnnnnnnnnnnnnnnnnnnnnnnnnnnnnnnnnnnnnnnnnnnnnnnnnnnnnnnnnnnnnnnnnnnnnnnnnnnnnnnnnnnnnnnnnnnnnnnnnnnnnnnnnnnnnnnnnnnnnnnnnnnnnnnnnnnnnnnnnnnnnnnnnnnnnnnnnnnnnnnnnnnnnnnnnnnnnnnnnnnnnnnnnnnnnnnnnnnnnnnnnnnnnnnnnnnnnnnnnnnnnnnnnnnnnnnnnnnnnnnnnnnnnnnnnnnnnnnnnnnnnnnnnnnnnnnnnnnnnnnnnnnnnnnnnnnnnnnnnnnnnnnnnnnnnnnnnnnnnnnnnnnnnnnnnnnnnnnnnnnnnnnnnnnnnnnnnnnnnnnnnnnnnnnnnnnnnnnnnnnnnnnnnnnnnnnnnnnnnnnnnnnnnnnnnnnnnnnnnnnnnnnnnnnnnnnnnnnnnnnnnnnnnnnnnnnnnnnnnnnnnnnnnnnnnnnnnnnnnnnnnnnnnnnnnnnnnnnnnnnnnnnnnnnnnnnnnnnnnnnnnnnnnnnnnnnnnnnnnnnnnnnnnnnnnnnnnnnnnnnnnnnnnnnnnnnnnnnnnnnnnnnnnnnnnnnnnnnnnnnnnnnnnnnnnnnnnnnnnnnnnnnnnnnnnnnnnnnnnnnnnnnnnnnnnnnnnnnnnnnnnnnnnnnnnnnnnnnnnnnnnnnnnnnnnnnnnnnnnnnnnnnnnnnnnnnnnnnnnnnnnnnnnnnnnnnnnnnnnnnnnnnnnnnnnnnnnnnnnnnnnnnnnnnnnnnnnnnnnnnnnnnnnnnnnnnnnnnnnnnnnnnnnnnnnnnnnnnnnnnnnnnnnnnnnnnnnnnnnnnnnnnnnnnnnnnnnnnnnnnnnnnnnnnnnnnnnnnnnnnnnnnnnnnnnnnnnnnnnnnnnnnnnnnnnnnnnnnnnnnnnnnnnnnnnnnnnnnnnnnnnnnnnnnnnnnnnnnnnnnnnnnnnnnnnnnnnnnnnnnnnnnnnnnnnnnnnnnnnnnnnnnnnnnnnnnnnnnnnnnnnnnnnnnnnnnnnnnnnnnnnnnnnnnnnnnnnnnnnnnnnnnnnnnnnnnnnnnnnnnnnnnnnnnnnnnnnnnnnnnnnnnnnnnnnnnnnnnnnnnnnnnnnnnnnnnnnnnnnnnnnnnnnnnnnnnnnnnnnnnnnnnnnnnnnnnnnnnnnnnnnnnnnnnnnnnnnnnnnnnnnnnnnnnnnnnnnnnnnnnnnnnnnnnnnnnnnnnnnnnnnnnnnnnnnnnnnnnnnnnnnnnnnnnnnnnnnnnnnnnnnnnnnnnnnnnnnnnnnnnnnnnnnnnnnnnnnnnnnnnnnnnnnnnnnnnnnnnnnnnnnnnnnnnnnnnnnnnnnnnnnnnnnnnnnnnnnnnnnnnnnnnnnnnnnnnnnnnnnnnnnnnnnnnnnnnnnnnnnnnnnnnnnnnnnnnnnnnnnnnnnnnnnnnnnnnnnnnnnnnnnnnnnnnnnnnnnnnnnnnnnnnnnnnnnnnnnnnnnnnnnnnnnnnnnnnnnnnnnnnnnnnnnnnnnnnnnnnnnnnnnnnnnnnnnnnnnnnnnnnnnnnnnnnnnnnnnnnnnnnnnnnnnnnnnnnnnnnnnnnnnnnnnnnnnnnnnnnnnnnnnnnnnnnnnnnnnnnnnnnnnnnnnnnnnnnnnnnnnnnnnnnnnnnnnnnnnnnnnnnnnnnnnnnnnnnnnnnnnnnnnnnnnnnnnnnnnnnnnnnnnnnnnnnnnnnnnnnnnnnnnnnnnnnnnnnnnnnnnnnnnnnnnnnnnnnnnnnnnnnnnnnnnnnnnnnnnnnnnnnnnnnnnnnnnnnnnnnnnnnnnnnnnnnnnnnnnnnnnnnnnnnnnnnnnnnnnnnnnnnnnnnnnnnnnnnnnnnnnnnnnnnnnnnnnnnnnnnnnnnnnnnnnnnnnnnnnnnnnnnnnnnnnnnnnnnnnnnnnnnnnnnnnnnnnnnnnnnnnnnnnnnnnnnnnnnnnnnnnnnnnnnnnnnnnnnnnnnnnnnnnnnnnnnnnnnnnnnnnnnnnnnnnnnnnnnnnnnnnnnnnnnnnnnnnnnnnnnnnnnnnnnnnnnnnnnnnnnnnnnnnnnnnnnnnnnnnnnnnnnnnnnnnnnnnnnnnnnnnnnnnnnnnnnnnnnnnnnnnnnnnnnnnnnnnnnnnnnnnnnnnnnnnnnnnnnnnnnnnnnnnnnnnnnnnnnnnnnnnnnnnnnnnnnnnnnnnnnnnnnnnnnnnnnnnnnnnnnnnnnnnnnnnnnnnnnnnnnnnnnnnnnnnnnnnnnnnnnnnnnnnnnnnnnnnnnnnnnnnnnnnnnnnnnnnnnnnnnnnnnnnnnnnnnnnnnnnnnnnnnnnnnnnnnnnnnnnnnnnnnnnnnnnnnnnnnnnnnnnnnnnnnnnnnnnnnnnnnnnnnnnnnnnnnnnnnnnnnnnnnnnnnnnnnnnnnnnnnnnnnnnnnnnnnnnnnnnnnnnnnnnnnnnnnnnnnnnnnnnnnnnnnnnnnnnnnnnnnnnnnnnnnnnnnnnnnnnnnnnnnnnnnnnnnnnnnnnnnnnnnnnnnnnnnnnnnnnnnnnnnnnnnnnnnnnnnnnnnnnnnnnnnnnnnnnnnnnnnnnnnnnnnnnnnnnnnnnnnnnnnnnnnnnnnnnnnnnnnnnnnnnnnnnnnnnnnnnnnnnnnnnnnnnnnnnnnnnnnnnnnnnnnnnnnnnnnnnnnnnnnnnnnnnnnnnnnnnnnnnnnnnnnnnnnnnnnnnnnnnnnnnnnnnnnnnnnnnnnnnnnnnnnnnnnnnnnnnnnnnnnnnnnnnnnnnnnnnnnnnnnnnnnnnnnnnnnnnnnnnnnnnnnnnnnnnnnnnnnnnnnnnnnnnnnnnnnnnnnnnnnnnnnnnnnnnnnnnnnnnnnnnnnnnnnnnnnnnnnnnnnnnnnnnnnnnnnnnnnnnnnnnnnnnnnnnnnnnnnnnnnnnnnnnnnnnnnnnnnnnnnnnnnnnnnnnnnnnnnnnnnnnnnnnnnnnnnnnnnnnnnnnnnnnnnnnnnnnnnnnnnnnnnnnnnnnnnnnnnnnnnnnnnnnnnnnnnnnnnnnnnnnnnnnnnnnnnnnnnnnnnnnnnnnnnnnnnnnnnnnnnnnnnnnnnnnnnnnnnnnnnnnnnnnnnnnnnnnnnnnnnnnnnnnnnnnnnnnnnnnnnnnnnnnnnnnnnnnnnnnnnnnnnnnnnnnnnnnnnnnnnnnnnnnnnnnnnnnnnnnnnnnnnnnnnnnnnnnnnnnnnnnnnnnnnnnnnnnnnnnnnnnnnnnnnnnnnnnnnnnnnnnnnnnnnnnnnnnnnnnnnnnnnnnnnnnnnnnnnnnnnnnnnnnnnnnnnnnnnnnnnnnnnnnnnnnnnnnnnnnnnnnnnnnnnnnnnnnnnnnnnnnnnnnnnnnnnnnnnnnnnnnnnnnnnnnnnnnnnnnnnnnnnnnnnnnnnnnnnnnnnnnnnnnnnnnnnnnnnnnnnnnnnnnnnnnnnnnnnnnnnnnnnnnnnnnnnnnnnnnnnnnnnnnnnnnnnnnnnnnnnnnnnnnnnnnnnnnnnnnnnnnnnnnnnnnnnnnnnnnnnnnnnnnnnnnnnnnnnnnnnnnnnnnnnnnnnnnnnnnnnnnnnnnnnnnnnnnnnnnnnnnnnnnnnnnnnnnnnnnnnnnnnnnnnnnnnnnnnnnnnnnnnnnnnnnnnnnnnnnnnnnnnnnnnnnnnnnnnnnnnnnnnnnnnnnnnnnnnnnnnnnnnnnnnnnnnnnnnnnnnnnnnnnnnnnnnnnnnnnnnnnnnnnnnnnnnnnnnnnnnnnnnnnnnnnnnnnnnnnnnnnnnnnnnnnnnnnnnnnnnnnnnnnnnnnnnnnnnnnnnnnnnnnnnnnnnnnnnnnnnnnnnnnnnnnnnnnnnnnnnnnnnnnnnnnnnnnnnnnnnnnnnnnnnnnnnnnnnnnnnnnnnnnnnnnnnnnnnnnnnnnnnnnnnnnnnnnnnnnnnnnnnnnnnnnnnnnnnnnnnnnnnnnnnnnnnnnnnnnnnnnnnnnnnnnnnnnnnnnnnnnnnnnnnnnnnnnnnnnnnnnnnnnnnnnnnnnnnnnnnnnnnnnnnnnnnnnnnnnnnnnnnnnnnnnnnnnnnnnnnnnnnnnnnnnnnnnnnnnnnnnnnnnnnnnnnnnnnnnnnnnnnnnnnnnnnnnnnnnnnnnnnnnnnnnnnnnnnnnnnnnnnnnnnnnnnnnnnnnnnnnnnnnnnnnnnnnnnnnnnnnnnnnnnnnnnnnnnnnnnnnnnnnnnnnnnnnnnnnnnnnnnnnnnnnnnnnnnnnnnnnnnnnnnnnnnnnnnnnnnnnnnnnnnnnnnnnnnnnnnnnnnnnnnnnnnnnnnnnnnnnnnnnnnnnnnnnnnnnnnnnnnnnnnnnnnnnnnnnnnnnnnnnnnnnnnnnnnnnnnnnnnnnnnnnnnnnnnnnnnnnnnnnnnnnnnnnnnnnnnnnnnnnnnnnnnnnnnnnnnnnnnnnnnnnnnnnnnnnnnnnnnnnnnnnnnnnnnnnnnnnnnnnnnnnnnnnnnnnnnnnnnnnnnnnnnnnnnnnnnnnnnnnnnnnnnnnnnnnnnnnnnnnnnnnnnnnnnnnnnnnnnnnnnnnnnnnnnnnnnnnnnnnnnnnnnnnnnnnnnnnnnnnnnnnnnnnnnnnnnnnnnnnnnnnnnnnnnnnnnnnnnnnnnnnnnnnnnnnnnnnnnnnnnnnnnnnnnnnnnnnnnnnnnnnnnnnnnnnnnnnnnnnnnnnnnnnnnnnnnnnnnnnnnnnnnnnnnnnnnnnnnnnnnnnnnnnnnnnnnnnnnnnnnnnnnnnnnnnnnnnnnnnnnnnnnnnnnnnnnnnnnnnnnnnnnnnnnnnnnnnnnnnnnnnnnnnnnnnnnnnnnnnnnnnnnnnnnnnnnnnnnnnnnnnnnnnnnnnnnnnnnnnnnnnnnnnnnnnnnnnnnnnnnnnnnnnnnnnnnnnnnnnnnnnnnnnnnnnnnnnnnnnnnnnnnnnnnnnnnnnnnnnnnnnnnnnnnnnnnnnnnnnnnnnnnnnnnnnnnnnnnnnnnnnnnnnnnnnnnnnnnnnnnnnnnnnnnnnnnnnnnnnnnnnnnnnnnnnnnnnnnnnnnnnnnnnnnnnnnnnnnnnnnnnnnnnnnnnnnnnnnnnnnnnnnnnnnnnnnnnnnnnnnnnnnnnnnnnnnnnnnnnnnnnnnnnnnnnnnnnnnnnnnnnnnnnnnnnnnnnnnnnnnnnnnnnnnnnnnnnnnnnnnnnnnnnnnnnnnnnnnnnnnnnnnnnnnnnnnnnnnnnnnnnnnnnnnnnnnnnnnnnnnnnnnnnnnnnnnnnnnnnnnnnnnnnnnnnnnnnnnnnnnnnnnnnnnnnnnnnnnnnnnnnnnnnnnnnnnnnnnnnnnnnnnnnnnnnnnnnnnnnnnnnnnnnnnnnnnnnnnnnnnnnnnnnnnnnnnnnnnnnnnnnnnnnnnnnnnnnnnnnnnnnnnnnnnnnnnnnnnnnnnnnnnnnnnnnnnnnnnnnnnnnnnnnnnnnnnnnnnnnnnnnnnnnnnnnnnnnnnnnnnnnnnnnnnnnnnnnnnnnnnnnnnnnnnnnnnnnnnnnnnnnnnnnnnnnnnnnnnnnnnnnnnnnnnnnnnnnnnnnnnnnnnnnnnnnnnnnnnnnnnnnnnnnnnnnnnnnnnnnnnnnnnnnnnnnnnnnnnnnnnnnnnnnnnnnnnnnnnnnnnnnnnnnnnnnnnnnnnnnnnnnnnnnnnnnnnnnnnnnnnnnnnnnnnnnnnnnnnnnnnnnnnnnnnnnnnnnnnnnnnnnnnnnnnnnnnnnnnnnnnnnnnnnnnnnnnnnnnnnnnnnnnnnnnnnnnnnnnnnnnnnnnnnnnnnnnnnnnnnnnnnnnnnnnnnnnnnnnnnnnnnnnnnnnnnnnnnnnnnnnnnnnnnnnnnnnnnnnnnnnnnnnnnnnnnnnnnnnnnnnnnnnnnnnnnnnnnnnnnnnnnnnnnnnnnnnnnnnnnnnnnnnnnnnnnnnnnnnnnnnnnnnnnnnnnnnnnnnnnnnnnnnnnnnnnnnnnnnnnnnnnnnnnnnnnnnnnnnnnnnnnnnnnnnnnnnnnnnnnnnnnnnnnnnnnnnnnnnnnnnnnnnnnnnnnnnnnnnnnnnnnnnnnnnnnnnnnnnnnnnnnnnnnnnnnnnnnnnnnnnnnnnnnnnnnnnnnnnnnnnnnnnnnnnnnnnnnnnnnnnnnnnnnnnnnnnnnnnnnnnnnnnnnnnnnnnnnnnnnnnnnnnnnnnnnnnnnnnnnnnnnnnnnnnnnnnnnnnnnnnnnnnnnnnnnnnnnnnnnnnnnnnnnnnnnnnnnnnnnnnnnnnnnnnnnnnnnnnnnnnnnnnnnnnnnnnnnnnnnnnnnnnnnnnnnnnnnnnnnnnnnnnnnnnnnnnnnnnnnnnnnnnnnnnnnnnnnnnnnnnnnnnnnnnnnnnnnnnnnnnnnnnnnnnnnnnnnnnnnnnnnnnnnnnnnnnnnnnnnnnnnnnnnnnnnnnnnnnnnnnnnnnnnnnnnnnnnnnnnnnnnnnnnnnnnnnnnnnnnnnnnnnnnnnnnnnnnnnnnnnnnnnnnnnnnnnnnnnnnnnnnnnnnnnnnnnnnnnnnnnnnnnnnnnnnnnnnnnnnnnnnnnnnnnnnnnnnnnnnnnnnnnnnnnnnnnnnnnnnnnnnnnnnnnnnnnnnnnnnnnnnnnnnnnnnnnnnnnnnnnnnnnnnnnnnnnnnnnnnnnnnnnnnnnnnnnnnnnnnnnnnnnnnnnnnnnnnnnnnnnnnnnnnnnnnnnnnnnnnnnnnnnnnnnnnnnnnnnnnnnnnnnnnnnnnnnnnnnnnnnnnnnnnnnnnnnnnnnnnnnnnnnnnnnnnnnnnnnnnnnnnnnnnnnnnnnnnnnnnnnnnnnnnnnnnnnnnnnnnnnnnnnnnnnnnnnnnnnnnnnnnnnnnnnnnnnnnnnnnnnnnnnnnnnnnnnnnnnnnnnnnnnnnnnnnnnnnnnnnnnnnnnnnnnnnnnnnnnnnnnnnnnnnnnnnnnnnnnnnnnnnnnnnnnnnnnnnnnnnnnnnnnnnnnnnnnnnnnnnnnnnnnnnnnnnnnnnnnnnnnnnnnnnnnnnnnnnnnnnnnnnnnnnnnnnnnnnnnnnnnnnnnnnnnnnnnnnnnnnnnnnnnnnnnnnnnnnnnnnnnnnnnnnnnnnnnnnnnnnnnnnnnnnnnnnnnnnnnnnnnnnnnnnnnnnnnnnnnnnnnnnnnnnnnnnnnnnnnnnnnnnnnnnnnnnnnnnnnnnnnnnnnnnnnnnnnnnnnnnnnnnnnnnnnnnnnnnnnnnnnnnnnnnnnnnnnnnnnnnnnnnnnnnnnnnnnnnnnnnnnnnnnnnnnnnnnnnnnnnnnnnnnnnnnnnnnnnnnnnnnnnnnnnnnnnnnnnnnnnnnnnnnnnnnnnnnnnnnnnnnnnnnnnnnnnnnnnnnnnnnnnnnnnnnnnnnnnnnnnnnnnnnnnnnnnnnnnnnnnnnnnnnnnnnnnnnnnnnnnnnnnnnnnnnnnnnnnnnnnnnnnnnnnnnnnnnnnnnnnnnnnnnnnnnnnnnnnnnnnnnnnnnnnnnnnnnnnnnnnnnnnnnnnnnnnnnnnnnnnnnnnnnnnnnnnnnnnnnnnnnnnnnnnnnnnnnnnnnnnnnnnnnnnnnnnnnnnnnnnnnnnnnnnnnnnnnnnnnnnnnnnnnnnnnnnnnnnnnnnnnnnnnnnnnnnnnnnnnnnnnnnnnnnnnnnnnnnnnnnnnnnnnnnnnnnnnnnnnnnnnnnnnnnnnnnnnnnnnnnnnnnnnnnnnnnnnnnnnnnnnnnnnnnnnnnnnnnnnnnnnnnnnnnnnnnnnnnnnnnnnnnnnnnnnnnnnnnnnnnnnnnnnnnnnnnnnnnnnnnnnnnnnnnnnnnnnnnnnnnnnnnnnnnnnnnnnnnnnnnnnnnnnnnnnnnnnnnnnnnnnnnnnnnnnnnnnnnnnnnnnnnnnnnnnnnnnnnnnnnnnnnnnnnnnnnnnnnnnnnnnnnnnnnnnnnnnnnnnnnnnnnnnnnnnnnnnnnnnnnnnnnnnnnnnnnnnnnnnnnnnnnnnnnnnnnnnnnnnnnnnnnnnnnnnnnnnnnnnnnnnnnnnnnnnnnnnnnnnnnnnnnnnnnnnnnnnnnnnnnnnnnnnnnnnnnnnnnnnnnnnnnnnnnnnnnnnnnnnnnnnnnnnnnnnnnnnnnnnnnnnnnnnnnnnnnnnnnnnnnnnnnnnnnnnnnnnnnnnnnnnnnnnnnnnnnnnnnnnnnnnnnnnnnnnnnnnnnnnnnnnnnnnnnnnnnnnnnnnnnnnnnnnnnnnnnnnnnnnnnnnnnnnnnnnnnnnnnnnnnnnnnnnnnnnnnnnnnnnnnnnnnnnnnnnnnnnnnnnnnnnnnnnnnnnnnnnnnnnnnnnnnnnnnnnnnnnnnnnnnnnnnnnnnnnnnnnnnnnnnnnnnnnnnnnnnnnnnnnnnnnnnnnnnnnnnnnnnnnnnnnnnnnnnnnnnnnnnnnnnnnnnnnnnnnnnnnnnnnnnnnnnnnnnnnnnnnnnnnnnnnnnnnnnnnnnnnnnnnnnnnnnnnnnnnnnnnnnnnnnnnnnnnnnnnnnnnnnnnnnnnnnnnnnnnnnnnnnnnnnnnnnnnnnnnnnnnnnnnnnnnnnnnnnnnnnnnnnnnnnnnnnnnnnnnnnnnnnnnnnnnnnnnnnnnnnnnnnnnnnnnnnnnnnnnnnnnnnnnnnnnnnnnnnnnnnnnnnnnnnnnnnnnnnnnnnnnnnnnnnnnnnnnnnnnnnnnnnnnnnnnnnnnnnnnnnnnnnnnnnnnnnnnnnnnnnnnnnnnnnnnnnnnnnnnnnnnnnnnnnnnnnnnnnnnnnnnnnnnnnnnnnnnnnnnnnnnnnnnnnnnnnnnnnnnnnnnnnnnnnnnnnnnnnnnnnnnnnnnnnnnnnnnnnnnnnnnnnnnnnnnnnnnnnnnnnnnnnnnnnnnnnnnnnnnnnnnnnnnnnnnnnnnnnnnnnnnnnnnnnnnnnnnnnnnnnnnnnnnnnnnnnnnnnnnnnnnnnnnnnnnnnnnnnnnnnnnnnnnnnnnnnnnnnnnnnnnnnnnnnnnnnnnnnnnnnnnnnnnnnnnnnnnnnnnnnnnnnnnnnnnnnnnnnnnnnnnnnnnnnnnnnnnnnnnnnnnnnnnnnnnnnnnnnnnnnnnnnnnnnnnnnnnnnnnnnnnnnnnnnnnnnnnnnnnnnnnnnnnnnnnnnnnnnnnnnnnnnnnnnnnnnnnnnnnnnnnnnnnnnnnnnnnnnnnnnnnnnnnnnnnnnnnnnnnnnnnnnnnnnnnnnnnnnnnnnnnnnnnnnnnnnnnnnnnnnnnnnnnnnnnnnnnnnnnnnnnnnnnnnnnnnnnnnnnnnnnnnnnnnnnnnnnnnnnnnnnnnnnnnnnnnnnnnnnnnnnnnnnnnnnnnnnnnnnnnnnnnnnnnnnnnnnnnnnnnnnnnnnnnnnnnnnnnnnnnnnnnnnnnnnnnnnnnnnnnnnnnnnnnnnnnnnnnnnnnnnnnnnnnnnnnnnnnnnnnnnnnnnnnnnnnnnnnnnnnnnnnnnnnnnnnnnnnnnnnnnnnnnnnnnnnnnnnnnnnnnnnnnnnnnnnnnnnnnnnnnnnnnnnnnnnnnnnnnnnnnnnnnnnnnnnnnnnnnnnnnnnnnnnnnnnnnnnnnnnnnnnnnnnnnnnnnnnnnnnnnnnnnnnnnnnnnnnnnnnnnnnnnnnnnnnnnnnnnnnnnnnnnnnnnnnnnnnnnnnnnnnnnnnnnnnnnnnnnnnnnnnnnnnnnnnnnnnnnnnnnnnnnnnnnnnnnnnnnnnnnnnnnnnnnnnnnnnnnnnnnnnnnnnnnnnnnnnnnnnnnnnnnnnnnnnnnnnnnnnnnnnnnnnnnnnnnnnnnnnnnnnnnnnnnnnnnnnnnnnnnnnnnnnnnnnnnnnnnnnnnnnnnnnnnnnnnnnnnnnnnnnnnnnnnnnnnnnnnnnnnnnnnnnnnnnnnnnnnnnnnnnnnnnnnnnnnnnnnnnnnnnnnnnnnnnnnnnnnnnnnnnnnnnnnnnnnnnnnnnnnnnnnnnnnnnnnnnnnnnnnnnnnnnnnnnnnnnnnnnnnnnnnnnnnnnnnnnnnnnnnnnnnnnnnnnnnnnnnnnnnnnnnnnnnnnnnnnnnnnnnnnnnnnnnnnnnnnnnnnnnnnnnnnnnnnnnnnnnnnnnnnnnnnnnnnnnnnnnnnnnnnnnnnnnnnnnnnnnnnnnnnnnnnnnnnnnnnnnnnnnnnnnnnnnnnnnnnnnnnnnnnnnnnnnnnnnnnnnnnnnnnnnnnnnnnnnnnnnnnnnnnnnnnnnnnnnnnnnnnnnnnnnnnnnnnnnnnnnnnnnnnnnnnnnnnnnnnnnnnnnnnnnnnnnnnnnnnnnnnnnnnnnnnnnnnnnnnnnnnnnnnnnnnnnnnnnnnnnnnnnnnnnnnnnnnnnnnnnnnnnnnnnnnnnnnnnnnnnnnnnnnnnnnnnnnnnnnnnnnnnnnnnnnnnnnnnnnnnnnnnnnnnnnnnnnnnnnnnnnnnnnnnnnnnnnnnnnnnnnnnnnnnnnnnnnnnnnnnnnnnnnnnnnnnnnnnnnnnnnnnnnnnnnnnnnnnnnnnnnnnnnnnnnnnnnnnnnnnnnnnnnnnnnnnnnnnnnnnnnnnnnnnnnnnnnnnnnnnnnnnnnnnnnnnnnnnnnnnnnnnnnnnnnnnnnnnnnnnnnnnnnnnnnnnnnnnnnnnnnnnnnnnnnnnnnnnnnnnnnnnnnnnnnnnnnnnnnnnnnnnnnnnnnnnnnnnnnnnnnnnnnnnnnnnnnnnnnnnnnnnnnnnnnnnnnnnnnnnnnnnnnnnnnnnnnnnnnnnnnnnnnnnnnnnnnnnnnnnnnnnnnnnnnnnnnnnnnnnnnnnnnnnnnnnnnnnnnnnnnnnnnnnnnnnnnnnnnnnnnnnnnnnnnnnnnnnnnnnnnnnnnnnnnnnnnnnnnnnnnnnnnnnnnnnnnnnnnnnnnnnnnnnnnnnnnnnnnnnnnnnnnnnnnnnnnnnnnnnnnnnnnnnnnnnnnnnnnnnnnnnnnnnnnnnnnnnnnnnnnnnnnnnnnnnnnnnnnnnnnnnnnnnnnnnnnnnnnnnnnnnnnnnnnnnnnnnnnnnnnnnnnnnnnnnnnnnnnnnnnnnnnnnnnnnnnnnnnnnnnnnnnnnnnnnnnnnnnnnnnnnnnnnnnnnnnnnnnnnnnnnnnnnnnnnnnnnnnnnnnnnnnnnnnnnnnnnnnnnnnnnnnnnnnnnnnnnnnnnnnnnnnnnnnnnnnnnnnnnnnnnnnnnnnnnnnnnnnnnnnnnnnnnnnnnnnnnnnnnnnnnnnnnnnnnnnnnnnnnnnnnnnnnnnnnnnnnnnnnnnnnnnnnnnnnnnnnnnnnnnnnnnnnnnnnnnnnnnnnnnnnnnnnnnnnnnnnnnnnnnnnnnnnnnnnnnnnnnnnnnnnnnnnnnnnnnnnnnnnnnnnnnnnnnnnnnnnnnnnnnnnnnnnnnnnnnnnnnnnnnnnnnnnnnnnnnnnnnnnnnnnnnnnnnnnnnnnnnnnnnnnnnnnnnnnnnnnnnnnnnnnnnnnnnnnnnnnnnnnnnnnnnnnnnnnnnnnnnnnnnnnnnnnnnnnnnnnnnnnnnnnnnnnnnnnnnnnnnnnnnnnnnnnnnnnnnnnnnnnnnnnnnnnnnnnnnnnnnnnnnnnnnnnnnnnnnnnnnnnnnnnnnnnnnnnnnnnnnnnnnnnnnnnnnnnnnnnnnnnnnnnnnnnnnnnnnnnnnnnnnnnnnnnnnnnnnnnnnnnnnnnnnnnnnnnnnnnnnnnnnnnnnnnnnnnnnnnnnnnnnnnnnnnnnnnnnnnnnnnnnnnnnnnnnnnnnnnnnnnnnnnnnnnnnnnnnnnnnnnnnnnnnnnnnnnnnnnnnnnnnnnnnnnnnnnnnnnnnnnnnnnnnnnnnnnnnnnnnnnnnnnnnnnnnnnnnnnnnnnnnnnnnnnnnnnnnnnnnnnnnnnnnnnnnnnnnnnnnnnnnnnnnnnnnnnnnnnnnnnnnnnnnnnnnnnnnnnnnnnnnnnnnnnnnnnnnnnnnnnnnnnnnnnnnnnnnnnnnnnnnnnnnnnnnnnnnnnnnnnnnnnnnnnnnnnnnnnnnnnnnnnnnnnnnnnnnnnnnnnnnnnnnnnnnnnnnnnnnnnnnnnnnnnnnnnnnnnnnnnnnnnnnnnnnnnnnnnnnnnnnnnnnnnnnnnnnnnnnnnnnnnnnnnnnnnnnnnnnnnnnnnnnnnnnnnnnnnnnnnnnnnnnnnnnnnnnnnnnnnnnnnnnnnnnnnnnnnnnnnnnnnnnnnnnnnnnnnnnnnnnnnnnnnnnnnnnnnnnnnnnnnnnnnnnnnnnnnnnnnnnnnnnnnnnnnnnnnnnnnnnnnnnnnnnnnnnnnnnnnnnnnnnnnnnnnnnnnnnnnnnnnnnnnnnnnnnnnnnnnnnnnnnnnnnnnnnnnnnnnnnnnnnnnnnnnnnnnnnnnnnnnnnnnnnnnnnnnnnnnnnnnnnnnnnnnnnnnnnnnnnnnnnnnnnnnnnnnnnnnnnnnnnnnnnnnnnnnnnnnnnnnnnnnnnnnnnnnnnnnnnnnnnnnnnnnnnnnnnnnnnnnnnnnnnnnnnnnnnnnnnnnnnnnnnnnnnnnnnnnnnnnnnnnnnnnnnnnnnnnnnnnnnnnnnnnnnnnnnnnnnnnnnnnnnnnnnnnnnnnnnnnnnnnnnnnnnnnnnnnnnnnnnnnnnnnnnnnnnnnnnnnnnnnnnnnnnnnnnnnnnnnnnnnnnnnnnnnnnnnnnnnnnnnnnnnnnnnnnnnnnnnnnnnnnnnnnnnnnnnnnnnnnnnnnnnnnnnnnnnnnnnnnnnnnnnnnnnnnnnnnnnnnnnnnnnnnnnnnnnnnnnnnnnnnnnnnnnnnnnnnnnnnnnnnnnnnnnnnnnnnnnnnnnnnnnnnnnnnnnnnnnnnnnnnnnnnnnnnnnnnnnnnnnnnnnnnnnnnnnnnnnnnnnnnnnnnnnnnnnnnnnnnnnnnnnnnnnnnnnnnnnnnnnnnnnnnnnnnnnnnnnnnnnnnnnnnnnnnnnnnnnnnnnnnnnnnnnnnnnnnnnnnnnnnnnnnnnnnnnnnnnnnnnnnnnnnnnnnnnnnnnnnnnnnnnnnnnnnnnnnnnnnnnnnnnnnnnnnnnnnnnnnnnnnnnnnnnnnnnnnnnnnnnnnnnnnnnnnnnnnnnnnnnnnnnnnnnnnnnnnnnnnnnnnnnnnnnnnnnnnnnnnnnnnnnnnnnnnnnnnnnnnnnnnnnnnnnnnnnnnnnnnnnnnnnnnnnnnnnnnnnnnnnnnnnnnnnnnnnnnnnnnnnnnnnnnnnnnnnnnnnnnnnnnnnnnnnnnnnnnnnnnnnnnnnnnnnnnnnnnnnnnnnnnnnnnnnnnnnnnnnnnnnnnnnnnnnnnnnnnnnnnnnnnnnnnnnnnnnnnnnnnnnnnnnnnnnnnnnnnnnnnnnnnnnnnnnnnnnnnnnnnnnnnnnnnnnnnnnnnnnnnnnnnnnnnnnnnnnnnnnnnnnnnnnnnnnnnnnnnnnnnnnnnnnnnnnnnnnnnnnnnnnnnnnnnnnnnnnnnnnnnnnnnnnnnnnnnnnnnnnnnnnnnnnnnnnnnnnnnnnnnnnnnnnnnnnnnnnnnnnnnnnnnnnnnnnnnnnnnnnnnnnnnnnnnnnnnnnnnnnnnnnnnnnnnnnnnnnnnnnnnnnnnnnnnnnnnnnnnnnnnnnnnnnnnnnnnnnnnnnnnnnnnnnnnnnnnnnnnnnnnnnnnnnnnnnnnnnnnnnnnnnnnnnnnnnnnnnnnnnnnnnnnnnnnnnnnnnnnnnnnnnnnnnnnnnnnnnnnnnnnnnnnnnnnnnnnnnnnnnnnnnnnnnnnnnnnnnnnnnnnnnnnnnnnnnnnnnnnnnnnnnnnnnnnnnnnnnnnnnnnnnnnnnnnnnnnnnnnnnnnnnnnnnnnnnnnnnnnnnnnnnnnnnnnnnnnnnnnnnnnnnnnnnnnnnnnnnnnnnnnnnnnnnnnnnnnnnnnnnnnnnnnnnnnnnnnnnnnnnnnnnnnnnnnnnnnnnnnnnnnnnnnnnnnnnnnnnnnnnnnnnnnnnnnnnnnnnnnnnnnnnnnnnnnnnnnnnnnnnnnnnnnnnnnnnnnnnnnnnnnnnnnnnnnnnnnnnnnnnnnnnnnnnnnnnnnnnnnnnnnnnnnnnnnnnnnnnnnnnnnnnnnnnnnnnnnnnnnnnnnnnnnnnnnnnnnnnnnnnnnnnnnnnnnnnnnnnnnnnnnnnnnnnnnnnnnnnnnnnnnnnnnnnnnnnnnnnnnnnnnnnnnnnnnnnnnnnnnnnnnnnnnnnnnnnnnnnnnnnnnnnnnnnnnnnnnnnnnnnnnnnnnnnnnnnnnnnnnnnnnnnnnnnnnnnnnnnnnnnnnnnnnnnnnnnnnnnnnnnnnnnnnnnnnnnnnnnnnnnnnnnnnnnnnnnnnnnnnnnnnnnnnnnnnnnnnnnnnnnnnnnnnnnnnnnnnnnnnnnnnnnnnnnnnnnnnnnnnnnnnnnnnnnnnnnnnnnnnnnnnnnnnnnnnnnnnnnnnnnnnnnnnnnnnnnnnnnnnnnnnnnnnnnnnnnnnnnnnnnnnnnnnnnnnnnnnnnnnnnnnnnnnnnnnnnnnnnnnnnnnnnnnnnnnnnnnnnnnnnnnnnnnnnnnnnnnnnnnnnnnnnnnnnnnnnnnnnnnnnnnnnnnnnnnnnnnnnnnnnnnnnnnnnnnnnnnnnnnnnnnnnnnnnnnnnnnnnnnnnnnnnnnnnnnnnnnnnnnnnnnnnnnnnnnnnnnnnnnnnnnnnnnnnnnnnnnnnnnnnnnnnnnnnnnnnnnnnnnnnnnnnnnnnnnnnnnnnnnnnnnnnnnnnnnnnnnnnnnnnnnnnnnnnnnnnnnnnnnnnnnnnnnnnnnnnnnnnnnnnnnnnnnnnnnnnnnnnnnnnnnnnnnnnnnnnnnnnnnnnnnnnnnnnnnnnnnnnnnnnnnnnnnnnnnnnnnnnnnnnnnnnnnnnnnnnnnnnnnnnnnnnnnnnnnnnnnnnnnnnnnnnnnnnnnnnnnnnnnnnnnnnnnnnnnnnnnnnnnnnnnnnnnnnnnnnnnnnnnnnnnnnnnnnnnnnnnnnnnnnnnnnnnnnnnnnnnnnnnnnnnnnnnnnnnnnnnnnnnnnnnnnnnnnnnnnnnnnnnnnnnnnnnnnnnnnnnnnnnnnnnnnnnnnnnnnnnnnnnnnnnnnnnnnnnnnnnnnnnnnnnnnnnnnnnnnnnnnnnnnnnnnnnnnnnnnnnnnnnnnnnnnnnnnnnnnnnnnnnnnnnnnnnnnnnnnnnnnnnnnnnnnnnnnnnnnnnnnnnnnnnnnnnnnnnnnnnnnnnnnnnnnnnnnnnnnnnnnnnnnnnnnnnnnnnnnnnnnnnnnnnnnnnnnnnnnnnnnnnnnnnnnnnnnnnnnnnnnnnnnnnnnnnnnnnnnnnnnnnnnnnnnnnnnnnnnnnnnnnnnnnnnnnnnnnnnnnnnnnnnnnnnnnnnnnnnnnnnnnnnnnnnnnnnnnnnnnnnnnnnnnnnnnnnnnnnnnnnnnnnnnnnnnnnnnnnnnnnnnnnnnnnnnnnnnnnnnnnnnnnnnnnnnnnnnnnnnnnnnnnnnnnnnnnnnnnnnnnnnnnnnnnnnnnnnnnnnnnnnnnnnnnnnnnnnnnnnnnnnnnnnnnnnnnnnnnnnnnnnnnnnnnnnnnnnnnnnnnnnnnnnnnnnnnnnnnnnnnnnnnnnnnnnnnnnnnnnnnnnnnnnnnnnnnnnnnnnnnnnnnnnnnnnnnnnnnnnnnnnnnnnnnnnnnnnnnnnnnnnnnnnnnnnnnnnnnnnnnnnnnnnnnnnnnnnnnnnnnnnnnnnnnnnnnnnnnnnnnnnnnnnnnnnnnnnnnnnnnnnnnnnnnnnnnnnnnnnnnnnnnnnnnnnnnnnnnnnnnnnnnnnnnnnnnnnnnnnnnnnnnnnnnnnnnnnnnnnnnnnnnnnnnnnnnnnnnnnnnnnnnnnnnnnnnnnnnnnnnnnnnnnnnnnnnnnnnnnnnnnnnnnnnnnnnnnnnnnnnnnnnnnnnnnnnnnnnnnnnnnnnnnnnnnnnnnnnnnnnnnnnnnnnnnnnnnnnnnnnnnnnnnnnnnnnnnnnnnnnnnnnnnnnnnnnnnnnnnnnnnnnnnnnnnnnnnnnnnnnnnnnnnnnnnnnnnnnnnnnnnnnnnnnnnnnnnnnnnnnnnnnnnnnnnnnnnnnnnnnnnnnnnnnnnnnnnnnnnnnnnnnnnnnnnnnnnnnnnnnnnnnnnnnnnnnnnnnnnnnnnnnnnnnnnnnnnnnnnnnnnnnnnnnnnnnnnnnnnnnnnnnnnnnnnnnnnnnnnnnnnnnnnnnnnnnnnnnnnnnnnnnnnnnnnnnnnnnnnnnnnnnnnnnnnnnnnnnnnnnnnnnnnnnnnnnnnnnnnnnnnnnnnnnnnnnnnnnnnnnnnnnnnnnnnnnnnnnnnnnnnnnnnnnnnnnnnnnnnnnnnnnnnnnnnnnnnnnnnnnnnnnnnnnnnnnnnnnnnnnnnnnnnnnnnnnnnnnnnnnnnnnnnnnnnnnnnnnnnnnnnnnnnnnnnnnnnnnnnnnnnnnnnnnnnnnnnnnnnnnnnnnnnnnnnnnnnnnnnnnnnnnnnnnnnnnnnnnnnnnnnnnnnnnnnnnnnnnnnnnnnnnnnnnnnnnnnnnnnnnnnnnnnnnnnnnnnnnnnnnnnnnnnnnnnnnnnnnnnnnnnnnnnnnnnnnnnnnnnnnnnnnnnnnnnnnnnnnnnnnnnnnnnnnnnnnnnnnnnnnnnnnnnnnnnnnnnnnnnnnnnnnnnnnnnnnnnnnnnnnnnnnnnnnnnnnnnnnnnnnnnnnnnnnnnnnnnnnnnnnnnnnnnnnnnnnnnnnnnnnnnnnnnnnnnnnnnnnnnnnnnnnnnnnnnnnnnnnnnnnnnnnnnnnnnnnnnnnnnnnnnnnnnnnnnnnnnnnnnnnnnnnnnnnnnnnnnnnnnnnnnnnnnnnnnnnnnnnnnnnnnnnnnnnnnnnnnnnnnnnnnnnnnnnnnnnnnnnnnnnnnnnnnnnnnnnnnnnnnnnnnnnnnnnnnnnnnnnnnnnnnnnnnnnnnnnnnnnnnnnnnnnnnnnnnnnnnnnnnnnnnnnnnnnnnnnnnnnnnnnnnnnnnnnnnnnnnnnnnnnnnnnnnnnnnnnnnnnnnnnnnnnnnnnnnnnnnnnnnnnnnnnnnnnnnnnnnnnnnnnnnnnnnnnnnnnnnnnnnnnnnnnnnnnnnnnnnnnnnnnnnnnnnnnnnnnnnnnnnnnnnnnnnnnnnnnnnnnnnnnnnnnnnnnnnnnnnnnnnnnnnnnnnnnnnnnnnnnnnnnnnnnnnnnnnnnnnnnnnnnnnnnnnnnnnnnnnnnnnnnnnnnnnnnnnnnnnnnnnnnnnnnnnnnnnnnnnnnnnnnnnnnnnnnnnnnnnnnnnnnnnnnnnnnnnnnnnnnnnnnnnnnnnnnnnnnnnnnnnnnnnnnnnnnnnnnnnnnnnnnnnnnnnnnnnnnnnnnnnnnnnnnnnnnnnnnnnnnnnnnnnnnnnnnnnnnnnnnnnnnnnnnnnnnnnnnnnnnnnnnnnnnnnnnnnnnnnnnnnnnnnnnnnnnnnnnnnnnnnnnnnnnnnnnnnnnnnnnnnnnnnnnnnnnnnnnnnnnnnnnnnnnnnnnnnnnnnnnnnnnnnnnnnnnnnnnnnnnnnnnnnnnnnnnnnnnnnnnnnnnnnnnnnnnnnnnnnnnnnnnnnnnnnnnnnnnnnnnnnnnnnnnnnnnnnnnnnnnnnnnnnnnnnnnnnnnnnnnnnnnnnnnnnnnnnnnnnnnnnnnnnnnnnnnnnnnnnnnnnnnnnnnnnnnnnnnnnnnnnnnnnnnnnnnnnnnnnnnnnnnnnnnnnnnnnnnnnnnnnnnnnnnnnnnnnnnnnnnnnnnnnnnnnnnnnnnnnnnnnnnnnnnnnnnnnnnnnnnnnnnnnnnnnnnnnnnnnnnnnnnnnnnnnnnnnnnnnnnnnnnnnnnnnnnnnnnnnnnnnnnnnnnnnnnnnnnnnnnnnnnnnnnnnnnnnnnnnnnnnnnnnnnnnnnnnnnnnnnnnnnnnnnnnnnnnnnnnnnnnnnnnnnnnnnnnnnnnnnnnnnnnnnnnnnnnnnnnnnnnnnnnnnnnnnnnnnnnnnnnnnnnnnnnnnnnnnnnnnnnnnnnnnnnnnnnnnnnnnnnnnnnnnnnnnnnnnnnnnnnnnnnnnnnnnnnnnnnnnnnnnnnnnnnnnnnnnnnnnnnnnnnnnnnnnnnnnnnnnnnnnnnnnnnnnnnnnnnnnnnnnnnnnnnnnnnnnnnnnnnnnnnnnnnnnnnnnnnnnnnnnnnnnnnnnnnnnnnnnnnnnnnnnnnnnnnnnnnnnnnnnnnnnnnnnnnnnnnnnnnnnnnnnnnnnnnnnnnnnnnnnnnnnnnnnnnnnnnnnnnnnnnnnnnnnnnnnnnnnnnnnnnnnnnnnnnnnnnnnnnnnnnnnnnnnnnnnnnnnnnnnnnnnnnnnnnnnnnnnnnnnnnnnnnnnnnnnnnnnnnnnnnnnnnnnnnnnnnnnnnnnnnnnnnnnnnnnnnnnnnnnnnnnnnnnnnnnnnnnnnnnnnnnnnnnnnnnnnnnnnnnnnnnnnnnnnnnnnnnnnnnnnnnnnnnnnnnnnnnnnnnnnnnnnnnnnnnnnnnnnnnnnnnnnnnnnnnnnnnnnnnnnnnnnnnnnnnnnnnnnnnnnnnnnnnnnnnnnnnnnnnnnnnnnnnnnnnnnnnnnnnnnnnnnnnnnnnnnnnnnnnnnnnnnnnnnnnnnnnnnnnnnnnnnnnnnnnnnnnnnnnnnnnnnnnnnnnnnnnnnnnnnnnnnnnnnnnnnnnnnnnnnnnnnnnnnnnnnnnnnnnnnnnnnnnnnnnnnnnnnnnnnnnnnnnnnnnnnnnnnnnnnnnnnnnnnnnnnnnnnnnnnnnnnnnnnnnnnnnnnnnnnnnnnnnnnnnnnnnnnnnnnnnnnnnnnnnnnnnnnnnnnnnnnnnnnnnnnnnnnnnnnnnnnnnnnnnnnnnnnnnnnnnnnnnnnnnnnnnnnnnnnnnnnnnnnnnnnnnnnnnnnnnnnnnnnnnnnnnnnnnnnnnnnnnnnnnnnnnnnnnnnnnnnnnnnnnnnnnnnnnnnnnnnnnnnnnnnnnnnnnnnnnnnnnnnnnnnnnnnnnnnnnnnnnnnnnnnnnnnnnnnnnnnnnnnnnnnnnnnnnnnnnnnnnnnnnnnnnnnnnnnnnnnnnnnnnnnnnnnnnnnnnnnnnnnnnnnnnnnnnnnnnnnnnnnnnnnnnnnnnnnnnnnnnnnnnnnnnnnnnnnnnnnnnnnnnnnnnnnnnnnnnnnnnnnnnnnnnnnnnnnnnnnnnnnnnnnnnnnnnnnnnnnnnnnnnnnnnnnnnnnnnnnnnnnnnnnnnnnnnnnnnnnnnnnnnnnnnnnnnnnnnnnnnnnnnnnnnnnnnnnnnnnnnnnnnnnnnnnnnnnnnnnnnnnnnnnnnnnnnnnnnnnnnnnnnnnnnnnnnnnnnnnnnnnnnnnnnnnnnnnnnnnnnnnnnnnnnnnnnnnnnnnnnnnnnnnnnnnnnnnnnnnnnnnnnnnnnnnnnnnnnnnnnnnnnnnnnnnnnnnnnnnnnnnnnnnnnnnnnnnnnnnnnnnnnnnnnnnnnnnnnnnnnnnnnnnnnnnnnnnnnnnnnnnnnnnnnnnnnnnnnnnnnnnnnnnnnnnnnnnnnnnnnnnnnnnnnnnnnnnnnnnnnnnnnnnnnnnnnnnnnnnnnnnnnnnnnnnnnnnnnnnnnnnnnnnnnnnnnnnnnnnnnnnnnnnnnnnnnnnnnnnnnnnnnnnnnnnnnnnnnnnnnnnnnnnnnnnnnnnnnnnnnnnnnnnnnnnnnnnnnnnnnnnnnnnnnnnnnnnnnnnnnnnnnnnnnnnnnnnnnnnnnnnnnnnnnnnnnnnnnnnnnnnnnnnnnnnnnnnnnnnnnnnnnnnnnnnnnnnnnnnnnnnnnnnnnnnnnnnnnnnnnnnnnnnnnnnnnnnnnnnnnnnnnnnnnnnnnnnnnnnnnnnnnnnnnnnnnnnnnnnnnnnnnnnnnnnnnnnnnnnnnnnnnnnnnnnnnnnnnnnnnnnnnnnnnnnnnnnnnnnnnnnnnnnnnnnnnnnnnnnnnnnnnnnnnnnnnnnnnnnnnnnnnnnnnnnnnnnnnnnnnnnnnnnnnnnnnnnnnnnnnnnnnnnnnnnnnnnnnnnnnnnnnnnnnnnnnnnnnnnnnnnnnnnnnnnnnnnnnnnnnnnnnnnnnnnnnnnnnnnnnnnnnnnnnnnnnnnnnnnnnnnnnnnnnnnnnnnnnnnnnnnnnnnnnnnnnnnnnnnnnnnnnnnnnnnnnnnnnnnnnnnnnnnnnnnnnnnnnnnnnnnnnnnnnnnnnnnnnnnnnnnnnnnnnnnnnnnnnnnnnnnnnnnnnnnnnnnnnnnnnnnnnnnnnnnnnnnnnnnnnnnnnnnnnnnnnnnnnnnnnnnnnnnnnnnnnnnnnnnnnnnnnnnnnnnnnnnnnnnnnnnnnnnnnnnnnnnnnnnnnnnnnnnnnnnnnnnnnnnnnnnnnnnnnnnnnnnnnnnnnnnnnnnnnnnnnnnnnnnnnnnnnnnnnnnnnnnnnnnnnnnnnnnnnnnnnnnnnnnnnnnnnnnnnnnnnnnnnnnnnnnnnnnnnnnnnnnnnnnnnnnnnnnnnnnnnnnnnnnnnnnnnnnnnnnnnnnnnnnnnnnnnnnnnnnnnnnnnnnnnnnnnnnnnnnnnnnnnnnnnnnnnnnnnnnnnnnnnnnnnnnnnnnnnnnnnnnnnnnnnnnnnnnnnnnnnnnnnnnnnnnnnnnnnnnnnnnnnnnnnnnnnnnnnnnnnnnnnnnnnnnnnnnnnnnnnnnnnnnnnnnnnnnnnnnnnnnnnnnnnnnnnnnnnnnnnnnnnnnnnnnnnnnnnnnnnnnnnnnnnnnnnnnnnnnnnnnnnnnnnnnnnnnnnnnnnnnnnnnnnnnnnnnnnnnnnnnnnnnnnnnnnnnnnnnnnnnnnnnnnnnnnnnnnnnnnnnnnnnnnnnnnnnnnnnnnnnnnnnnnnnnnnnnnnnnnnnnnnnnnnnnnnnnnnnnnnnnnnnnnnnnnnnnnnnnnnnnnnnnnnnnnnnnnnnnnnnnnnnnnnnnnnnnnnnnnnnnnnnnnnnnnnnnnnnnnnnnnnnnnnnnnnnnnnnnnnnnnnnnnnnnnnnnnnnnnnnnnnnnnnnnnnnnnnnnnnnnnnnnnnnnnnnnnnnnnnnnnnnnnnnnnnnnnnnnnnnnnnnnnnnnnnnnnnnnnnnnnnnnnnnnnnnnnnnnnnnnnnnnnnnnnnnnnnnnnnnnnnnnnnnnnnnnnnnnnnnnnnnnnnnnnnnnnnnnnnnnnnnnnnnnnnnnnnnnnnnnnnnnnnnnnnnnnnnnnnnnnnnnnnnnnnnnnnnnnnnnnnnnnnnnnnnnnnnnnnnnnnnnnnnnnnnnnnnnnnnnnnnnnnnnnnnnnnnnnnnnnnnnnnnnnnnnnnnnnnnnnnnnnnnnnnnnnnnnnnnnnnnnnnnnnnnnnnnnnnnnnnnnnnnnnnnnnnnnnnnnnnnnnnnnnnnnnnnnnnnnnnnnnnnnnnnnnnnnnnnnnnnnnnnnnnnnnnnnnnnnnnnnnnnnnnnnnnnnnnnnnnnnnnnnnnnnnnnnnnnnnnnnnnnnnnnnnnnnnnnnnnnnnnnnnnnnnnnnnnnnnnnnnnnnnnnnnnnnnnnnnnnnnnnnnnnnnnnnnnnnnnnnnnnnnnnnnnnnnnnnnnnnnnnnnnnnnnnnnnnnnnnnnnnnnnnnnnnnnnnnnnnnnnnnnnnnnnnnnnnnnnnnnnnnnnnnnnnnnnnnnnnnnnnnnnnnnnnnnnnnnnnnnnnnnnnnnnnnnnnnnnnnnnnnnnnnnnnnnnnnnnnnnnnnnnnnnnnnnnnnnnnnnnnnnnnnnnnnnnnnnnnnnnnnnnnnnnnnnnnnnnnnnnnnnnnnnnnnnnnnnnnnnnnnnnnnnnnnnnnnnnnnnnnnnnnnnnnnnnnnnnnnnnnnnnnnnnnnnnnnnnnnnnnnnnnnnnnnnnnnnnnnnnnnnnnnnnnnnnnnnnnnnnnnnnnnnnnnnnnnnnnnnnnnnnnnnnnnnnnnnnnnnnnnnnnnnnnnnnnnnnnnnnnnnnnnnnnnnnnnnnnnnnnnnnnnnnnnnnnnnnnnnnnnnnnnnnnnnnnnnnnnnnnnnnnnnnnnnnnnnnnnnnnnnnnnnnnnnnnnnnnnnnnnnnnnnnnnnnnnnnnnnnnnnnnnnnnnnnnnnnnnnnnnnnnnnnnnnnnnnnnnnnnnnnnnnnnnnnnnnnnnnnnnnnnnnnnnnnnnnnnnnnnnnnnnnnnnnnnnnnnnnnnnnnnnnnnnnnnnnnnnnnnnnnnnnnnnnnnnnnnnnnnnnnnnnnnnnnnnnnnnnnnnnnnnnnnnnnnnnnnnnnnnnnnnnnnnnnnnnnnnnnnnnnnnnnnnnnnnnnnnnnnnnnnnnnnnnnnnnnnnnnnnnnnnnnnnnnnnnnnnnnnnnnnnnnnnnnnnnnnnnnnnnnnnnnnnnnnnnnnnnnnnnnnnnnnnnnnnnnnnnnnnnnnnnnnnnnnnnnnnnnnnnnnnnnnnnnnnnnnnnnnnnnnnnnnnnnnnnnnnnnnnnnnnnnnnnnnnnnnnnnnnnnnnnnnnnnnnnnnnnnnnnnnnnnnnnnnnnnnnnnnnnnnnnnnnnnnnnnnnnnnnnnnnnnnnnnnnnnnnnnnnnnnnnnnnnnnnnnnnnnnnnnnnnnnnnnnnnnnnnnnnnnnnnnnnnnnnnnnnnnnnnnnnnnnnnnnnnnnnnnnnnnnnnnnnnnnnnnnnnnnnnnnnnnnnnnnnnnnnnnnnnnnnnnnnnnnnnnnnnnnnnnnnnnnnnnnnnnnnnnnnnnnnnnnnnnnnnnnnnnnnnnnnnnnnnnnnnnnnnnnnnnnnnnnnnnnnnnnnnnnnnnnnnnnnnnnnnnnnnnnnnnnnnnnnnnnnnnnnnnnnnnnnnnnnnnnnnnnnnnnnnnnnnnnnnnnnnnnnnnnnnnnnnnnnnnnnnnnnnnnnnnnnnnnnnnnnnnnnnnnnnnnnnnnnnnnnnnnnnnnnnnnnnnnnnnnnnnnnnnnnnnnnnnnnnnnnnnnnnnnnnnnnnnnnnnnnnnnnnnnnnnnnnnnnnnnnnnnnnnnnnnnnnnnnnnnnnnnnnnnnnnnnnnnnnnnnnnnnnnnnnnnnnnnnnnnnnnnnnnnnnnnnnnnnnnnnnnnnnnnnnnnnnnnnnnnnnnnnnnnnnnnnnnnnnnnnnnnnnnnnnnnnnnnnnnnnnnnnnnnnnnnnnnnnnnnnnnnnnnnnnnnnnnnnnnnnnnnnnnnnnnnnnnnnnnnnnnnnnnnnnnnnnnnnnnnnnnnnnnnnnnnnnnnnnnnnnnnnnnnnnnnnnnnnnnnnnnnnnnnnnnnnnnnnnnnnnnnnnnnnnnnnnnnnnnnnnnnnnnnnnnnnnnnnnnnnnnnnnnnnnnnnnnnnnnnnnnnnnnnnnnnnnnnnnnnnnnnnnnnnnnnnnnnnnnnnnnnnnnnnnnnnnnnnnnnnnnnnnnnnnnnnnnnnnnnnnnnnnnnnnnnnnnnnnnnnnnnnnnnnnnnnnnnnnnnnnnnnnnnnnnnnnnnnnnnnnnnnnnnnnnnnnnnnnnnnnnnnnnnnnnnnnnnnnnnnnnnnnnnnnnnnnnnnnnnnnnnnnnnnnnnnnnnnnnnnnnnnnnnnnnnnnnnnnnnnnnnnnnnnnnnnnnnnnnnnnnnnnnnnnnnnnnnnnnnnnnnnnnnnnnnnnnnnnnnnnnnnnnnnnnnnnnnnnnnnnnnnnnnnnnnnnnnnnnnnnnnnnnnnnnnnnnnnnnnnnnnnnnnnnnnnnnnnnnnnnnnnnnnnnnnnnnnnnnnnnnnnnnnnnnnnnnnnnnnnnnnnnnnnnnnnnnnnnnnnnnnnnnnnnnnnnnnnnnnnnnnnnnnnnnnnnnnnnnnnnnnnnnnnnnnnnnnnnnnnnnnnnnnnnnnnnnnnnnnnnnnnnnnnnnnnnnnnnnnnnnnnnnnnnnnnnnnnnnnnnnnnnnnnnnnnnnnnnnnnnnnnnnnnnnnnnnnnnnnnnnnnnnnnnnnnnnnnnnnnnnnnnnnnnnnnnnnnnnnnnnnnnnnnnnnnnnnnnnnnnnnnnnnnnnnnnnnnnnnnnnnnnnnnnnnnnnnnnnnnnnnnnnnnnnnnnnnnnnnnnnnnnnnnnnnnnnnnnnnnnnnnnnnnnnnnnnnnnnnnnnnnnnnnnnnnnnnnnnnnnnnnnnnnnnnnnnnnnnnnnnnnnnnnnnnnnnnnnnnnnnnnnnnnnnnnnnnnnnnnnnnnnnnnnnnnnnnnnnnnnnnnnnnnnnnnnnnnnnnnnnnnnnnnnnnnnnnnnnnnnnnnnnnnnnnnnnnnnnnnnnnnnnnnnnnnnnnnnnnnnnnnnnnnnnnnnnnnnnnnnnnnnnnnnnnnnnnnnnnnnnnnnnnnnnnnnnnnnnnnnnnnnnnnnnnnnnnnnnnnnnnnnnnnnnnnnnnnnnnnnnnnnnnnnnnnnnnnnnnnnnnnnnnnnnnnnnnnnnnnnnnnnnnnnnnnnnnnnnnnnnnnnnnnnnnnnnnnnnnnnnnnnnnnnnnnnnnnnnnnnnnnnnnnnnnnnnnnnnnnnnnnnnnnnnnnnnnnnnnnnnnnnnnnnnnnnnnnnnnnnnnnnnnnnnnnnnnnnnnnnnnnnnnnnnnnnnnnnnnnnnnnnnnnnnnnnnnnnnnnnnnnnnnnnnnnnnnnnnnnnnnnnnnnnnnnnnnnnnnnnnnnnnnnnnnnnnnnnnnnnnnnnnnnnnnnnnnnnnnnnnnnnnnnnnnnnnnnnnnnnnnnnnnnnnnnnnnnnnnnnnnnnnnnnnnnnnnnnnnnnnnnnnnnnnnnnnnnnnnnnnnnnnnnnnnnnnnnnnnnnnnnnnnnnnnnnnnnnnnnnnnnnnnnnnnnnnnnnnnnnnnnnnnnnnnnnnnnnnnnnnnnnnnnnnnnnnnnnnnnnnnnnnnnnnnnnnnnnnnnnnnnnnnnnnnnnnnnnnnnnnnnnnnnnnnnnnnnnnnnnnnnnnnnnnnnnnnnnnnnnnnnnnnnnnnnnnnnnnnnnnnnnnnnnnnnnnnnnnnnnnnnnnnnnnnnnnnnnnnnnnnnnnnnnnnnnnnnnnnnnnnnnnnnnnnnnnnnnnnnnnnnnnnnnnnnnnnnnnnnnnnnnnnnnnnnnnnnnnnnnnnnnnnnnnnnnnnnnnnnnnnnnnnnnnnnnnnnnnnnnnnnnnnnnnnnnnnnnnnnnnnnnnnnnnnnnnnnnnnnnnnnnnnnnnnnnnnnnnnnnnnnnnnnnnnnnnnnnnnnnnnnnnnnnnnnnnnnnnnnnnnnnnnnnnnnnnnnnnnnnnnnnnnnnnnnnnnnnnnnnnnnnnnnnnnnnnnnnnnnnnnnnnnnnnnnnnnnnnnnnnnnnnnnnnnnnnnnnnnnnnnnnnnnnnnnnnnnnnnnnnnnnnnnnnnnnnnnnnnnnnnnnnnnnnnnnnnnnnnnnnnnnnnnnnnnnnnnnnnnnnnnnnnnnnnnnnnnnnnnnnnnnnnnnnnnnnnnnnnnnnnnnnnnnnnnnnnnnnnnnnnnnnnnnnnnnnnnnnnnnnnnnnnnnnnnnnnnnnnnnnnnnnnnnnnnnnnnnnnnnnnnnnnnnnnnnnnnnnnnnnnnnnnnnnnnnnnnnnnnnnnnnnnnnnnnnnnnnnnnnnnnnnnnnnnnnnnnnnnnnnnnnnnnnnnnnnnnnnnnnnnnnnnnnnnnnnnnnnnnnnnnnnnnnnnnnnnnnnnnnnnnnnnnnnnnnnnnnnnnnnnnnnnnnnnnnnnnnnnnnnnnnnnnnnnnnnnnnnnnnnnnnnnnnnnnnnnnnnnnnnnnnnnnnnnnnnnnnnnnnnnnnnnnnnnnnnnnnnnnnnnnnnnnnnnnnnnnnnnnnnnnnnnnnnnnnnnnnnnnnnnnnnnnnnnnnnnnnnnnnnnnnnnnnnnnnnnnnnnnnnnnnnnnnnnnnnnnnnnnnnnnnnnnnnnnnnnnnnnnnnnnnnnnnnnnnnnnnnnnnnnnnnnnnnnnnnnnnnnnnnnnnnnnnnnnnnnnnnnnnnnnnnnnnnnnnnnnnnnnnnnnnnnnnnnnnnnnnnnnnnnnnnnnnnnnnnnnnnnnnnnnnnnnnnnnnnnnnnnnnnnnnnnnnnnnnnnnnnnnnnnnnnnnnnnnnnnnnnnnnnnnnnnnnnnnnnnnnnnnnnnnnnnnnnnnnnnnnnnnnnnnnnnnnnnnnnnnnnnnnnnnnnnnnnnnnnnnnnnnnnnnnnnnnnnnnnnnnnnnnnnnnnnnnnnnnnnnnnnnnnnnnnnnnnnnnnnnnnnnnnnnnnnnnnnnnnnnnnnnnnnnnnnnnnnnnnnnnnnnnnnnnnnnnnnnnnnnnnnnnnnnnnnnnnnnnnnnnnnnnnnnnnnnnnnnnnnnnnnnnnnnnnnnnnnnnnnnnnnnnnnnnnnnnnnnnnnnnnnnnnnnnnnnnnnnnnnnnnnnnnnnnnnnnnnnnnnnnnnnnnnnnnnnnnnnnnnnnnnnnnnnnnnnnnnnnnnnnnnnnnnnnnnnnnnnnnnnnnnnnnnnnnnnnnnnnnnnnnnnnnnnnnnnnnnnnnnnnnnnnnnnnnnnnnnnnnnnnnnnnnnnnnnnnnnnnnnnnnnnnnnnnnnnnnnnnnnnnnnnnnnnnnnnnnnnnnnnnnnnnnnnnnnnnnnnnnnnnnnnnnnnnnnnnnnnnnnnnnnnnnnnnnnnnnnnnnnnnnnnnnnnnnnnnnnnnnnnnnnnnnnnnnnnnnnnnnnnnnnnnnnnnnnnnnnnnnnnnnnnnnnnnnnnnnnnnnnnnnnnnnnnnnnnnnnnnnnnnnnnnnnnnnnnnnnnnnnnnnnnnnnnnnnnnnnnnnnnnnnnnnnnnnnnnnnnnnnnnnnnnnnnnnnnnnnnnnnnnnnnnnnnnnnnnnnnnnnnnnnnnnnnnnnnnnnnnnnnnnnnnnnnnnnnnnnnnnnnnnnnnnnnnnnnnnnnnnnnnnnnnnnnnnnnnnnnnnnnnnnnnnnnnnnnnnnnnnnnnnnnnnnnnnnnnnnnnnnnnnnnnnnnnnnnnnnnnnnnnnnnnnnnnnnnnnnnnnnnnnnnnnnnnnnnnnnnnnnnnnnnnnnnnnnnnnnnnnnnnnnnnnnnnnnnnnnnnnnnnnnnnnnnnnnnnnnnnnnnnnnnnnnnnnnnnnnnnnnnnnnnnnnnnnnnnnnnnnnnnnnnnnnnnnnnnnnnnnnnnnnnnnnnnnnnnnnnnnnnnnnnnnnnnnnnnnnnnnnnnnnnnnnnnnnnnnnnnnnnnnnnnnnnnnnnnnnnnnnnnnnnnnnnnnnnnnnnnnnnnnnnnnnnnnnnnnnnnnnnnnnnnnnnnnnnnnnnnnnnnnnnnnnnnnnnnnnnnnnnnnnnnnnnnnnnnnnnnnnnnnnnnnnnnnnnnnnnnnnnnnnnnnnnnnnnnnnnnnnnnnnnnnnnnnnnnnnnnnnnnnnnnnnnnnnnnnnnnnnnnnnnnnnnnnnnnnnnnnnnnnnnnnnnnnnnnnnnnnnnnnnnnnnnnnnnnnnnnnnnnnnnnnnnnnnnnnnnnnnnnnnnnnnnnnnnnnnnnnnnnnnnnnnnnnnnnnnnnnnnnnnnnnnnnnnnnnnnnnnnnnnnnnnnnnnnnnnnnnnnnnnnnnnnnnnnnnnnnnnnnnnnnnnnnnnnnnnnnnnnnnnnnnnnnnnnnnnnnnnnnnnnnnnnnnnnnnnnnnnnnnnnnnnnnnnnnnnnnnnnnnnnnnnnnnnnnnnnnnnnnnnnnnnnnnnnnnnnnnnnnnnnnnnnnnnnnnnnnnnnnnnnnnnnnnnnnnnnnnnnnnnnnnnnnnnnnnnnnnnnnnnnnnnnnnnnnnnnnnnnnnnnnnnnnnnnnnnnnnnnnnnnnnnnnnnnnnnnnnnnnnnnnnnnnnnnnnnnnnnnnnnnnnnnnnnnnnnnnnnnnnnnnnnnnnnnnnnnnnnnnnnnnnnnnnnnnnnnnnnnnnnnnnnnnnnnnnnnnnnnnnnnnnnnnnnnnnnnnnnnnnnnnnnnnnnnnnnnnnnnnnnnnnnnnnnnnnnnnnnnnnnnnnnnnnnnnnnnnnnnnnnnnnnnnnnnnnnnnnnnnnnnnnnnnnnnnnnnnnnnnnnnnnnnnnnnnnnnnnnnnnnnnnnnnnnnnnnnnnnnnnnnnnnnnnnnnnnnnnnnnnnnnnnnnnnnnnnnnnnnnnnnnnnnnnnnnnnnnnnnnnnnnnnnnnnnnnnnnnnnnnnnnnnnnnnnnnnnnnnnnnnnnnnnnnnnnnnnnnnnnnnnnnnnnnnnnnnnnnnnnnnnnnnnnnnnnnnnnnnnnnnnnnnnnnnnnnnnnnnnnnnnnnnnnnnnnnnnnnnnnnnnnnnnnnnnnnnnnnnnnnnnnnnnnnnnnnnnnnnnnnnnnnnnnnnnnnnnnnnnnnnnnnnnnnnnnnnnnnnnnnnnnnnnnnnnnnnnnnnnnnnnnnnnnnnnnnnnnnnnnnnnnnnnnnnnnnnnnnnnnnnnnnnnnnnnnnnnnnnnnnnnnnnnnnnnnnnnnnnnnnnnnnnnnnnnnnnnnnnnnnnnnnnnnnnnnnnnnnnnnnnnnnnnnnnnnnnnnnnnnnnnnnnnnnnnnnnnnnnnnnnnnnnnnnnnnnnnnnnnnnnnnnnnnnnnnnnnnnnnnnnnnnnnnnnnnnnnnnnnnnnnnnnnnnnnnnnnnnnnnnnnnnnnnnnnnnnnnnnnnnnnnnnnnnnnnnnnnnnnnnnnnnnnnnnnnnnnnnnnnnnnnnnnnnnnnnnnnnnnnnnnnnnnnnnnnnnnnnnnnnnnnnnnnnnnnnnnnnnnnnnnnnnnnnnnnnnnnnnnnnnnnnnnnnnnnnnnnnnnnnnnnnnnnnnnnnnnnnnnnnnnnnnnnnnnnnnnnnnnnnnnnnnnnnnnnnnnnnnnnnnnnnnnnnnnnnnnnnnnnnnnnnnnnnnnnnnnnnnnnnnnnnnnnnnnnnnnnnnnnnnnnnnnnnnnnnnnnnnnnnnnnnnnnnnnnnnnnnnnnnnnnnnnnnnnnnnnnnnnnnnnnnnnnnnnnnnnnnnnnnnnnnnnnnnnnnnnnnnnnnnnnnnnnnnnnnnnnnnnnnnnnnnnnnnnnnnnnnnnnnnnnnnnnnnnnnnnnnnnnnnnnnnnnnnnnnnnnnnnnnnnnnnnnnnnnnnnnnnnnnnnnnnnnnnnnnnnnnnnnnnnnnnnnnnnnnnnnnnnnnnnnnnnnnnnnnnnnnnnnnnnnnnnnnnnnnnnnnnnnnnnnnnnnnnnnnnnnnnnnnnnnnnnnnnnnnnnnnnnnnnnnnnnnnnnnnnnnnnnnnnnnnnnnnnnnnnnnnnnnnnnnnnnnnnnnnnnnnnnnnnnnnnnnnnnnnnnnnnnnnnnnnnnnnnnnnnnnnnnnnnnnnnnnnnnnnnnnnnnnnnnnnnnnnnnnnnnnnnnnnnnnnnnnnnnnnnnnnnnnnnnnnnnnnnnnnnnnnnnnnnnnnnnnnnnnnnnnnnnnnnnnnnnnnnnnnnnnnnnnnnnnnnnnnnnnnnnnnnnnnnnnnnnnnnnnnnnnnnnnnnnnnnnnnnnnnnnnnnnnnnnnnnnnnnnnnnnnnnnnnnnnnnnnnnnnnnnnnnnnnnnnnnnnnnnnnnnnnnnnnnnnnnnnnnnnnnnnnnnnnnnnnnnnnnnnnnnnnnnnnnnnnnnnnnnnnnnnnnnnnnnnnnnnnnnnnnnnnnnnnnnnnnnnnnnnnnnnnnnnnnnnnnnnnnnnnnnnnnnnnnnnnnnnnnnnnnnnnnnnnnnnnnnnnnnnnnnnnnnnnnnnnnnnnnnnnnnnnnnnnnnnnnnnnnnnnnnnnnnnnnnnnnnnnnnnnnnnnnnnnnnnnnnnnnnnnnnnnnnnnnnnnnnnnnnnnnnnnnnnnnnnnnnnnnnnnnnnnnnnnnnnnnnnnnnnnnnnnnnnnnnnnnnnnnnnnnnnnnnnnnnnnnnnnnnnnnnnnnnnnnnnnnnnnnnnnnnnnnnnnnnnnnnnnnnnnnnnnnnnnnnnnnnnnnnnnnnnnnnnnnnnnnnnnnnnnnnnnnnnnnnnnnnnnnnnnnnnnnnnnnnnnnnnnnnnnnnnnnnnnnnnnnnnnnnnnnnnnnnnnnnnnnnnnnnnnnnnnnnnnnnnnnnnnnnnnnnnnnnnnnnnnnnnnnnnnnnnnnnnnnnnnnnnnnnnnnnnnnnnnnnnnnnnnnnnnnnnnnnnnnnnnnnnnnnnnnnnnnnnnnnnnnnnnnnnnnnnnnnnnnnnnnnnnnnnnnnnnnnnnnnnnnnnnnnnnnnnnnnnnnnnnnnnnnnnnnnnnnnnnnnnnnnnnnnnnnnnnnnnnnnnnnnnnnnnnnnnnnnnnnnnnnnnnnnnnnnnnnnnnnnnnnnnnnnnnnnnnnnnnnnnnnnnnnnnnnnnnnnnnnnnnnnnnnnnnnnnnnnnnnnnnnnnnnnnnnnnnnnnnnnnnnnnnnnnnnnnnnnnnnnnnnnnnnnnnnnnnnnnnnnnnnnnnnnnnnnnnnnnnnnnnnnnnnnnnnnnnnnnnnnnnnnnnnnnnnnnnnnnnnnnnnnnnnnnnnnnnnnnnnnnnnnnnnnnnnnnnnnnnnnnnnnnnnnnnnnnnnnnnnnnnnnnnnnnnnnnnnnnnnnnnnnnnnnnnnnnnnnnnnnnnnnnnnnnnnnnnnnnnnnnnnnnnnnnnnnnnnnnnnnnnnnnnnnnnnnnnnnnnnnnnnnnnnnnnnnnnnnnnnnnnnnnnnnnnnnnnnnnnnnnnnnnnnnnnnnnnnnnnnnnnnnnnnnnnnnnnnnnnnnnnnnnnnnnnnnnnnnnnnnnnnnnnnnnnnnnnnnnnnnnnnnnnnnnnnnnnnnnnnnnnnnnnnnnnnnnnnnnnnnnnnnnnnnnnnnnnnnnnnnnnnnnnnnnnnnnnnnnnnnnnnnnnnnnnnnnnnnnnnnnnnnnnnnnnnnnnnnnnnnnnnnnnnnnnnnnnnnnnnnnnnnnnnnnnnnnnnnnnnnnnnnnnnnnnnnnnnnnnnnnnnnnnnnnnnnnnnnnnnnnnnnnnnnnnnnnnnnnnnnnnnnnnnnnnnnnnnnnnnnnnnnnnnnnnnnnnnnnnnnnnnnnnnnnnnnnnnnnnnnnnnnnnnnnnnnnnnnnnnnnnnnnnnnnnnnnnnnnnnnnnnnnnnnnnnnnnnnnnnnnnnnnnnnnnnnnnnnnnnnnnnnnnnnnnnnnnnnnnnnnnnnnnnnnnnnnnnnnnnnnnnnnnnnnnnnnnnnnnnnnnnnnnnnnnnnnnnnnnnnnnnnnnnnnnnnnnnnnnnnnnnnnnnnnnnnnnnnnnnnnnnnnnnnnnnnnnnnnnnnnnnnnnnnnnnnnnnnnnnnnnnnnnnnnnnnnnnnnnnnnnnnnnnnnnnnnnnnnnnnnnnnnnnnnnnnnnnnnnnnnnnnnnnnnnnnnnnnnnnnnnnnnnnnnnnnnnnnnnnnnnnnnnnnnnnnnnnnnnnnnnnnnnnnnnnnnnnnnnnnnnnnnnnnnnnnnnnnnnnnnnnnnnnnnnnnnnnnnnnnnnnnnnnnnnnnnnnnnnnnnnnnnnnnnnnnnnnnnnnnnnnnnnnnnnnnnnnnnnnnnnnnnnnnnnnnnnnnnnnnnnnnnnnnnnnnnnnnnnnnnnnnnnnnnnnnnnnnnnnnnnnnnnnnnnnnnnnnnnnnnnnnnnnnnnnnnnnnnnnnnnnnnnnnnnnnnnnnnnnnnnnnnnnnnnnnnnnnnnnnnnnnnnnnnnnnnnnnnnnnnnnnnnnnnnnnnnnnnnnnnnnnnnnnnnnnnnnnnnnnnnnnnnnnnnnnnnnnnnnnnnnnnnnnnnnnnnnnnnnnnnnnnnnnnnnnnnnnnnnnnnnnnnnnnnnnnnnnnnnnnnnnnnnnnnnnnnnnnnnnnnnnnnnnnnnnnnnnnnnnnnnnnnnnnnnnnnnnnnnnnnnnnnnnnnnnnnnnnnnnnnnnnnnnnnnnnnnnnnnnnnnnnnnnnnnnnnnnnnnnnnnnnnnnnnnnnnnnnnnnnnnnnnnnnnnnnnnnnnnnnnnnnnnnnnnnnnnnnnnnnnnnnnnnnnnnnnnnnnnnnnnnnnnnnnnnnnnnnnnnnnnnnnnnnnnnnnnnnnnnnnnnnnnnnnnnnnnnnnnnnnnnnnnnnnnnnnnnnnnnnnnnnnnnnnnnnnnnnnnnnnnnnnnnnnnnnnnnnnnnnnnnnnnnnnnnnnnnnnnnnnnnnnnnnnnnnnnnnnnnnnnnnnnnnnnnnnnnnnnnnnnnnnnnnnnnnnnnnnnnnnnnnnnnnnnnnnnnnnnnnnnnnnnnnnnnnnnnnnnnnnnnnnnnnnnnnnnnnnnnnnnnnnnnnnnnnnnnnnnnnnnnnnnnnnnnnnnnnnnnnnnnnnnnnnnnnnnnnnnnnnnnnnnnnnnnnnnnnnnnnnnnnnnnnnnnnnnnnnnnnnnnnnnnnnnnnnnnnnnnnnnnnnnnnnnnnnnnnnnnnnnnnnnnnnnnnnnnnnnnnnnnnnnnnnnnnnnnnnnnnnnnnnnnnnnnnnnnnnnnnnnnnnnnnnnnnnnnnnnnnnnnnnnnnnnnnnnnnnnnnnnnnnnnnnnnnnnnnnnnnnnnnnnnnnnnnnnnnnnnnnnnnnnnnnnnnnnnnnnnnnnnnnnnnnnnnnnnnnnnnnnnnnnnnnnnnnnnnnnnnnnnnnnnnnnnnnnnnnnnnnnnnnnnnnnnnnnnnnnnnnnnnnnnnnnnnnnnnnnnnnnnnnnnnnnnnnnnnnnnnnnnnnnnnnnnnnnnnnnnnnnnnnnnnnnnnnnnnnnnnnnnnnnnnnnnnnnnnnnnnnnnnnnnnnnnnnnnnnnnnnnnnnnnnnnnnnnnnnnnnnnnnnnnnnnnnnnnnnnnnnnnnnnnnnnnnnnnnnnnnnnnnnnnnnnnnnnnnnnnnnnnnnnnnnnnnnnnnnnnnnnnnnnnnnnnnnnnnnnnnnnnnnnnnnnnnnnnnnnnnnnnnnnnnnnnnnnnnnnnnnnnnnnnnnnnnnnnnnnnnnnnnnnnnnnnnnnnnnnnnnnnnnnnnnnnnnnnnnnnnnnnnnnnnnnnnnnnnnnnnnnnnnnnnnnnnnnnnnnnnnnnnnnnnnnnnnnnnnnnnnnnnnnnnnnnnnnnnnnnnnnnnnnnnnnnnnnnnnnnnnnnnnnnnnnnnnnnnnnnnnnnnnnnnnnnnnnnnnnnnnnnnnnnnnnnnnnnnnnnnnnnnnnnnnnnnnnnnnnnnnnnnnnnnnnnnnnnnnnnnnnnnnnnnnnnnnnnnnnnnnnnnnnnnnnnnnnnnnnnnnnnnnnnnnnnnnnnnnnnnnnnnnnnnnnnnnnnnnnnnnnnnnnnnnnnnnnnnnnnnnnnnnnnnnnnnnnnnnnnnnnnnnnnnnnnnnnnnnnnnnnnnnnnnnnnnnnnnnnnnnnnnnnnnnnnnnnnnnnnnnnnnnnnnnnnnnnnnnnnnnnnnnnnnnnnnnnnnnnnnnnnnnnnnnnnnnnnnnnnnnnnnnnnnnnnnnnnnnnnnnnnnnnnnnnnnnnnnnnnnnnnnnnnnnnnnnnnnnnnnnnnnnnnnnnnnnnnnnnnnnnnnnnnnnnnnnnnnnnnnnnnnnnnnnnnnnnnnnnnnnnnnnnnnnnnnnnnnnnnnnnnnnnnnnnnnnnnnnnnnnnnnnnnnnnnnnnnnnnnnnnnnnnnnnnnnnnnnnnnnnnnnnnnnnnnnnnnnnnnnnnnnnnnnnnnnnnnnnnnnnnnnnnnnnnnnnnnnnnnnnnnnnnnnnnnnnnnnnnnnnnnnnnnnnnnnnnnnnnnnnnnnnnnnnnnnnnnnnnnnnnnnnnnnnnnnnnnnnnnnnnnnnnnnnnnnnnnnnnnnnnnnnnnnnnnnnnnnnnnnnnnnnnnnnnnnnnnnnnnnnnnnnnnnnnnnnnnnnnnnnnnnnnnnnnnnnnnnnnnnnnnnnnnnnnnnnnnnnnnnnnnnnnnnnnnnnnnnnnnnnnnnnnnnnnnnnnnnnnnnnnnnnnnnnnnnnnnnnnnnnnnnnnnnnnnnnnnnnnnnnnnnnnnnnnnnnnnnnnnnnnnnnnnnnnnnnnnnnnnnnnnnnnnnnnnnnnnnnnnnnnnnnnnnnnnnnnnnnnnnnnnnnnnnnnnnnnnnnnnnnnnnnnnnnnnnnnnnnnnnnnnnnnnnnnnnnnnnnnnnnnnnnnnnnnnnnnnnnnnnnnnnnnnnnnnnnnnnnnnnnnnnnnnnnnnnnnnnnnnnnnnnnnnnnnnnnnnnnnnnnnnnnnnnnnnnnnnnnnnnnnnnnnnnnnnnnnnnnnnnnnnnnnnnnnnnnnnnnnnnnnnnnnnnnnnnnnnnnnnnnnnnnnnnnnnnnnnnnnnnnnnnnnnnnnnnnnnnnnnnnnnnnnnnnnnnnnnnnnnnnnnnnnnnnnnnnnnnnnnnnnnnnnnnnnnnnnnnnnnnnnnnnnnnnnnnnnnnnnnnnnnnnnnnnnnnnnnnnnnnnnnnnnnnnnnnnnnnnnnnnnnnnnnnnnnnnnnnnnnnnnnnnnnnnnnnnnnnnnnnnnnnnnnnnnnnnnnnnnnnnnnnnnnnnnnnnnnnnnnnnnnnnnnnnnnnnnnnnnnnnnnnnnnnnnnnnnnnnnnnnnnnnnnnnnnnnnnnnnnnnnnnnnnnnnnnnnnnnnnnnnnnnnnnnnnnnnnnnnnnnnnnnnnnnnnnnnnnnnnnnnnnnnnnnnnnnnnnnnnnnnnnnnnnnnnnnnnnnnnnnnnnnnnnnnnnnnnnnnnnnnnnnnnnnnnnnnnnnnnnnnnnnnnnnnnnnnnnnnnnnnnnnnnnnnnnnnnnnnnnnnnnnnnnnnnnnnnnnnnnnnnnnnnnnnnnnnnnnnnnnnnnnnnnnnnnnnnnnnnnnnnnnnnnnnnnnnnnnnnnnnnnnnnnnnnnnnnnnnnnnnnnnnnnnnnnnnnnnnnnnnnnnnnnnnnnnnnnnnnnnnnnnnnnnnnnnnnnnnnnnnnnnnnnnnnnnnnnnnnnnnnnnnnnnnnnnnnnnnnnnnnnnnnnnnnnnnnnnnnnnnnnnnnnnnnnnnnnnnnnnnnnnnnnnnnnnnnnnnnnnnnnnnnnnnnnnnnnnnnnnnnnnnnnnnnnnnnnnnnnnnnnnnnnnnnnnnnnnnnnnnnnnnnnnnnnnnnnnnnnnnnnnnnnnnnnnnnnnnnnnnnnnnnnnnnnnnnnnnnnnnnnnnnnnnnnnnnnnnnnnnnnnnnnnnnnnnnnnnnnnnnnnnnnnnnnnnnnnnnnnnnnnnnnnnnnnnnnnnnnnnnnnnnnnnnnnnnnnnnnnnnnnnnnnnnnnnnnnnnnnnnnnnnnnnnnnnnnnnnnnnnnnnnnnnnnnnnnnnnnnnnnnnnnnnnnnnnnnnnnnnnnnnnnnnnnnnnnnnnnnnnnnnnnnnnnnnnnnnnnnnnnnnnnnnnnnnnnnnnnnnnnnnnnnnnnnnnnnnnnnnnnnnnnnnnnnnnnnnnnnnnnnnnnnnnnnnnnnnnnnnnnnnnnnnnnnnnnnnnnnnnnnnnnnnnnnnnnnnnnnnnnnnnnnnnnnnnnnnnnnnnnnnnnnnnnnnnnnnnnnnnnnnnnnnnnnnnnnnnnnnnnnnnnnnnnnnnnnnnnnnnnnnnnnnnnnnnnnnnnnnnnnnnnnnnnnnnnnnnnnnnnnnnnnnnnnnnnnnnnnnnnnnnnnnnnnnnnnnnnnnnnnnnnnnnnnnnnnnnnnnnnnnnnnnnnnnnnnnnnnnnnnnnnnnnnnnnnnnnnnnnnnnnnnnnnnnnnnnnnnnnnnnnnnnnnnnnnnnnnnnnnnnnnnnnnnnnnnnnnnnnnnnnnnnnnnnnnnnnnnnnnnnnnnnnnnnnnnnnnnnnnnnnnnnnnnnnnnnnnnnnnnnnnnnnnnnnnnnnnnnnnnnnnnnnnnnnnnnnnnnnnnnnnnnnnnnnnnnnnnnnnnnnnnnnnnnnnnnnnnnnnnnnnnnnnnnnnnnnnnnnnnnnnnnnnnnnnnnnnnnnnnnnnnnnnnnnnnnnnnnnnnnnnnnnnnnnnnnnnnnnnnnnnnnnnnnnnnnnnnnnnnnnnnnnnnnnnnnnnnnnnnnnnnnnnnnnnnnnnnnnnnnnnnnnnnnnnnnnnnnnnnnnnnnnnnnnnnnnnnnnnnnnnnnnnnnnnnnnnnnnnnnnnnnnnnnnnnnnnnnnnnnnnnnnnnnnnnnnnnnnnnnnnnnnnnnnnnnnnnnnnnnnnnnnnnnnnnnnnnnnnnnnnnnnnnnnnnnnnnnnnnnnnnnnnnnnnnnnnnnnnnnnnnnnnnnnnnnnnnnnnnnnnnnnnnnnnnnnnnnnnnnnnnnnnnnnnnnnnnnnnnnnnnnnnnnnnnnnnnnnnnnnnnnnnnnnnnnnnnnnnnnnnnnnnnnnnnnnnnnnnnnnnnnnnnnnnnnnnnnnnnnnnnnnnnnnnnnnnnnnnnnnnnnnnnnnnnnnnnnnnnnnnnnnnnnnnnnnnnnnnnnnnnnnnnnnnnnnnnnnnnnnnnnnnnnnnnnnnnnnnnnnnnnnnnnnnnnnnnnnnnnnnnnnnnnnnnnnnnnnnnnnnnnnnnnnnnnnnnnnnnnnnnnnnnnnnnnnnnnnnnnnnnnnnnnnnnnnnnnnnnnnnnnnnnnnnnnnnnnnnnnnnnnnnnnnnnnnnnnnnnnnnnnnnnnnnnnnnnnnnnnnnnnnnnnnnnnnnnnnnnnnnnnnnnnnnnnnnnnnnnnnnnnnnnnnnnnnnnnnnnnnnnnnnnnnnnnnnnnnnnnnnnnnnnnnnnnnnnnnnnnnnnnnnnnnnnnnnnnnnnnnnnnnnnnnnnnnnnnnnnnnnnnnnnnnnnnnnnnnnnnnnnnnnnnnnnnnnnnnnnnnnnnnnnnnnnnnnnnnnnnnnnnnnnnnnnnnnnnnnnnnnnnnnnnnnnnnnnnnnnnnnnnnnnnnnnnnnnnnnnnnnnnnnnnnnnnnnnnnnnnnnnnnnnnnnnnnnnnnnnnnnnnnnnnnnnnnnnnnnnnnnnnnnnnnnnnnnnnnnnnnnnnnnnnnnnnnnnnnnnnnnnnnnnnnnnnnnnnnnnnnnnnnnnnnnnnnnnnnnnnnnnnnnnnnnnnnnnnnnnnnnnnnnnnnnnnnnnnnnnnnnnnnnnnnnnnnnnnnnnnnnnnnnnnnnnnnnnnnnnnnnnnnnnnnnnnnnnnnnnnnnnnnnnnnnnnnnnnnnnnnnnnnnnnnnnnnnnnnnnnnnnnnnnnnnnnnnnnnnnnnnnnnnnnnnnnnnnnnnnnnnnnnnnnnnnnnnnnnnnnnnnnnnnnnnnnnnnnnnnnnnnnnnnnnnnnnnnnnnnnnnnnnnnnnnnnnnnnnnnnnnnnnnnnnnnnnnnnnnnnnnnnnnnnnnnnnnnnnnnnnnnnnnnnnnnnnnnnnnnnnnnnnnnnnnnnnnnnnnnnnnnnnnnnnnnnnnnnnnnnnnnnnnnnnnnnnnnnnnnnnnnnnnnnnnnnnnnnnnnnnnnnnnnnnnnnnnnnnnnnnnnnnnnnnnnnnnnnnnnnnnnnnnnnnnnnnnnnnnnnnnnnnnnnnnnnnnnnnnnnnnnnnnnnnnnnnnnnnnnnnnnnnnnnnnnnnnnnnnnnnnnnnnnnnnnnnnnnnnnnnnnnnnnnnnnnnnnnnnnnnnnnnnnnnnnnnnnnnnnnnnnnnnnnnnnnnnnnnnnnnnnnnnnnnnnnnnnnnnnnnnnnnnnnnnnnnnnnnnnnnnnnnnnnnnnnnnnnnnnnnnnnnnnnnnnnnnnnnnnnnnnnnnnnnnnnnnnnnnnnnnnnnnnnnnnnnnnnnnnnnnnnnnnnnnnnnnnnnnnnnnnnnnnnnnnnnnnnnnnnnnnnnnnnnnnnnnnnnnnnnnnnnnnnnnnnnnnnnnnnnnnnnnnnnnnnnnnnnnnnnnnnnnnnnnnnnnnnnnnnnnnnnnnnnnnnnnnnnnnnnnnnnnnnnnnnnnnnnnnnnnnnnnnnnnnnnnnnnnnnnnnnnnnnnnnnnnnnnnnnnnnnnnnnnnnnnnnnnnnnnnnnnnnnnnnnnnnnnnnnnnnnnnnnnnnnnnnnnnnnnnnnnnnnnnnnnnnnnnnnnnnnnnnnnnnnnnnnnnnnnnnnnnnnnnnnnnnnnnnnnnnnnnnnnnnnnnnnnnnnnnnnnnnnnnnnnnnnnnnnnnnnnnnnnnnnnnnnnnnnnnnnnnnnnnnnnnnnnnnnnnnnnnnnnnnnnnnnnnnnnnnnnnnnnnnnnnnnnnnnnnnnnnnnnnnnnnnnnnnnnnnnnnnnnnnnnnnnnnnnnnnnnnnnnnnnnnnnnnnnnnnnnnnnnnnnnnnnnnnnnnnnnnnnnnnnnnnnnnnnnnnnnnnnnnnnnnnnnnnnnnnnnnnnnnnnnnnnnnnnnnnnnnnnnnnnnnnnnnnnnnnnnnnnnnnnnnnnnnnnnnnnnnnnnnnnnnnnnnnnnnnnnnnnnnnnnnnnnnnnnnnnnnnnnnnnnnnnnnnnnnnnnnnnnnnnnnnnnnnnnnnnnnnnnnnnnnnnnnnnnnnnnnnnnnnnnnnnnnnnnnnnnnnnnnnnnnnnnnnnnnnnnnnnnnnnnnnnnnnnnnnnnnnnnnnnnnnnnnnnnnnnnnnnnnnnnnnnnnnnnnnnnnnnnnnnnnnnnnnnnnnnnnnnnnnnnnnnnnnnnnnnnnnnnnnnnnnnnnnnnnnnnnnnnnnnnnnnnnnnnnnnnnnnnnnnnnnnnnnnnnnnnnnnnnnnnnnnnnnnnnnnnnnnnnnnnnnnnnnnnnnnnnnnnnnnnnnnnnnnnnnnnnnnnnnnnnnnnnnnnnnnnnnnnnnnnnnnnnnnnnnnnnnnnnnnnnnnnnnnnnnnnnnnnnnnnnnnnnnnnnnnnnnnnnnnnnnnnnnnnnnnnnnnnnnnnnnnnnnnnnnnnnnnnnnnnnnnnnnnnnnnnnnnnnnnnnnnnnnnnnnnnnnnnnnnnnnnnnnnnnnnnnnnnnnnnnnnnnnnnnnnnnnnnnnnnnnnnnnnnnnnnnnnnnnnnnnnnnnnnnnnnnnnnnnnnnnnnnnnnnnnnnnnnnnnnnnnnnnnnnnnnnnnnnnnnnnnnnnnnnnnnnnnnnnnnnnnnnnnnnnnnnnnnnnnnnnnnnnnnnnnnnnnnnnnnnnnnnnnnnnnnnnnnnnnnnnnnnnnnnnnnnnnnnnnnnnnnnnnnnnnnnnnnnnnnnnnnnnnnnnnnnnnnnnnnnnnnnnnnnnnnnnnnnnnnnnnnnnnnnnnnnnnnnnnnnnnnnnnnnnnnnnnnnnnnnnnnnnnnnnnnnnnnnnnnnnnnnnnnnnnnnnnnnnnnnnnnnnnnnnnnnnnnnnnnnnnnnnnnnnnnnnnnnnnnnnnnnnnnnnnnnnnnnnnnnnnnnnnnnnnnnnnnnnnnnnnnnnnnnnnnnnnnnnnnnnnnnnnnnnnnnnnnnnnnnnnnnnnnnnnnnnnnnnnnnnnnnnnnnnnnnnnnnnnnnnnnnnnnnnnnnnnnnnnnnnnnnnnnnnnnnnnnnnnnnnnnnnnnnnnnnnnnnnnnnnnnnnnnnnnnnnnnnnnnnnnnnnnnnnnnnnnnnnnnnnnnnnnnnnnnnnnnnnnnnnnnnnnnnnnnnnnnnnnnnnnnnnnnnnnnnnnnnnnnnnnnnnnnnnnnnnnnnnnnnnnnnnnnnnnnnnnnnnnnnnnnnnnnnnnnnnnnnnnnnnnnnnnnnnnnnnnnnnnnnnnnnnnnnnnnnnnnnnnnnnnnnnnnnnnnnnnnnnnnnnnnnnnnnnnnnnnnnnnnnnnnnnnnnnnnnnnnnnnnnnnnnnnnnnnnnnnnnnnnnnnnnnnnnnnnnnnnnnnnnnnnnnnnnnnnnnnnnnnnnnnnnnnnnnnnnnnnnnnnnnnnnnnnnnnnnnnnnnnnnnnnnnnnnnnnnnnnnnnnnnnnnnnnnnnnnnnnnnnnnnnnnnnnnnnnnnnnnnnnnnnnnnnnnnnnnnnnnnnnnnnnnnnnnnnnnnnnnnnnnnnnnnnnnnnnnnnnnnnnnnnnnnnnnnnnnnnnnnnnnnnnnnnnnnnnnnnnnnnnnnnnnnnnnnnnnnnnnnnnnnnnnnnnnnnnnnnnnnnnnnnnnnnnnnnnnnnnnnnnnnnnnnnnnnnnnnnnnnnnnnnnnnnnnnnnnnnnnnnnnnnnnnnnnnnnnnnnnnnnnnnnnnnnnnnnnnnnnnnnnnnnnnnnnnnnnnnnnnnnnnnnnnnnnnnnnnnnnnnnnnnnnnnnnnnnnnnnnnnnnnnnnnnnnnnnnnnnnnnnnnnnnnnnnnnnnnnnnnnnnnnnnnnnnnnnnnnnnnnnnnnnnnnnnnnnnnnnnnnnnnnnnnnnnnnnnnnnnnnnnnnnnnnnnnnnnnnnnnnnnnnnnnnnnnnnnnnnnnnnnnnnnnnnnnnnnnnnnnnnnnnnnnnnnnnnnnnnnnnnnnnnnnnnnnnnnnnnnnnnnnnnnnnnnnnnnnnnnnnnnnnnnnnnnnnnnnnnnnnnnnnnnnnnnnnnnnnnnnnnnnnnnnnnnnnnnnnnnnnnnnnnnnnnnnnnnnnnnnnnnnnnnnnnnnnnnnnnnnnnnnnnnnnnnnnnnnnnnnnnnnnnnnnnnnnnnnnnnnnnnnnnnnnnnnnnnnnnnnnnnnnnnnnnnnnnnnnnnnnnnnnnnnnnnnnnnnnnnnnnnnnnnnnnnnnnnnnnnnnnnnnnnnnnnnnnnnnnnnnnnnnnnnnnnnnnnnnnnnnnnnnnnnnnnnnnnnnnnnnnnnnnnnnnnnnnnnnnnnnnnnnnnnnnnnnnnnnnnnnnnnnnnnnnnnnnnnnnnnnnnnnnnnnnnnnnnnnnnnnnnnnnnnnnnnnnnnnnnnnnnnnnnnnnnnnnnnnnnnnnnnnnnnnnnnnnnnnnnnnnnnnnnnnnnnnnnnnnnnnnnnnnnnnnnnnnnnnnnnnnnnnnnnnnnnnnnnnnnnnnnnnnnnnnnnnnnnnnnnnnnnnnnnnnnnnnnnnnnnnnnnnnnnnnnnnnnnnnnnnnnnnnnnnnnnnnnnnnnnnnnnnnnnnnnnnnnnnnnnnnnnnnnnnnnnnnnnnnnnnnnnnnnnnnnnnnnnnnnnnnnnnnnnnnnnnnnnnnnnnnnnnnnnnnnnnnnnnnnnnnnnnnnnnnnnnnnnnnnnnnnnnnnnnnnnnnnnnnnnnnnnnnnnnnnnnnnnnnnnnnnnnnnnnnnnnnnnnnnnnnnnnnnnnnnnnnnnnnnnnnnnnnnnnnnnnnnnnnnnnnnnnnnnnnnnnnnnnnnnnnnnnnnnnnnnnnnnnnnnnnnnnnnnnnnnnnnnnnnnnnnnnnnnnnnnnnnnnnnnnnnnnnnnnnnnnnnnnnnnnnnnnnnnnnnnnnnnnnnnnnnnnnnnnnnnnnnnnnnnnnnnnnnnnnnnnnnnnnnnnnnnnnnnnnnnnnnnnnnnnnnnnnnnnnnnnnnnnnnnnnnnnnnnnnnnnnnnnnnnnnnnnnnnnnnnnnnnnnnnnnnnnnnnnnnnnnnnnnnnnnnnnnnnnnnnnnnnnnnnnnnnnnnnnnnnnnnnnnnnnnnnnnnnnnnnnnnnnnnnnnnnnnnnnnnnnnnnnnnnnnnnnnnnnnnnnnnnnnnnnnnnnnnnnnnnnnnnnnnnnnnnnnnnnnnnnnnnnnnnnnnnnnnnnnnnnnnnnnnnnnnnnnnnnnnnnnnnnnnnnnnnnnnnnnnnnnnnnnnnnnnnnnnnnnnnnnnnnnnnnnnnnnnnnnnnnnnnnnnnnnnnnnnnnnnnnnnnnnnnnnnnnnnnnnnnnnnnnnnnnnnnnnnnnnnnnnnnnnnnnnnnnnnnnnnnnnnnnnnnnnnnnnnnnnnnnnnnnnnnnnnnnnnnnnnnnnnnnnnnnnnnnnnnnnnnnnnnnnnnnnnnnnnnnnnnnnnnnnnnnnnnnnnnnnnnnnnnnnnnnnnnnnnnnnnnnnnnnnnnnnnnnnnnnnnnnnnnnnnnnnnnnnnnnnnnnnnnnnnnnnnnnnnnnnnnnnnnnnnnnnnnnnnnnnnnnnnnnnnnnnnnnnnnnnnnnnnnnnnnnnnnnnnnnnnnnnnnnnnnnnnnnnnnnnnnnnnnnnnnnnnnnnnnnnnnnnnnnnnnnnnnnnnnnnnnnnnnnnnnnnnnnnnnnnnnnnnnnnnnnnnnnnnnnnnnnnnnnnnnnnnnnnnnnnnnnnnnnnnnnnnnnnnnnnnnnnnnnnnnnnnnnnnnnnnnnnnnnnnnnnnnnnnnnnnnnnnnnnnnnnnnnnnnnnnnnnnnnnnnnnnnnnnnnnnnnnnnnnnnnnnnnnnnnnnnnnnnnnnnnnnnnnnnnnnnnnnnnnnnnnnnnnnnnnnnnnnnnnnnnnnnnnnnnnnnnnnnnnnnnnnnnnnnnnnnnnnnnnnnnnnnnnnnnnnnnnnnnnnnnnnnnnnnnnnnnnnnnnnnnnnnnnnnnnnnnnnnnnnnnnnnnnnnnnnnnnnnnnnnnnnnnnnnnnnnnnnnnnnnnnnnnnnnnnnnnnnnnnnnnnnnnnnnnnnnnnnnnnnnnnnnnnnnnnnnnnnnnnnnnnnnnnnnnnnnnnnnnnnnnnnnnnnnnnnnnnnnnnnnnnnnnnnnnnnnnnnnnnnnnnnnnnnnnnnnnnnnnnnnnnnnnnnnnnnnnnnnnnnnnnnnnnnnnnnnnnnnnnnnnnnnnnnnnnnnnnnnnnnnnnnnnnnnnnnnnnnnnnnnnnnnnnnnnnnnnnnnnnnnnnnnnnnnnnnnnnnnnnnnnnnnnnnnnnnnnnnnnnnnnnnnnnnnnnnnnnnnnnnnnnnnnnnnnnnnnnnnnnnnnnnnnnnnnnnnnnnnnnnnnnnnnnnnnnnnnnnnnnnnnnnnnnnnnnnnnnnnnnnnnnnnnnnnnnnnnnnnnnnnnnnnnnnnnnnnnnnnnnnnnnnnnnnnnnnnnnnnnnnnnnnnnnnnnnnnnnnnnnnnnnnnnnnnnnnnnnnnnnnnnnnnnnnnnnnnnnnnnnnnnnnnnnnnnnnnnnnnnnnnnnnnnnnnnnnnnnnnnnnnnnnnnnnnnnnnnnnnnnnnnnnnnnnnnnnnnnnnnnnnnnnnnnnnnnnnnnnnnnnnnnnnnnnnnnnnnnnnnnnnnnnnnnnnnnnnnnnnnnnnnnnnnnnnnnnnnnnnnnnnnnnnnnnnnnnnnnnnnnnnnnnnnnnnnnnnnnnnnnnnnnnnnnnnnnnnnnnnnnnnnnnnnnnnnnnnnnnnnnnnnnnnnnnnnnnnnnnnnnnnnnnnnnnnnnnnnnnnnnnnnnnnnnnnnnnnnnnnnnnnnnnnnnnnnnnnnnnnnnnnnnnnnnnnnnnnnnnnnnnnnnnnnnnnnnnnnnnnnnnnnnnnnnnnnnnnnnnnnnnnnnnnnnnnnnnnnnnnnnnnnnnnnnnnnnnnnnnnnnnnnnnnnnnnnnnnnnnnnnnnnnnnnnnnnnnnnnnnnnnnnnnnnnnnnnnnnnnnnnnnnnnnnnnnnnnnnnnnnnnnnnnnnnnnnnnnnnnnnnnnnnnnnnnnnnnnnnnnnnnnnnnnnnnnnnnnnnnnnnnnnnnnnnnnnnnnnnnnnnnnnnnnnnnnnnnnnnnnnnnnnnnnnnnnnnnnnnnnnnnnnnnnnnnnnnnnnnnnnnnnnnnnnnnnnnnnnnnnnnnnnnnnnnnnnnnnnnnnnnnnnnnnnnnnnnnnnnnnnnnnnnnnnnnnnnnnnnnnnnnnnnnnnnnnnnnnnnnnnnnnnnnnnnnnnnnnnnnnnnnnnnnnnnnnnnnnnnnnnnnnnnnnnnnnnnnnnnnnnnnnnnnnnnnnnnnnnnnnnnnnnnnnnnnnnnnnnnnnnnnnnnnnnnnnnnnnnnnnnnnnnnnnnnnnnnnnnnnnnnnnnnnnnnnnnnnnnnnnnnnnnnnnnnnnnnnnnnnnnnnnnnnnnnnnnnnnnnnnnnnnnnnnnnnnnnnnnnnnnnnnnnnnnnnnnnnnnnnnnnnnnnnnnnnnnnnnnnnnnnnnnnnnnnnnnnnnnnnnnnnnnnnnnnnnnnnnnnnnnnnnnnnnnnnnnnnnnnnnnnnnnnnnnnnnnnnnnnnnnnnnnnnnnnnnnnnnnnnnnnnnnnnnnnnnnnnnnnnnnnnnnnnnnnnnnnnnnnnnnnnnnnnnnnnnnnnnnnnnnnnnnnnnnnnnnnnnnnnnnnnnnnnnnnnnnnnnnnnnnnnnnnnnnnnnnnnnnnnnnnnnnnnnnnnnnnnnnnnnnnnnnnnnnnnnnnnnnnnnnnnnnnnnnnnnnnnnnnnnnnnnnnnnnnnnnnnnnnnnnnnnnnnnnnnnnnnnnnnnnnnnnnnnnnnnnnnnnnnnnnnnnnnnnnnnnnnnnnnnnnnnnnnnnnnnnnnnnnnnnnnnnnnnnnnnnnnnnnnnnnnnnnnnnnnnnnnnnnnnnnnnnnnnnnnnnnnnnnnnnnnnnnnnnnnnnnnnnnnnnnnnnnnnnnnnnnnnnnnnnnnnnnnnnnnnnnnnnnnnnnnnnnnnnnnnnnnnnnnnnnnnnnnnnnnnnnnnnnnnnnnnnnnnnnnnnnnnnnnnnnnnnnnnnnnnnnnnnnnnnnnnnnnnnnnnnnnnnnnnnnnnnnnnnnnnnnnnnnnnnnnnnnnnnnnnnnnnnnnnnnnnnnnnnnnnnnnnnnnnnnnnnnnnnnnnnnnnnnnnnnnnnnnnnnnnnnnnnnnnnnnnnnnnnnnnnnnnnnnnnnnnnnnnnnnnnnnnnnnnnnnnnnnnnnnnnnnnnnnnnnnnnnnnnnnnnnnnnnnnnnnnnnnnnnnnnnnnnnnnnnnnnnnnnnnnnnnnnnnnnnnnnnnnnnnnnnnnnnnnnnnnnnnnnnnnnnnnnnnnnnnnnnnnnnnnnnnnnnnnnnnnnnnnnnnnnnnnnnnnnnnnnnnnnnnnnnnnnnnnnnnnnnnnnnnnnnnnnnnnnnnnnnnnnnnnnnnnnnnnnnnnnnnnnnnnnnnnnnnnnnnnnnnnnnnnnnnnnnnnnnnnnnnnnnnnnnnnnnnnnnnnnnnnnnnnnnnnnnnnnnnnnnnnnnnnnnnnnnnnnnnnnnnnnnnnnnnnnnnnnnnnnnnnnnnnnnnnnnnnnnnnnnnnnnnnnnnnnnnnnnnnnnnnnnnnnnnnnnnnnnnnnnnnnnnnnnnnnnnnnnnnnnnnnnnnnnnnnnnnnnnnnnnnnnnnnnnnnnnnnnnnnnnnnnnnnnnnnnnnnnnnnnnnnnnnnnnnnnnnnnnnnnnnnnnnnnnnnnnnnnnnnnnnnnnnnnnnnnnnnnnnnnnnnnnnnnnnnnnnnnnnnnnnnnnnnnnnnnnnnnnnnnnnnnnnnnnnnnnnnnnnnnnnnnnnnnnnnnnnnnnnnnnnnnnnnnnnnnnnnnnnnnnnnnnnnnnnnnnnnnnnnnnnnnnnnnnnnnnnnnnnnnnnnnnnnnnnnnnnnnnnnnnnnnnnnnnnnnnnnnnnnnnnnnnnnnnnnnnnnnnnnnnnnnnnnnnnnnnnnnnnnnnnnnnnnnnnnnnnnnnnnnnnnnnnnnnnnnnnnnnnnnnnnnnnnnnnnnnnnnnnnnnnnnnnnnnnnnnnnnnnnnnnnnnnnnnnnnnnnnnnnnnnnnnnnnnnnnnnnnnnnnnnnnnnnnnnnnnnnnnnnnnnnnnnnnnnnnnnnnnnnnnnnnnnnnnnnnnnnnnnnnnnnnnnnnnnnnnnnnnnnnnnnnnnnnnnnnnnnnnnnnnnnnnnnnnnnnnnnnnnnnnnnnnnnnnnnnnnnnnnnnnnnnnnnnnnnnnnnnnnnnnnnnnnnnnnnnnnnnnnnnnnnnnnnnnnnnnnnnnnnnnnnnnnnnnnnnnnnnnnnnnnnnnnnnnnnnnnnnnnnnnnnnnnnnnnnnnnnnnnnnnnnnnnnnnnnnnnnnnnnnnnnnnnnnnnnnnnnnnnnnnnnnnnnnnnnnnnnnnnnnnnnnnnnnnnnnnnnnnnnnnnnnnnnnnnnnnnnnnnnnnnnnnnnnnnnnnnnnnnnnnnnnnnnnnnnnnnnnnnnnnnnnnnnnnnnnnnnnnnnnnnnnnnnnnnnnnnnnnnnnnnnnnnnnnnnnnnnnnnnnnnnnnnnnnnnnnnnnnnnnnnnnnnnnnnnnnnnnnnnnnnnnnnnnnnnnnnnnnnnnnnnnnnnnnnnnnnnnnnnnnnnnnnnnnnnnnnnnnnnnnnnnnnnnnnnnnnnnnnnnnnnnnnnnnnnnnnnnnnnnnnnnnnnnnnnnnnnnnnnnnnnnnnnnnnnnnnnnnnnnnnnnnnnnnnnnnnnnnnnnnnnnnnnnnnnnnnnnnnnnnnnnnnnnnnnnnnnnnnnnnnnnnnnnnnnnnnnnnnnnnnnnnnnnnnnnnnnnnnnnnnnnnnnnnnnnnnnnnnnnnnnnnnnnnnnnnnnnnnnnnnnnnnnnnnnnnnnnnnnnnnnnnnnnnnnnnnnnnnnnnnnnnnnnnnnnnnnnnnnnnnnnnnnnnnnnnnnnnnnnnnnnnnnnnnnnnnnnnnnnnnnnnnnnnnnnnnnnnnnnnnnnnnnnnnnnnnnnnnnnnnnnnnnnnnnnnnnnnnnnnnnnnnnnnnnnnnnnnnnnnnnnnnnnnnnnnnnnnnnnnnnnnnnnnnnnnnnnnnnnnnnnnnnnnnnnnnnnnnnnnnnnnnnnnnnnnnnnnnnnnnnnnnnnnnnnnnnnnnnnnnnnnnnnnnnnnnnnnnnnnnnnnnnnnnnnnnnnnnnnnnnnnnnnnnnnnnnnnnnnnnnnnnnnnnnnnnnnnnnnnnnnnnnnnnnnnnnnnnnnnnnnnnnnnnnnnnnnnnnnnnnnnnnnnnnnnnnnnnnnnnnnnnnnnnnnnnnnnnnnnnnnnnnnnnnnnnnnnnnnnnnnnnnnnnnnnnnnnnnnnnnnnnnnnnnnnnnnnnnnnnnnnnnnnnnnnnnnnnnnnnnnnnnnnnnnnnnnnnnnnnnnnnnnnnnnnnnnnnnnnnnnnnnnnnnnnnnnnnnnnnnnnnnnnnnnnnnnnnnnnnnnnnnnnnnnnnnnnnnnnnnnnnnnnnnnnnnnnnnnnnnnnnnnnnnnnnnnnnnnnnnnnnnnnnnnnnnnnnnnnnnnnnnnnnnnnnnnnnnnnnnnnnnnnnnnnnnnnnnnnnnnnnnnnnnnnnnnnnnnnnnnnnnnnnnnnnnnnnnnnnnnnnnnnnnnnnnnnnnnnnnnnnnnnnnnnnnnnnnnnnnnnnnnnnnnnnnnnnnnnnnnnnnnnnnnnnnnnnnnnnnnnnnnnnnnnnnnnnnnnnnnnnnnnnnnnnnnnnnnnnnnnnnnnnnnnnnnnnnnnnnnnnnnnnnnnnnnnnnnnnnnnnnnnnnnnnnnnnnnnnnnnnnnnnnnnnnnnnnnnnnnnnnnnnnnnnnnnnnnnnnnnnnnnnnnnnnnnnnnnnnnnnnnnnnnnnnnnnnnnnnnnnnnnnnnnnnnnnnnnnnnnnnnnnnnnnnnnnnnnnnnnnnnnnnnnnnnnnnnnnnnnnnnnnnnnnnnnnnnnnnnnnnnnnnnnnnnnnnnnnnnnnnnnnnnnnnnnnnnnnnnnnnnnnnnnnnnnnnnnnnnnnnnnnnnnnnnnnnnnnnnnnnnnnnnnnnnnnnnnnnnnnnnnnnnnnnnnnnnnnnnnnnnnnnnnnnnnnnnnnnnnnnnnnnnnnnnnnnnnnnnnnnnnnnnnnnnnnnnnnnnnnnnnnnnnnnnnnnnnnnnnnnnnnnnnnnnnnnnnnnnnnnnnnnnnnnnnnnnnnnnnnnnnnnnnnnnnnnnnnnnnnnnnnnnnnnnnnnnnnnnnnnnnnnnnnnnnnnnnnnnnnnnnnnnnnnnnnnnnnnnnnnnnnnnnnnnnnnnnnnnnnnnnnnnnnnnnnnnnnnnnnnnnnnnnnnnnnnnnnnnnnnnnnnnnnnnnnnnnnnnnnnnnnnnnnnnnnnnnnnnnnnnnnnnnnnnnnnnnnnnnnnnnnnnnnnnnnnnnnnnnnnnnnnnnnnnnnnnnnnnnnnnnnnnnnnnnnnnnnnnnnnnnnnnnnnnnnnnnnnnnnnnnnnnnnnnnnnnnnnnnnnnnnnnnnnnnnnnnnnnnnnnnnnnnnnnnnnnnnnnnnnnnnnnnnnnnnnnnnnnnnnnnnnnnnnnnnnnnnnnnnnnnnnnnnnnnnnnnnnnnnnnnnnnnnnnnnnnnnnnnnnnnnnnnnnnnnnnnnnnnnnnnnnnnnnnnnnnnnnnnnnnnnnnnnnnnnnnnnnnnnnnnnnnnnnnnnnnnnnnnnnnnnnnnnnnnnnnnnnnnnnnnnnnnnnnnnnnnnnnnnnnnnnnnnnnnnnnnnnnnnnnnnnnnnnnnnnnnnnnnnnnnnnnnnnnnnnnnnnnnnnnnnnnnnnnnnnnnnnnnnnnnnnnnnnnnnnnnnnnnnnnnnnnnnnnnnnnnnnnnnnnnnnnnnnnnnnnnnnnnnnnnnnnnnnnnnnnnnnnnnnnnnnnnnnnnnnnnnnnnnnnnnnnnnnnnnnnnnnnnnnnnnnnnnnnnnnnnnnnnnnnnnnnnnnnnnnnnnnnnnnnnnnnnnnnnnnnnnnnnnnnnnnnnnnnnnnnnnnnnnnnnnnnnnnnnnnnnnnnnnnnnnnnnnnnnnnnnnnnnnnnnnnnnnnnnnnnnnnnnnnnnnnnnnnnnnnnnnnnnnnnnnnnnnnnnnnnnnnnnnnnnnnnnnnnnnnnnnnnnnnnnnnnnnnnnnnnnnnnnnnnnnnnnnnnnnnnnnnnnnnnnnnnnnnnnnnnnnnnnnnnnnnnnnnnnnnnnnnnnnnnnnnnnnnnnnnnnnnnnnnnnnnnnnnnnnnnnnnnnnnnnnnnnnnnnnnnnnnnnnnnnnnnnnnnnnnnnnnnnnnnnnnnnnnnnnnnnnnnnnnnnnnnnnnnnnnnnnnnnnnnnnnnnnnnnnnnnnnnnnnnnnnnnnnnnnnnnnnnnnnnnnnnnnnnnnnnnnnnnnnnnnnnnnnnnnnnnnnnnnnnnnnnnnnnnnnnnnnnnnnnnnnnnnnnnnnnnnnnnnnnnnnnnnnnnnnnnnnnnnnnnnnnnnnnnnnnnnnnnnnnnnnnnnnnnnnnnnnnnnnnnnnnnnnnnnnnnnnnnnnnnnnnnnnnnnnnnnnnnnnnnnnnnnnnnnnnnnnnnnnnnnnnnnnnnnnnnnnnnnnnnnnnnnnnnnnnnnnnnnnnnnnnnnnnnnnnnnnnnnnnnnnnnnnnnnnnnnnnnnnnnnnnnnnnnnnnnnnnnnnnnnnnnnnnnnnnnnnnnnnnnnnnnnnnnnnnnnnnnnnnnnnnnnnnnnnnnnnnnnnnnnnnnnnnnnnnnnnnnnnnnnnnnnnnnnnnnnnnnnnnnnnnnnnnnnnnnnnnnnnnnnnnnnnnnnnnnnnnnnnnnnnnnnnnnnnnnnnnnnnnnnnnnnnnnnnnnnnnnnnnnnnnnnnnnnnnnnnnnnnnnnnnnnnnnnnnnnnnnnnnnnnnnnnnnnnnnnnnnnnnnnnnnnnnnnnnnnnnnnnnnnnnnnnnnnnnnnnnnnnnnnnnnnnnnnnnnnnnnnnnnnnnnnnnnnnnnnnnnnnnnnnnnnnnnnnnnnnnnnnnnnnnnnnnnnnnnnnnnnnnnnnnnnnnnnnnnnnnnnnnnnnnnnnnnnnnnnnnnnnnnnnnnnnnnnnnnnnnnnnnnnnnnnnnnnnnnnnnnnnnnnnnnnnnnnnnnnnnnnnnnnnnnnnnnnnnnnnnnnnnnnnnnnnnnnnnnnnnnnnnnnnnnnnnnnnnnnnnnnnnnnnnnnnnnnnnnnnnnnnnnnnnnnnnnnnnnnnnnnnnnnnnnnnnnnnnnnnnnnnnnnnnnnnnnnnnnnnnnnnnnnnnnnnnnnnnnnnnnnnnnnnnnnnnnnnnnnnnnnnnnnnnnnnnnnnnnnnnnnnnnnnnnnnnnnnnnnnnnnnnnnnnnnnnnnnnnnnnnnnnnnnnnnnnnnnnnnnnnnnnnnnnnnnnnnnnnnnnnnnnnnnnnnnnnnnnnnnnnnnnnnnnnnnnnnnnnnnnnnnnnnnnnnnnnnnnnnnnnnnnnnnnnnnnnnnnnnnnnnnnnnnnnnnnnnnnnnnnnnnnnnnnnnnnnnnnnnnnnnnnnnnnnnnnnnnnnnnnnnnnnnnnnnnnnnnnnnnnnnnnnnnnnnnnnnnnnnnnnnnnnnnnnnnnnnnnnnnnnnnnnnnnnnnnnnnnnnnnnnnnnnnnnnnnnnnnnnnnnnnnnnnnnnnnnnnnnnnnnnnnnnnnnnnnnnnnnnnnnnnnnnnnnnnnnnnnnnnnnnnnnnnnnnnnnnnnnnnnnnnnnnnnnnnnnnnnnnnnnnnnnnnnnnnnnnnnnnnnnnnnnnnnnnnnnnnnnnnnnnnnnnnnnnnnnnnnnnnnnnnnnnnnnnnnnnnnnnnnnnnnnnnnnnnnnnnnnnnnnnnnnnnnnnnnnnnnnnnnnnnnnnnnnnnnnnnnnnnnnnnnnnnnnnnnnnnnnnnnnnnnnnnnnnnnnnnnnnnnnnnnnnnnnnnnnnnnnnnnnnnnnnnnnnnnnnnnnnnnnnnnnnnnnnnnnnnnnnnnnnnnnnnnnnnnnnnnnnnnnnnnnnnnnnnnnnnnnnnnnnnnnnnnnnnnnnnnnnnnnnnnnnnnnnnnnnnnnnnnnnnnnnnnnnnnnnnnnnnnnnnnnnnnnnnnnnnnnnnnnnnnnnnnnnnnnnnnnnnnnnnnnnnnnnnnnnnnnnnnnnnnnnnnnnnnnnnnnnnnnnnnnnnnnnnnnnnnnnnnnnnnnnnnnnnnnnnnnnnnnnnnnnnnnnnnnnnnnnnnnnnnnnnnnnnnnnnnnnnnnnnnnnnnnnnnnnnnnnnnnnnnnnnnnnnnnnnnnnnnnnnnnnnnnnnnnnnnnnnnnnnnnnnnnnnnnnnnnnnnnnnnnnnnnnnnnnnnnnnnnnnnnnnnnnnnnnnnnnnnnnnnnnnnnnnnnnnnnnnnnnnnnnnnnnnnnnnnnnnnnnnnnnnnnnnnnnnnnnnnnnnnnnnnnnnnnnnnnnnnnnnnnnnnnnnnnnnnnnnnnnnnnnnnnnnnnnnnnnnnnnnnnnnnnnnnnnnnnnnnnnnnnnnnnnnnnnnnnnnnnnnnnnnnnnnnnnnnnnnnnnnnnnnnnnnnnnnnnnnnnnnnnnnnnnnnnnnnnnnnnnnnnnnnnnnnnnnnnnnnnnnnnnnnnnnnnnnnnnnnnnnnnnnnnnnnnnnnnnnnnnnnnnnnnnnnnnnnnnnnnnnnnnnnnnnnnnnnnnnnnnnnnnnnnnnnnnnnnnnnnnnnnnnnnnnnnnnnnnnnnnnnnnnnnnnnnnnnnnnnnnnnnnnnnnnnnnnnnnnnnnnnnnnnnnnnnnnnnnnnnnnnnnnnnnnnnnnnnnnnnnnnnnnnnnnnnnnnnnnnnnnnnnnnnnnnnnnnnnnnnnnnnnnnnnnnnnnnnnnnnnnnnnnnnnnnnnnnnnnnnnnnnnnnnnnnnnnnnnnnnnnnnnnnnnnnnnnnnnnnnnnnnnnnnnnnnnnnnnnnnnnnnnnnnnnnnnnnnnnnnnnnnnnnnnnnnnnnnnnnnnnnnnnnnnnnnnnnnnnnnnnnnnnnnnnnnnnnnnnnnnnnnnnnnnnnnnnnnnnnnnnnnnnnnnnnnnnnnnnnnnnnnnnnnnnnnnnnnnnnnnnnnnnnnnnnnnnnnnnnnnnnnnnnnnnnnnnnnnnnnnnnnnnnnnnnnnnnnnnnnnnnnnnnnnnnnnnnnnnnnnnnnnnnnnnnnnnnnnnnnnnnnnnnnnnnnnnnnnnnnnnnnnnnnnnnnnnnnnnnnnnnnnnnnnnnnnnnnnnnnnnnnnnnnnnnnnnnnnnnnnnnnnnnnnnnnnnnnnnnnnnnnnnnnnnnnnnnnnnnnnnnnnnnnnnnnnnnnnnnnnnnnnnnnnnnnnnnnnnnnnnnnnnnnnnnnnnnnnnnnnnnnnnnnnnnnnnnnnnnnnnnnnnnnnnnnnnnnnnnnnnnnnnnnnnnnnnnnnnnnnnnnnnnnnnnnnnnnnnnnnnnnnnnnnnnnnnnnnnnnnnnnnnnnnnnnnnnnnnnnnnnnnnnnnnnnnnnnnnnnnnnnnnnnnnnnnnnnnnnnnnnnnnnnnnnnnnnnnnnnnnnnnnnnnnnnnnnnnnnnnnnnnnnnnnnnnnnnnnnnnnnnnnnnnnnnnnnnnnnnnnnnnnnnnnnnnnnnnnnnnnnnnnnnnnnnnnnnnnnnnnnnnnnnnnnnnnnnnnnnnnnnnnnnnnnnnnnnnnnnnnnnnnnnnnnnnnnnnnnnnnnnnnnnnnnnnnnnnnnnnnnnnnnnnnnnnnnnnnnnnnnnnnnnnnnnnnnnnnnnnnnnnnnnnnnnnnnnnnnnnnnnnnnnnnnnnnnnnnnnnnnnnnnnnnnnnnnnnnnnnnnnnnnnnnnnnnnnnnnnnnnnnnnnnnnnnnnnnnnnnnnnnnnnnnnnnnnnnnnnnnnnnnnnnnnnnnnnnnnnnnnnnnnnnnnnnnnnnnnnnnnnnnnnnnnnnnnnnnnnnnnnnnnnnnnnnnnnnnnnnnnnnnnnnnnnnnnnnnnnnnnnnnnnnnnnnnnnnnnnnnnnnnnnnnnnnnnnnnnnnnnnnnnnnnnnnnnnnnnnnnnnnnnnnnnnnnnnnnnnnnnnnnnnnnnnnnnnnnnnnnnnnnnnnnnnnnnnnnnnnnnnnnnnnnnnnnnnnnnnnnnnnnnnnnnnnnnnnnnnnnnnnnnnnnnnnnnnnnnnnnnnnnnnnnnnnnnnnnnnnnnnnnnnnnnnnnnnnnnnnnnnnnnnnnnnnnnnnnnnnnnnnnnnnnnnnnnnnnnnnnnnnnnnnnnnnnnnnnnnnnnnnnnnnnnnnnnnnnnnnnnnnnnnnnnnnnnnnnnnnnnnnnnnnnnnnnnnnnnnnnnnnnnnnnnnnnnnnnnnnnnnnnnnnnnnnnnnnnnnnnnnnnnnnnnnnnnnnnnnnnnnnnnnnnnnnnnnnnnnnnnnnnnnnnnnnnnnnnnnnnnnnnnnnnnnnnnnnnnnnnnnnnnnnnnnnnnnnnnnnnnnnnnnnnnnnnnnnnnnnnnnnnnnnnnnnnnnnnnnnnnnnnnnnnnnnnnnnnnnnnnnnnnnnnnnnnnnnnnnnnnnnnnnnnnnnnnnnnnnnnnnnnnnnnnnnnnnnnnnnnnnnnnnnnnnnnnnnnnnnnnnnnnnnnnnnnnnnnnnnnnnnnnnnnnnnnnnnnnnnnnnnnnnnnnnnnnnnnnnnnnnnnnnnnnnnnnnnnnnnnnnnnnnnnnnnnnnnnnnnnnnnnnnnnnnnnnnnnnnnnnnnnnnnnnnnnnnnnnnnnnnnnnnnnnnnnnnnnnnnnnnnnnnnnnnnnnnnnnnnnnnnnnnnnnnnnnnnnnnnnnnnnnnnnnnnnnnnnnnnnnnnnnnnnnnnnnnnnnnnnnnnnnnnnnnnnnnnnnnnnnnnnnnnnnnnnnnnnnnnnnnnnnnnnnnnnnnnnnnnnnnnnnnnnnnnnnnnnnnnnnnnnnnnnnnnnnnnnnnnnnnnnnnnnnnnnnnnnnnnnnnnnnnnnnnnnnnnnnnnnnnnnnnnnnnnnnnnnnnnnnnnnnnnnnnnnnnnnnnnnnnnnnnnnnnnnnnnnnnnnnnnnnnnnnnnnnnnnnnnnnnnnnnnnnnnnnnnnnnnnnnnnnnnnnnnnnnnnnnnnnnnnnnnnnnnnnnnnnnnnnnnnnnnnnnnnnnnnnnnnnnnnnnnnnnnnnnnnnnnnnnnnnnnnnnnnnnnnnnnnnnnnnnnnnnnnnnnnnnnnnnnnnnnnnnnnnnnnnnnnnnnnnnnnnnnnnnnnnnnnnnnnnnnnnnnnnnnnnnnnnnnnnnnnnnnnnnnnnnnnnnnnnnnnnnnnnnnnnnnnnnnnnnnnnnnnnnnnnnnnnnnnnnnnnnnnnnnnnnnnnnnnnnnnnnnnnnnnnnnnnnnnnnnnnnnnnnnnnnnnnnnnnnnnnnnnnnnnnnnnnnnnnnnnnnnnnnnnnnnnnnnnnnnnnnnnnnnnnnnnnnnnnnnnnnnnnnnnnnnnnnnnnnnnnnnnnnnnnnnnnnnnnnnnnnnnnnnnnnnnnnnnnnnnnnnnnnnnnnnnnnnnnnnnnnnnnnnnnnnnnnnnnnnnnnnnnnnnnnnnnnnnnnnnnnnnnnnnnnnnnnnnnnnnnnnnnnnnnnnnnnnnnnnnnnnnnnnnnnnnnnnnnnnnnnnnnnnnnnnnnnnnnnnnnnnnnnnnnnnnnnnnnnnnnnnnnnnnnnnnnnnnnnnnnnnnnnnnnnnnnnnnnnnnnnnnnnnnnnnnnnnnnnnnnnnnnnnnnnnnnnnnnnnnnnnnnnnnnnnnnnnnnnnnnnnnnnnnnnnnnnnnnnnnnnnnnnnnnnnnnnnnnnnnnnnnnnnnnnnnnnnnnnnnnnnnnnnnnnnnnnnnnnnnnnnnnnnnnnnnnnnnnnnnnnnnnnnnnnnnnnnnnnnnnnnnnnnnnnnnnnnnnnnnnnnnnnnnnnnnnnnnnnnnnnnnnnnnnnnnnnnnnnnnnnnnnnnnnnnnnnnnnnnnnnnnnnnnnnnnnnnnnnnnnnnnnnnnnnnnnnnnnnnnnnnnnnnnnnnnnnnnnnnnnnnnnnnnnnnnnnnnnnnnnnnnnnnnnnnnnnnnnnnnnnnnnnnnnnnnnnnnnnnnnnnnnnnnnnnnnnnnnnnnnnnnnnnnnnnnnnnnnnnnnnnnnnnnnnnnnnnnnnnnnnnnnnnnnnnnnnnnnnnnnnnnnnnnnnnnnnnnnnnnnnnnnnnnnnnnnnnnnnnnnnnnnnnnnnnnnnnnnnnnnnnnnnnnnnnnnnnnnnnnnnnnnnnnnnnnnnnnnnnnnnnnnnnnnnnnnnnnnnnnnnnnnnnnnnnnnnnnnnnnnnnnnnnnnnnnnnnnnnnnnnnnnnnnnnnnnnnnnnnnnnnnnnnnnnnnnnnnnnnnnnnnnnnnnnnnnnnnnnnnnnnnnnnnnnnnnnnnnnnnnnnnnnnnnnnnnnnnnnnnnnnnnnnnnnnnnnnnnnnnnnnnnnnnnnnnnnnnnnnnnnnnnnnnnnnnnnnnnnnnnnnnnnnnnnnnnnnnnnnnnnnnnnnnnnnnnnnnnnnnnnnnnnnnnnnnnnnnnnnnnnnnnnnnnnnnnnnnnnnnnnnnnnnnnnnnnnnnnnnnnnnnnnnnnnnnnnnnnnnnnnnnnnnnnnnnnnnnnnnnnnnnnnnnnnnnnnnnnnnnnnnnnnnnnnnnnnnnnnnnnnnnnnnnnnnnnnnnnnnnnnnnnnnnnnnnnnnnnnnnnnnnnnnnnnnnnnnnnnnnnnnnnnnnnnnnnnnnnnnnnnnnnnnnnnnnnnnnnnnnnnnnnnnnnnnnnnnnnnnnnnnnnnnnnnnnnnnnnnnnnnnnnnnnnnnnnnnnnnnnnnnnnnnnnnnnnnnnnnnnnnnnnnnnnnnnnnnnnnnnnnnnnnnnnnnnnnnnnnnnnnnnnnnnnnnnnnnnnnnnnnnnnnnnnnnnnnnnnnnnnnnnnnnnnnnnnnnnnnnnnnnnnnnnnnnnnnnnnnnnnnnnnnnnnnnnnnnnnnnnnnnnnnnnnnnnnnnnnnnnnnnnnnnnnnnnnnnnnnnnnnnnnnnnnnnnnnnnnnnnnnnnnnnnnnnnnnnnnnnnnnnnnnnnnnnnnnnnnnnnnnnnnnnnnnnnnnnnnnnnnnnnnnnnnnnnnnnnnnnnnnnnnnnnnnnnnnnnnnnnnnnnnnnnnnnnnnnnnnnnnnnnnnnnnnnnnnnnnnnnnnnnnnnnnnnnnnnnnnnnnnnnnnnnnnnnnnnnnnnnnnnnnnnnnnnnnnnnnnnnnnnnnnnnnnnnnnnnnnnnnnnnnnnnnnnnnnnnnnnnnnnnnnnnnnnnnnnnnnnnnnnnnnnnnnnnnnnnnnnnnnnnnnnnnnnnnnnnnnnnnnnnnnnnnnnnnnnnnnnnnnnnnnnnnnnnnnnnnnnnnnnnnnnnnnnnnnnnnnnnnnnnnnnnnnnnnnnnnnnnnnnnnnnnnnnnnnnnnnnnnnnnnnnnnnnnnnnnnnnnnnnnnnnnnnnnnnnnnnnnnnnnnnnnnnnnnnnnnnnnnnnnnnnnnnnnnnnnnnnnnnnnnnnnnnnnnnnnnnnnnnnnnnnnnnnnnnnnnnnnnnnnnnnnnnnnnnnnnnnnnnnnnnnnnnnnnnnnnnnnnnnnnnnnnnnnnnnnnnnnnnnnnnnnnnnnnnnnnnnnnnnnnnnnnnnnnnnnnnnnnnnnnnnnnnnnnnnnnnnnnnnnnnnnnnnnnnnnnnnnnnnnnnnnnnnnnnnnnnnnnnnnnnnnnnnnnnnnnnnnnnnnnnnnnnnnnnnnnnnnnnnnnnnnnnnnnnnnnnnnnnnnnnnnnnnnnnnnnnnnnnnnnnnnnnnnnnnnnnnnnnnnnnnnnnnnnnnnnnnnnnnnnnnnnnnnnnnnnnnnnnnnnnnnnnnnnnnnnnnnnnnnnnnnnnnnnnnnnnnnnnnnnnnnnnnnnnnnnnnnnnnnnnnnnnnnnnnnnnnnnnnnnnnnnnnnnnnnnnnnnnnnnnnnnnnnnnnnnnnnnnnnnnnnnnnnnnnnnnnnnnnnnnnnnnnnnnnnnnnnnnnnnnnnnnnnnnnnnnnnnnnnnnnnnnnnnnnnnnnnnnnnnnnnnnnnnnnnnnnnnnnnnnnnnnnnnnnnnnnnnnnnnnnnnnnnnnnnnnnnnnnnnnnnnnnnnnnnnnnnnnnnnnnnnnnnnnnnnnnnnnnnnnnnnnnnnnnnnnnnnnnnnnnnnnnnnnnnnnnnnnnnnnnnnnnnnnnnnnnnnnnnnnnnnnnnnnnnnnnnnnnnnnnnnnnnnnnnnnnnnnnnnnnnnnnnnnnnnnnnnnnnnnnnnnnnnnnnnnnnnnnnnnnnnnnnnnnnnnnnnnnnnnnnnnnnnnnnnnnnnnnnnnnnnnnnnnnnnnnnnnnnnnnnnnnnnnnnnnnnnnnnnnnnnnnnnnnnnnnnnnnnnnnnnnnnnnnnnnnnnnnnnnnnnnnnnnnnnnnnnnnnnnnnnnnnnnnnnnnnnnnnnnnnnnnnnnnnnnnnnnnnnnnnnnnnnnnnnnnnnnnnnnnnnnnnnnnnnnnnnnnnnnnnnnnnnnnnnnnnnnnnnnnnnnnnnnnnnnnnnnnnnnnnnnnnnnnnnnnnnnnnnnnnnnnnnnnnnnnnnnnnnnnnnnnnnnnnnnnnnnnnnnnnnnnnnnnnnnnnnnnnnnnnnnnnnnnnnnnnnnnnnnnnnnnnnnnnnnnnnnnnnnnnnnnnnnnnnnnnnnnnnnnnnnnnnnnnnnnnnnnnnnnnnnnnnnnnnnnnnnnnnnnnnnnnnnnnnnnnnnnnnnnnnnnnnnnnnnnnnnnnnnnnnnnnnnnnnnnnnnnnnnnnnnnnnnnnnnnnnnnnnnnnnnnnnnnnnnnnnnnnnnnnnnnnnnnnnnnnnnnnnnnnnnnnnnnnnnnnnnnnnnnnnnnnnnnnnnnnnnnnnnnnnnnnnnnnnnnnnnnnnnnnnnnnnnnnnnnnnnnnnnnnnnnnnnnnnnnnnnnnnnnnnnnnnnnnnnnnnnnnnnnnnnnnnnnnnnnnnnnnnnnnnnnnnnnnnnnnnnnnnnnnnnnnnnnnnnnnnnnnnnnnnnnnnnnnnnnnnnnnnnnnnnnnnnnnnnnnnnnnnnnnnnnnnnnnnnnnnnnnnnnnnnnnnnnnnnnnnnnnnnnnnnnnnnnnnnnnnnnnnnnnnnnnnnnnnnnnnnnnnnnnnnnnnnnnnnnnnnnnnnnnnnnnnnnnnnnnnnnnnnnnnnnnnnnnnnnnnnnnnnnnnnnnnnnnnnnnnnnnnnnnnnnnnnnnnnnnnnnnnnnnnnnnnnnnnnnnnnnnnnnnnnnnnnnnnnnnnnnnnnnnnnnnnnnnnnnnnnnnnnnnnnnnnnnnnnnnnnnnnnnnnnnnnnnnnnnnnnnnnnnnnnnnnnnnnnnnnnnnnnnnnnnnnnnnnnnnnnnnnnnnnnnnnnnnnnnnnnnnnnnnnnnnnnnnnnnnnnnnnnnnnnnnnnnnnnnnnnnnnnnnnnnnnnnnnnnnnnnnnnnnnnnnnnnnnnnnnnnnnnnnnnnnnnnnnnnnnnnnnnnnnnnnnnnnnnnnnnnnnnnnnnnnnnnnnnnnnnnnnnnnnnnnnnnnnnnnnnnnnnnnnnnnnnnnnnnnnnnnnnnnnnnnnnnnnnnnnnnnnnnnnnnnnnnnnnnnnnnnnnnnnnnnnnnnnnnnnnnnnnnnnnnnnnnnnnnnnnnnnnnnnnnnnnnnnnnnnnnnnnnnnnnnnnnnnnnnnnnnnnnnnnnnnnnnnnnnnnnnnnnnnnnnnnnnnnnnnnnnnnnnnnnnnnnnnnnnnnnnnnnnnnnnnnnnnnnnnnnnnnnnnnnnnnnnnnnnnnnnnnnnnnnnnnnnnnnnnnnnnnnnnnnnnnnnnnnnnnnnnnnnnnnnnnnnnnnnnnnnnnnnnnnnnnnnnnnnnnnnnnnnnnnnnnnnnnnnnnnnnnnnnnnnnnnnnnnnnnnnnnnnnnnnnnnnnnnnnnnnnnnnnnnnnnnnnnnnnnnnnnnnnnnnnnnnnnnnnnnnnnnnnnnnnnnnnnnnnnnnnnnnnnnnnnnnnnnnnnnnnnnnnnnnnnnnnnnnnnnnnnnnnnnnnnnnnnnnnnnnnnnnnnnnnnnnnnnnnnnnnnnnnnnnnnnnnnnnnnnnnnnnnnnnnnnnnnnnnnnnnnnnnnnnnnnnnnnnnnnnnnnnnnnnnnnnnnnnnnnnnnnnnnnnnnnnnnnnnnnnnnnnnnnnnnnnnnnnnnnnnnnnnnnnnnnnnnnnnnnnnnnnnnnnnnnnnnnnnnnnnnnnnnnnnnnnnnnnnnnnnnnnnnnnnnnnnnnnnnnnnnnnnnnnnnnnnnnnnnnnnnnnnnnnnnnnnnnnnnnnnnnnnnnnnnnnnnnnnnnnnnnnnnnnnnnnnnnnnnnnnnnnnnnnnnnnnnnnnnnnnnnnnnnnnnnnnnnnnnnnnnnnnnnnnnnnnnnnnnnnnnnnnnnnnnnnnnnnnnnnnnnnnnnnnnnnnnnnnnnnnnnnnnnnnnnnnnnnnnnnnnnnnnnnnnnnnnnnnnnnnnnnnnnnnnnnnnnnnnnnnnnnnnnnnnnnnnnnnnnnnnnnnnnnnnnnnnnnnnnnnnnnnnnnnnnnnnnnnnnnnnnnnnnnnnnnnnnnnnnnnnnnnnnnnnnnnnnnnnnnnnnnnnnnnnnnnnnnnnnnnnnnnnnnnnnnnnnnnnnnnnnnnnnnnnnnnnnnnnnnnnnnnnnnnnnnnnnnnnnnnnnnnnnnnnnnnnnnnnnnnnnnnnnnnnnnnnnnnnnnnnnnnnnnnnnnnnnnnnnnnnnnnnnnnnnnnnnnnnnnnnnnnnnnnnnnnnnnnnnnnnnnnnnnnnnnnnnnnnnnnnnnnnnnnnnnnnnnnnnnnnnnnnnnnnnnnnnnnnnnnnnnnnnnnnnnnnnnnnnnnnnnnnnnnnnnnnnnnnnnnnnnnnnnnnnnnnnnnnnnnnnnnnnnnnnnnnnnnnnnnnnnnnnnnnnnnnnnnnnnnnnnnnnnnnnnnnnnnnnnnnnnnnnnnnnnnnnnnnnnnnnnnnnnnnnnnnnnnnnnnnnnnnnnnnnnnnnnnnnnnnnnnnnnnnnnnnnnnnnnnnnnnnnnnnnnnnnnnnnnnnnnnnnnnnnnnnnnnnnnnnnnnnnnnnnnnnnnnnnnnnnnnnnnnnnnnnnnnnnnnnnnnnnnnnnnnnnnnnnnnnnnnnnnnnnnnnnnnnnnnnnnnnnnnnnnnnnnnnnnnnnnnnnnnnnnnnnnnnnnnnnnnnnnnnnnnnnnnnnnnnnnnnnnnnnnnnnnnnnnnnnnnnnnnnnnnnnnnnnnnnnnnnnnnnnnnnnnnnnnnnnnnnnnnnnnnnnnnnnnnnnnnnnnnnnnnnnnnnnnnnnnnnnnnnnnnnnnnnnnnnnnnnnnnnnnnnnnnnnnnnnnnnnnnnnnnnnnnnnnnnnnnnnnnnnnnnnnnnnnnnnnnnnnnnnnnnnnnnnnnnnnnnnnnnnnnnnnnnnnnnnnnnnnnnnnnnnnnnnnnnnnnnnnnnnnnnnnnnnnnnnnnnnnnnnnnnnnnnnnnnnnnnnnnnnnnnnnnnnnnnnnnnnnnnnnnnnnnnnnnnnnnnnnnnnnnnnnnnnnnnnnnnnnnnnnnnnnnnnnnnnnnnnnnnnnnnnnnnnnnnnnnnnnnnnnnnnnnnnnnnnnnnnnnnnnnnnnnnnnnnnnnnnnnnnnnnnnnnnnnnnnnnnnnnnnnnnnnnnnnnnnnnnnnnnnnnnnnnnnnnnnnnnnnnnnnnnnnnnnnnnnnnnnnnnnnnnnnnnnnnnnnnnnnnnnnnnnnnnnnnnnnnnnnnnnnnnnnnnnnnnnnnnnnnnnnnnnnnnnnnnnnnnnnnnnnnnnnnnnnnnnnnnnnnnnnnnnnnnnnnnnnnnnnnnnnnnnnnnnnnnnnnnnnnnnnnnnnnnnnnnnnnnnnnnnnnnnnnnnnnnnnnnnnnnnnnnnnnnnnnnnnnnnnnnnnnnnnnnnnnnnnnnnnnnnnnnnnnnnnnnnnnnnnnnnnnnnnnnnnnnnnnnnnnnnnnnnnnnnnnnnnnnnnnnnnnnnnnnnnnnnnnnnnnnnnnnnnnnnnnnnnnnnnnnnnnnnnnnnnnnnnnnnnnnnnnnnnnnnnnnnnnnnnnnnnnnnnnnnnnnnnnnnnnnnnnnnnnnnnnnnnnnnnnnnnnnnnnnnnnnnnnnnnnnnnnnnnnnnnnnnnnnnnnnnnnnnnnnnnnnnnnnnnnnnnnnnnnnnnnnnnnnnnnnnnnnnnnnnnnnnnnnnnnnnnnnnnnnnnnnnnnnnnnnnnnnnnnnnnnnnnnnnnnnnnnnnnnnnnnnnnnnnnnnnnnnnnnnnnnnnnnnnnnnnnnnnnnnnnnnnnnnnnnnnnnnnnnnnnnnnnnnnnnnnnnnnnnnnnnnnnnnnnnnnnnnnnnnnnnnnnnnnnnnnnnnnnnnnnnnnnnnnnnnnnnnnnnnnnnnnnnnnnnnnnnnnnnnnnnnnnnnnnnnnnnnnnnnnnnnnnnnnnnnnnnnnnnnnnnnnnnnnnnnnnnnnnnnnnnnnnnnnnnnnnnnnnnnnnnnnnnnnnnnnnnnnnnnnnnnnnnnnnnnnnnnnnnnnnnnnnnnnnnnnnnnnnnnnnnnnnnnnnnnnnnnnnnnnnnnnnnnnnnnnnnnnnnnnnnnnnnnnnnnnnnnnnnnnnnnnnnnnnnnnnnnnnnnnnnnnnnnnnnnnnnnnnnnnnnnnnnnnnnnnnnnnnnnnnnnnnnnnnnnnnnnnnnnnnnnnnnnnnnnnnnnnnnnnnnnnnnnnnnnnnnnnnnnnnnnnnnnnnnnnnnnnnnnnnnnnnnnnnnnnnnnnnnnnnnnnnnnnnnnnnnnnnnnnnnnnnnnnnnnnnnnnnnnnnnnnnnnnnnnnnnnnnnnnnnnnnnnnnnnnnnnnnnnnnnnnnnnnnnnnnnnnnnnnnnnnnnnnnnnnnnnnnnnnnnnnnnnnnnnnnnnnnnnnnnnnnnnnnnnnnnnnnnnnnnnnnnnnnnnnnnnnnnnnnnnnnnnnnnnnnnnnnnnnnnnnnnnnnnnnnnnnnnnnnnnnnnnnnnnnnnnnnnnnnnnnnnnnnnnnnnnnnnnnnnnnnnnnnnnnnnnnnnnnnnnnnnnnnnnnnnnnnnnnnnnnnnnnnnnnnnnnnnnnnnnnnnnnnnnnnnnnnnnnnnnnnnnnnnnnnnnnnnnnnnnnnnnnnnnnnnnnnnnnnnnnnnnnnnnnnnnnnnnnnnnnnnnnnnnnnnnnnnnnnnnnnnnnnnnnnnnnnnnnnnnnnnnnnnnnnnnnnnnnnnnnnnnnnnnnnnnnnnnnnnnnnnnnnnnnnnnnnnnnnnnnnnnnnnnnnnnnnnnnnnnnnnnnnnnnnnnnnnnnnnnnnnnnnnnnnnnnnnnnnnnnnnnnnnnnnnnnnnnnnnnnnnnnnnnnnnnnnnnnnnnnnnnnnnnnnnnnnnnnnnnnnnnnnnnnnnnnnnnnnnnnnnnnnnnnnnnnnnnnnnnnnnnnnnnnnnnnnnnnnnnnnnnnnnnnnnnnnnnnnnnnnnnnnnnnnnnnnnnnnnnnnnnnnnnnnnnnnnnnnnnnnnnnnnnnnnnnnnnnnnnnnnnnnnnnnnnnnnnnnnnnnnnnnnnnnnnnnnnnnnnnnnnnnnnnnnnnnnnnnnnnnnnnnnnnnnnnnnnnnnnnnnnnnnnnnnnnnnnnnnnnnnnnnnnnnnnnnnnnnnnnnnnnnnnnnnnnnnnnnnnnnnnnnnnnnnnnnnnnnnnnnnnnnnnnnnnnnnnnnnnnnnnnnnnnnnnnnnnnnnnnnnnnnnnnnnnnnnnnnnnnnnnnnnnnnnnnnnnnnnnnnnnnnnnnnnnnnnnnnnnnnnnnnnnnnnnnnnnnnnnnnnnnnnnnnnnnnnnnnnnnnnnnnnnnnnnnnnnnnnnnnnnnnnnnnnnnnnnnnnnnnnnnnnnnnnnnnnnnnnnnnnnnnnnnnnnnnnnnnnnnnnnnnnnnnnnnnnnnnnnnnnnnnnnnnnnnnnnnnnnnnnnnnnnnnnnnnnnnnnnnnnnnnnnnnnnnnnnnnnnnnnnnnnnnnnnnnnnnnnnnnnnnnnnnnnnnnnnnnnnnnnnnnnnnnnnnnnnnnnnnnnnnnnnnnnnnnnnnnnnnnnnnnnnnnnnnnnnnnnnnnnnnnnnnnnnnnnnnnnnnnnnnnnnnnnnnnnnnnnnnnnnnnnnnnnnnnnnnnnnnnnnnnnnnnnnnnnnnnnnnnnnnnnnnnnnnnnnnnnnnnnnnnnnnnnnnnnnnnnnnnnnnnnnnnnnnnnnnnnnnnnnnnnnnnnnnnnnnnnnnnnnnnnnnnnnnnnnnnnnnnnnnnnnnnnnnnnnnnnnnnnnnnnnnnnnnnnnnnnnnnnnnnnnnnnnnnnnnnnnnnnnnnnnnnnnnnnnnnnnnnnnnnnnnnnnnnnnnnnnnnnnnnnnnnnnnnnnnnnnnnnnnnnnnnnnnnnnnnnnnnnnnnnnnnnnnnnnnnnnnnnnnnnnnnnnnnnnnnnnnnnnnnnnnnnnnnnnnnnnnnnnnnnnnnnnnnnnnnnnnnnnnnnnnnnnnnnnnnnnnnnnnnnnnnnnnnnnnnnnnnnnnnnnnnnnnnnnnnnnnnnnnnnnnnnnnnnnnnnnnnnnnnnnnnnnnnnnnnnnnnnnnnnnnnnnnnnnnnnnnnnnnnnnnnnnnnnnnnnnnnnnnnnnnnnnnnnnnnnnnnnnnnnnnnnnnnnnnnnnnnnnnnnnnnnnnnnnnnnnnnnnnnnnnnnnnnnnnnnnnnnnnnnnnnnnnnnnnnnnnnnnnnnnnnnnnnnnnnnnnnnnnnnnnnnnnnnnnnnnnnnnnnnnnnnnnnnnnnnnnnnnnnnnnnnnnnnnnnnnnnnnnnnnnnnnnnnnnnnnnnnnnnnnnnnnnnnnnnnnnnnnnnnnnnnnnnnnnnnnnnnnnnnnnnnnnnnnnnnnnnnnnnnnnnnnnnnnnnnnnnnnnnnnnnnnnnnnnnnnnnnnnnnnnnnnnnnnnnnnnnnnnnnnnnnnnnnnnnnnnnnnnnnnnnnnnnnnnnnnnnnnnnnnnnnnnnnnnnnnnnnnnnnnnnnnnnnnnnnnnnnnnnnnnnnnnnnnnnnnnnnnnnnnnnnnnnnnnnnnnnnnnnnnnnnnnnnnnnnnnnnnnnnnnnnnnnnnnnnnnnnnnnnnnnnnnnnnnnnnnnnnnnnnnnnnnnnnnnnnnnnnnnnnnnnnnnnnnnnnnnnnnnnnnnnnnnnnnnnnnnnnnnnnnnnnnnnnnnnnnnnnnnnnnnnnnnnnnnnnnnnnnnnnnnnnnnnnnnnnnnnnnnnnnnnnnnnnnnnnnnnnnnnnnnnnnnnnnnnnnnnnnnnnnnnnnnnnnnnnnnnnnnnnnnnnnnnnnnnnnnnnnnnnnnnnnnnnnnnnnnnnnnnnnnnnnnnnnnnnnnnnnnnnnnnnnnnnnnnnnnnnnnnnnnnnnnnnnnnnnnnnnnnnnnnnnnnnnnnnnnnnnnnnnnnnnnnnnnnnnnnnnnnnnnnnnnnnnnnnnnnnnnnnnnnnnnnnnnnnnnnnnnnnnnnnnnnnnnnnnnnnnnnnnnnnnnnnnnnnnnnnnnnnnnnnnnnnnnnnnnnnnnnnnnnnnnnnnnnnnnnnnnnnnnnnnnnnnnnnnnnnnnnnnnnnnnnnnnnnnnnnnnnnnnnnnnnnnnnnnnnnnnnnnnnnnnnnnnnnnnnnnnnnnnnnnnnnnnnnnnnnnnnnnnnnnnnnnnnnnnnnnnnnnnnnnnnnnnnnnnnnnnnnnnnnnnnnnnnnnnnnnnnnnnnnnnnnnnnnnnnnnnnnnnnnnnnnnnnnnnnnnnnnnnnnnnnnnnnnnnnnnnnnnnnnnnnnnnnnnnnnnnnnnnnnnnnnnnnnnnnnnnnnnnnnnnnnnnnnnnnnnnnnnnnnnnnnnnnnnnnnnnnnnnnnnnnnnnnnnnnnnnnnnnnnnnnnnnnnnnnnnnnnnnnnnnnnnnnnnnnnnnnnnnnnnnnnnnnnnnnnnnnnnnnnnnnnnnnnnnnnnnnnnnnnnnnnnnnnnnnnnnnnnnnnnnnnnnnnnnnnnnnnnnnnnnnnnnnnnnnnnnnnnnnnnnnnnnnnnnnnnnnnnnnnnnnnnnnnnnnnnnnnnnnnnnnnnnnnnnnnnnnnnnnnnnnnnnnnnnnnnnnnnnnnnnnnnnnnnnnnnnnnnnnnnnnnnnnnnnnnnnnnnnnnnnnnnnnnnnnnnnnnnnnnnnnnnnnnnnnnnnnnnnnnnnnnnnnnnnnnnnnnnnnnnnnnnnnnnnnnnnnnnnnnnnnnnnnnnnnnnnnnnnnnnnnnnnnnnnnnnnnnnnnnnnnnnnnnnnnnnnnnnnnnnnnnnnnnnnnnnnnnnnnnnnnnnnnnnnnnnnnnnnnnnnnnnnnnnnnnnnnnnnnnnnnnnnnnnnnnnnnnnnnnnnnnnnnnnnnnnnnnnnnnnnnnnnnnnnnnnnnnnnnnnnnnnnnnnnnnnnnnnnnnnnnnnnnnnnnnnnnnnnnnnnnnnnnnnnnnnnnnnnnnnnnnnnnnnnnnnnnnnnnnnnnnnnnnnnnnnnnnnnnnnnnnnnnnnnnnnnnnnnnnnnnnnnnnnnnnnnnnnnnnnnnnnnnnnnnnnnnnnnnnnnnnnnnnnnnnnnnnnnnnnnnnnnnnnnnnnnnnnnnnnnnnnnnnnnnnnnnnnnnnnnnnnnnnnnnnnnnnnnnnnnnnnnnnnnnnnnnnnnnnnnnnnnnnnnnnnnnnnnnnnnnnnnnnnnnnnnnnnnnnnnnnnnnnnnnnnnnnnnnnnnnnnnnnnnnnnnnnnnnnnnnnnnnnnnnnnnnnnnnnnnnnnnnnnnnnnnnnnnnnnnnnnnnnnnnnnnnnnnnnnnnnnnnnnnnnnnnnnnnnnnnnnnnnnnnnnnnnnnnnnnnnnnnnnnnnnnnnnnnnnnnnnnnnnnnnnnnnnnnnnnnnnnnnnnnnnnnnnnnnnnnnnnnnnnnnnnnnnnnnnnnnnnnnnnnnnnnnnnnnnnnnnnnnnnnnnnnnnnnnnnnnnnnnnnnnnnnnnnnnnnnnnnnnnnnnnnnnnnnnnnnnnnnnnnnnnnnnnnnnnnnnnnnnnnnnnnnnnnnnnnnnnnnnnnnnnnnnnnnnnnnnnnnnnnnnnnnnnnnnnnnnnnnnnnnnnnnnnnnnnnnnnnnnnnnnnnnnnnnnnnnnnnnnnnnnnnnnnnnnnnnnnnnnnnnnnnnnnnnnnnnnnnnnnnnnnnnnnnnnnnnnnnnnnnnnnnnnnnnnnnnnnnnnnnnnnnnnnnnnnnnnnnnnnnnnnnnnnnnnnnnnnnnnnnnnnnnnnnnnnnnnnnnnnnnnnnnnnnnnnnnnnnnnnnnnnnnnnnnnnnnnnnnnnnnnnnnnnnnnnnnnnnnnnnnnnnnnnnnnnnnnnnnnnnnnnnnnnnnnnnnnnnnnnnnnnnnnnnnnnnnnnnnnnnnnnnnnnnnnnnnnnnnnnnnnnnnnnnnnnnnnnnnnnnnnnnnnnnnnnnnnnnnnnnnnnnnnnnnnnnnnnnnnnnnnnnnnnnnnnnnnnnnnnnnnnnnnnnnnnnnnnnnnnnnnnnnnnnnnnnnnnnnnnnnnnnnnnnnnnnnnnnnnnnnnnnnnnnnnnnnnnnnnnnnnnnnnnnnnnnnnnnnnnnnnnnnnnnnnnnnnnnnnnnnnnnnnnnnnnnnnnnnnnnnnnnnnnnnnnnnnnnnnnnnnnnnnnnnnnnnnnnnnnnnnnnnnnnnnnnnnnnnnnnnnnnnnnnnnnnnnnnnnnnnnnnnnnnnnnnnnnnnnnnnnnnnnnnnnnnnnnnnnnnnnnnnnnnnnnnnnnnnnnnnnnnnnnnnnnnnnnnnnnnnnnnnnnnnnnnnnnnnnnnnnnnnnnnnnnnnnnnnnnnnnnnnnnnnnnnnnnnnnnnnnnnnnnnnnnnnnnnnnnnnnnnnnnnnnnnnnnnnnnnnnnnnnnnnnnnnnnnnnnnnnnnnnnnnnnnnnnnnnnnnnnnnnnnnnnnnnnnnnnnnnnnnnnnnnnnnnnnnnnnnnnnnnnnnnnnnnnnnnnnnnnnnnnnnnnnnnnnnnnnnnnnnnnnnnnnnnnnnnnnnnnnnnnnnnnnnnnnnnnnnnnnnnnnnnnnnnnnnnnnnnnnnnnnnnnnnnnnnnnnnnnnnnnnnnnnnnnnnnnnnnnnnnnnnnnnnnnnnnnnnnnnnnnnnnnnnnnnnnnnnnnnnnnnnnnnnnnnnnnnnnnnnnnnnnnnnnnnnnnnnnnnnnnnnnnnnnnnnnnnnnnnnnnnnnnnnnnnnnnnnnnnnnnnnnnnnnnnnnnnnnnnnnnnnnnnnnnnnnnnnnnnnnnnnnnnnnnnnnnnnnnnnnnnnnnnnnnnnnnnnnnnnnnnnnnnnnnnnnnnnnnnnnnnnnnnnnnnnnnnnnnnnnnnnnnnnnnnnnnnnnnnnnnnnnnnnnnnnnnnnnnnnnnnnnnnnnnnnnnnnnnnnnnnnnnnnnnnnnnnnnnnnnnnnnnnnnnnnnnnnnnnnnnnnnnnnnnnnnnnnnnnnnnnnnnnnnnnnnnnnnnnnnnnnnnnnnnnnnnnnnnnnnnnnnnnnnnnnnnnnnnnnnnnnnnnnnnnnnnnnnnnnnnnnnnnnnnnnnnnnnnnnnnnnnnnnnnnnnnnnnnnnnnnnnnnnnnnnnnnnnnnnnnnnnnnnnnnnnnnnnnnnnnnnnnnnnnnnnnnnnnnnnnnnnnnnnnnnnnnnnnnnnnnnnnnnnnnnnnnnnnnnnnnnnnnnnnnnnnnnnnnnnnnnnnnnnnnnnnnnnnnnnnnnnnnnnnnnnnnnnnnnnnnnnnnnnnnnnnnnnnnnnnnnnnnnnnnnnnnnnnnnnnnnnnnnnnnnnnnnnnnnnnnnnnnnnnnnnnnnnnnnnnnnnnnnnnnnnnnnnnnnnnnnnnnnnnnnnnnnnnnnnnnnnnnnnnnnnnnnnnnnnnnnnnnnnnnnnnnnnnnnnnnnnnnnnnnnnnnnnnnnnnnnnnnnnnnnnnnnnnnnnnnnnnnnnnnnnnnnnnnnnnnnnnnnnnnnnnnnnnnnnnnnnnnnnnnnnnnnnnnnnnnnnnnnnnnnnnnnnnnnnnnnnnnnnnnnnnnnnnnnnnnnnnnnnnnnnnnnnnnnnnnnnnnnnnnnnnnnnnnnnnnnnnnnnnnnnnnnnnnnnnnnnnnnnnnnnnnnnnnnnnnnnnnnnnnnnnnnnnnnnnnnnnnnnnnnnnnnnnnnnnnnnnnnnnnnnnnnnnnnnnnnnnnnnnnnnnnnnnnnnnnnnnnnnnnnnnnnnnnnnnnnnnnnnnnnnnnnnnnnnnnnnnnnnnnnnnnnnnnnnnnnnnnnnnnnnnnnnnnnnnnnnnnnnnnnnnnnnnnnnnnnnnnnnnnnnnnnnnnnnnnnnnnnnnnnnnnnnnnnnnnnnnnnnnnnnnnnnnnnnnnnnnnnnnnnnnnnnnnnnnnnnnnnnnnnnnnnnnnnnnnnnnnnnnnnnnnnnnnnnnnnnnnnnnnnnnnnnnnnnnnnnnnnnnnnnnnnnnnnnnnnnnnnnnnnnnnnnnnnnnnnnnnnnnnnnnnnnnnnnnnnnnnnnnnnnnnnnnnnnnnnnnnnnnnnnnnnnnnnnnnnnnnnnnnnnnnnnnnnnnnnnnnnnnnnnnnnnnnnnnnnnnnnnnnnnnnnnnnnnnnnnnnnnnnnnnnnnnnnnnnnnnnnnnnnnnnnnnnnnnnnnnnnnnnnnnnnnnnnnnnnnnnnnnnnnnnnnnnnnnnnnnnnnnnnnnnnnnnnnnnnnnnnnnnnnnnnnnnnnnnnnnnnnnnnnnnnnnnnnnnnnnnnnnnnnnnnnnnnnnnnnnnnnnnnnnnnnnnnnnnnnnnnnnnnnnnnnnnnnnnnnnnnnnnnnnnnnnnnnnnnnnnnnnnnnnnnnnnnnnnnnnnnnnnnnnnnnnnnnnnnnnnnnnnnnnnnnnnnnnnnnnnnnnnnnnnnnnnnnnnnnnnnnnnnnnnnnnnnnnnnnnnnnnnnnnnnnnnnnnnnnnnnnnnnnnnnnnnnnnnnnnnnnnnnnnnnnnnnnnnnnnnnnnnnnnnnnnnnnnnnnnnnnnnnnnnnnnnnnnnnnnnnnnnnnnnnnnnnnnnnnnnnnnnnnnnnnnnnnnnnnnnnnnnnnnnnnnnnnnnnnnnnnnnnnnnnnnnnnnnnnnnnnnnnnnnnnnnnnnnnnnnnnnnnnnnnnnnnnnnnnnnnnnnnnnnnnnnnnnnnnnnnnnnnnnnnnnnnnnnnnnnnnnnnnnnnnnnnnnnnnnnnnnnnnnnnnnnnnnnnnnnnnnnnnnnnnnnnnnnnnnnnnnnnnnnnnnnnnnnnnnnnnnnnnnnnnnnnnnnnnnnnnnnnnnnnnnnnnnnnnnnnnnnnnnnnnnnnnnnnnnnnnnnnnnnnnnnnnnnnnnnnnnnnnnnnnnnnnnnnnnnnnnnnnnnnnnnnnnnnnnnnnnnnnnnnnnnnnnnnnnnnnnnnnnnnnnnnnnnnnnnnnnnnnnnnnnnnnnnnnnnnnnnnnnnnnnnnnnnnnnnnnnnnnnnnnnnnnnnnnnnnnnnnnnnnnnnnnnnnnnnnnnnnnnnnnnnnnnnnnnnnnnnnnnnnnnnnnnnnnnnnnnnnnnnnnnnnnnnnnnnnnnnnnnnnnnnnnnnnnnnnnnnnnnnnnnnnnnnnnnnnnnnnnnnnnnnnnnnnnnnnnnnnnnnnnnnnnnnnnnnnnnnnnnnnnnnnnnnnnnnnnnnnnnnnnnnnnnnnnnnnnnnnnnnnnnnnnnnnnnnnnnnnnnnnnnnnnnnnnnnnnnnnnnnnnnnnnnnnnnnnnnnnnnnnnnnnnnnnnnnnnnnnnnnnnnnnnnnnnnnnnnnnnnnnnnnnnnnnnnnnnnnnnnnnnnnnnnnnnnnnnnnnnnnnnnnnnnnnnnnnnnnnnnnnnnnnnnnnnnnnnnnnnnnnnnnnnnnnnnnnnnnnnnnnnnnnnnnnnnnnnnnnnnnnnnnnnnnnnnnnnnnnnnnnnnnnnnnnnnnnnnnnnnnnnnnnnnnnnnnnnnnnnnnnnnnnnnnnnnnnnnnnnnnnnnnnnnnnnnnnnnnnnnnnnnnnnnnnnnnnnnnnnnnnnnnnnnnnnnnnnnnnnnnnnnnnnnnnnnnnnnnnnnnnnnnnnnnnnnnnnnnnnnnnnnnnnnnnnnnnnnnnnnnnnnnnnnnnnnnnnnnnnnnnnnnnnnnnnnnnnnnnnnnnnnnnnnnnnnnnnnnnnnnnnnnnnnnnnnnnnnnnnnnnnnnnnnnnnnnnnnnnnnnnnnnnnnnnnnnnnnnnnnnnnnnnnnnnnnnnnnnnnnnnnnnnnnnnnnnnnnnnnnnnnnnnnnnnnnnnnnnnnnnnnnnnnnnnnnnnnnnnnnnnnnnnnnnnnnnnnnnnnnnnnnnnnnnnnnnnnnnnnnnnnnnnnnnnnnnnnnnnnnnnnnnnnnnnnnnnnnnnnnnnnnnnnnnnnnnnnnnnnnnnnnnnnnnnnnnnnnnnnnnnnnnnnnnnnnnnnnnnnnnnnnnnnnnnnnnnnnnnnnnnnnnnnnnnnnnnnnnnnnnnnnnnnnnnnnnnnnnnnnnnnnnnnnnnnnnnnnnnnnnnnnnnnnnnnnnnnnnnnnnnnnnnnnnnnnnnnnnnnnnnnnnnnnnnnnnnnnnnnnnnnnnnnnnnnnnnnnnnnnnnnnnnnnnnnnnnnnnnnnnnnnnnnnnnnnnnnnnnnnnnnnnnnnnnnnnnnnnnnnnnnnnnnnnnnnnnnnnnnnnnnnnnnnnnnnnnnnnnnnnnnnnnnnnnnnnnnnnnnnnnnnnnnnnnnnnnnnnnnnnnnnnnnnnnnnnnnnnnnnnnnnnnnnnnnnnnnnnnnnnnnnnnnnnnnnnnnnnnnnnnnnnnnnnnnnnnnnnnnnnnnnnnnnnnnnnnnnnnnnnnnnnnnnnnnnnnnnnnnnnnnnnnnnnnnnnnnnnnnnnnnnnnnnnnnnnnnnnnnnnnnnnnnnnnnnnnnnnnnnnnnnnnnnnnnnnnnnnnnnnnnnnnnnnnnnnnnnnnnnnnnnnnnnnnnnnnnnnnnnnnnnnnnnnnnnnnnnnnnnnnnnnnnnnnnnnnnnnnnnnnnnnnnnnnnnnnnnnnnnnnnnnnnnnnnnnnnnnnnnnnnnnnnnnnnnnnnnnnnnnnnnnnnnnnnnnnnnnnnnnnnnnnnnnnnnnnnnnnnnnnnnnnnnnnnnnnnnnnnnnnnnnnnnnnnnnnnnnnnnnnnnnnnnnnnnnnnnnnnnnnnnnnnnnnnnnnnnnnnnnnnnnnnnnnnnnnnnnnnnnnnnnnnnnnnnnnnnnnnnnnnnnnnnnnnnnnnnnnnnnnnnnnnnnnnnnnnnnnnnnnnnnnnnnnnnnnnnnnnnnnnnnnnnnnnnnnnnnnnnnnnnnnnnnnnnnnnnnnnnnnnnnnnnnnnnnnnnnnnnnnnnnnnnnnnnnnnnnnnnnnnnnnnnnnnnnnnnnnnnnnnnnnnnnnnnnnnnnnnnnnnnnnnnnnnnnnnnnnnnnnnnnnnnnnnnnnnnnnnnnnnnnnnnnnnnnnnnnnnnnnnnnnnnnnnnnnnnnnnnnnnnnnnnnnnnnnnnnnnnnnnnnnnnnnnnnnnnnnnnnnnnnnnnnnnnnnnnnnnnnnnnnnnnnnnnnnnnnnnnnnnnnnnnnnnnnnnnnnnnnnnnnnnnnnnnnnnnnnnnnnnnnnnnnnnnnnnnnnnnnnnnnnnnnnnnnnnnnnnnnnnnnnnnnnnnnnnnnnnnnnnnnnnnnnnnnnnnnnnnnnnnnnnnnnnnnnnnnnnnnnnnnnnnnnnnnnnnnnnnnnnnnnnnnnnnnnnnnnnnnnnnnnnnnnnnnnnnnnnnnnnnnnnnnnnnnnnnnnnnnnnnnnnnnnnnnnnnnnnnnnnnnnnnnnnnnnnnnnnnnnnnnnnnnnnnnnnnnnnnnnnnnnnnnnnnnnnnnnnnnnnnnnnnnnnnnnnnnnnnnnnnnnnnnnnnnnnnnnnnnnnnnnnnnnnnnnnnnnnnnnnnnnnnnnnnnnnnnnnnnnnnnnnnnnnnnnnnnnnnnnnnnnnnnnnnnnnnnnnnnnnnnnnnnnnnnnnnnnnnnnnnnnnnnnnnnnnnnnnnnnnnnnnnnnnnnnnnnnnnnnnnnnnnnnnnnnnnnnnnnnnnnnnnnnnnnnnnnnnnnnnnnnnnnnnnnnnnnnnnnnnnnnnnnnnnnnnnnnnnnnnnnnnnnnnnnnnnnnnnnnnnnnnnnnnnnnnnnnnnnnnnnnnnnnnnnnnnnnnnnnnnnnnnnnnnnnnnnnnnnnnnnnnnnnnnnnnnnnnnnnnnnnnnnnnnnnnnnnnnnnnnnnnnnnnnnnnnnnnnnnnnnnnnnnnnnnnnnnnnnnnnnnnnnnnnnnnnnnnnnnnnnnnnnnnnnnnnnnnnnnnnnnnnnnnnnnnnnnnnnnnnnnnnnnnnnnnnnnnnnnnnnnnnnnnnnnnnnnnnnnnnnnnnnnnnnnnnnnnnnnnnnnnnnnnnnnnnnnnnnnnnnnnnnnnnnnnnnnnnnnnnnnnnnnnnnnnnnnnnnnnnnnnnnnnnnnnnnnnnnnnnnnnnnnnnnnnnnnnnnnnnnnnnnnnnnnnnnnnnnnnnnnnnnnnnnnnnnnnnnnnnnnnnnnnnnnnnnnnnnnnnnnnnnnnnnnnnnnnnnnnnnnnnnnnnnnnnnnnnnnnnnnnnnnnnnnnnnnnnnnnnnnnnnnnnnnnnnnnnnnnnnnnnnnnnnnnnnnnnnnnnnnnnnnnnnnnnnnnnnnnnnnnnnnnnnnnnnnnnnnnnnnnnnnnnnnnnnnnnnnnnnnnnnnnnnnnnnnnnnnnnnnnnnnnnnnnnnnnnnnnnnnnnnnnnnnnnnnnnnnnnnnnnnnnnnnnnnnnnnnnnnnnnnnnnnnnnnnnnnnnnnnnnnnnnnnnnnnnnnnnnnnnnnnnnnnnnnnnnnnnnnnnnnnnnnnnnnnnnnnnnnnnnnnnnnnnnnnnnnnnnnnnnnnnnnnnnnnnnnnnnnnnnnnnnnnnnnnnnnnnnnnnnnnnnnnnnnnnnnnnnnnnnnnnnnnnnnnnnnnnnnnnnnnnnnnnnnnnnnnnnnnnnnnnnnnnnnnnnnnnnnnnnnnnnnnnnnnnnnnnnnnnnnnnnnnnnnnnnnnnnnnnnnnnnnnnnnnnnnnnnnnnnnnnnnnnnnnnnnnnnnnnnnnnnnnnnnnnnnnnnnnnnnnnnnnnnnnnnnnnnnnnnnnnnnnnnnnnnnnnnnnnnnnnnnnnnnnnnnnnnnnnnnnnnnnnnnnnnnnnnnnnnnnnnnnnnnnnnnnnnnnnnnnnnnnnnnnnnnnnnnnnnnnnnnnnnnnnnnnnnnnnnnnnnnnnnnnnnnnnnnnnnnnnnnnnnnnnnnnnnnnnnnnnnnnnnnnnnnnnnnnnnnnnnnnnnnnnnnnnnnnnnnnnnnnnnnnnnnnnnnnnnnnnnnnnnnnnnnnnnnnnnnnnnnnnnnnnnnnnnnnnnnnnnnnnnnnnnnnnnnnnnnnnnnnnnnnnnnnnnnnnnnnnnnnnnnnnnnnnnnnnnnnnnnnnnnnnnnnnnnnnnnnnnnnnnnnnnnnnnnnnnnnnnnnnnnnnnnnnnnnnnnnnnnnnnnnnnnnnnnnnnnnnnnnnnnnnnnnnnnnnnnnnnnnnnnnnnnnnnnnnnnnnnnnnnnnnnnnnnnnnnnnnnnnnnnnnnnnnnnnnnnnnnnnnnnnnnnnnnnnnnnnnnnnnnnnnnnnnnnnnnnnnnnnnnnnnnnnnnnnnnnnnnnnnnnnnnnnnnnnnnnnnnnnnnnnnnnnnnnnnnnnnnnnnnnnnnnnnnnnnnnnnnnnnnnnnnnnnnnnnnnnnnnnnnnnnnnnnnnnnnnnnnnnnnnnnnnnnnnnnnnnnnnnnnnnnnnnnnnnnnnnnnnnnnnnnnnnnnnnnnnnnnnnnnnnnnnnnnnnnnnnnnnnnnnnnnnnnnnnnnnnnnnnnnnnnnnnnnnnnnnnnnnnnnnnnnnnnnnnnnnnnnnnnnnnnnnnnnnnnnnnnnnnnnnnnnnnnnnnnnnnnnnnnnnnnnnnnnnnnnnnnnnnnnnnnnnnnnnnnnnnnnnnnnnnnnnnnnnnnnnnnnnnnnnnnnnnnnnnnnnnnnnnnnnnnnnnnnnnnnnnnnnnnnnnnnnnnnnnnnnnnnnnnnnnnnnnnnnnnnnnnnnnnnnnnnnnnnnnnnnnnnnnnnnnnnnnnnnnnnnnnnnnnnnnnnnnnnnnnnnnnnnnnnnnnnnnnnnnnnnnnnnnnnnnnnnnnnnnnnnnnnnnnnnnnnnnnnnnnnnnnnnnnnnnnnnnnnnnnnnnnnnnnnnnnnnnnnnnnnnnnnnnnnnnnnnnnnnnnnnnnnnnnnnnnnnnnnnnnnnnnnnnnnnnnnnnnnnnnnnnnnnnnnnnnnnnnnnnnnnnnnnnnnnnnnnnnnnnnnnnnnnnnnnnnnnnnnnnnnnnnnnnnnnnnnnnnnnnnnnnnnnnnnnnnnnnnnnnnnnnnnnnnnnnnnnnnnnnnnnnnnnnnnnnnnnnnnnnnnnnnnnnnnnnnnnnnnnnnnnnnnnnnnnnnnnnnnnnnnnnnnnnnnnnnnnnnnnnnnnnnnnnnnnnnnnnnnnnnnnnnnnnnnnnnnnnnnnnnnnnnnnnnnnnnnnnnnnnnnnnnnnnnnnnnnnnnnnnnnnnnnnnnnnnnnnnnnnnnnnnnnnnnnnnnnnnnnnnnnnnnnnnnnnnnnnnnnnnnnnnnnnnnnnnnnnnnnnnnnnnnnnnnnnnnnnnnnnnnnnnnnnnnnnnnnnnnnnnnnnnnnnnnnnnnnnnnnnnnnnnnnnnnnnnnnnnnnnnnnnnnnnnnnnnnnnnnnnnnnnnnnnnnnnnnnnnnnnnnnnnnnnnnnnnnnnnnnnnnnnnnnnnnnnnnnnnnnnnnnnnnnnnnnnnnnnnnnnnnnnnnnnnnnnnnnnnnnnnnnnnnnnnnnnnnnnnnnnnnnnnnnnnnnnnnnnnnnnnnnnnnnnnnnnnnnnnnnnnnnnnnnnnnnnnnnnnnnnnnnnnnnnnnnnnnnnnnnnnnnnnnnnnnnnnnnnnnnnnnnnnnnnnnnnnnnnnnnnnnnnnnnnnnnnnnnnnnnnnnnnnnnnnnnnnnnnnnnnnnnnnnnnnnnnnnnnnnnnnnnnnnnnnnnnnnnnnnnnnnnnnnnnnnnnnnnnnnnnnnnnnnnnnnnnnnnnnnnnnnnnnnnnnnnnnnnnnnnnnnnnnnnnnnnnnnnnnnnnnnnnnnnnnnnnnnnnnnnnnnnnnnnnnnnnnnnnnnnnnnnnnnnnnnnnnnnnnnnnnnnnnnnnnnnnnnnnnnnnnnnnnnnnnnnnnnnnnnnnnnnnnnnnnnnnnnnnnnnnnnnnnnnnnnnnnnnnnnnnnnnnnnnnnnnnnnnnnnnnnnnnnnnnnnnnnnnnnnnnnnnnnnnnnnnnnnnnnnnnnnnnnnnnnnnnnnnnnnnnnnnnnnnnnnnnnnnnnnnnnnnnnnnnnnnnnnnnnnnnnnnnnnnnnnnnnnnnnnnnnnnnnnnnnnnnnnnnnnnnnnnnnnnnnnnnnnnnnnnnnnnnnnnnnnnnnnnnnnnnnnnnnnnnnnnnnnnnnnnnnnnnnnnnnnnnnnnnnnnnnnnnnnnnnnnnnnnnnnnnnnnnnnnnnnnnnnnnnnnnnnnnnnnnnnnnnnnnnnnnnnnnnnnnnnnnnnnnnnnnnnnnnnnnnnnnnnnnnnnnnnnnnnnnnnnnnnnnnnnnnnnnnnnnnnnnnnnnnnnnnnnnnnnnnnnnnnnnnnnnnnnnnnnnnnnnnnnnnnnnnnnnnnnnnnnnnnnnnnnnnnnnnnnnnnnnnnnnnnnnnnnnnnnnnnnnnnnnnnnnnnnnnnnnnnnnnnnnnnnnnnnnnnnnnnnnnnnnnnnnnnnnnnnnnnnnnnnnnnnnnnnnnnnnnnnnnnnnnnnnnnnnnnnnnnnnnnnnnnnnnnnnnnnnnnnnnnnnnnnnnnnnnnnnnnnnnnnnnnnnnnnnnnnnnnnnnnnnnnnnnnnnnnnnnnnnnnnnnnnnnnnnnnnnnnnnnnnnnnnnnnnnnnnnnnnnnnnnnnnnnnnnnnnnnnnnnnnnnnnnnnnnnnnnnnnnnnnnnnnnnnnnnnnnnnnnnnnnnnnnnnnnnnnnnnnnnnnnnnnnnnnnnnnnnnnnnnnnnnnnnnnnnnnnnnnnnnnnnnnnnnnnnnnnnnnnnnnnnnnnnnnnnnnnnnnnnnnnnnnnnnnnnnnnnnnnnnnnnnnnnnnnnnnnnnnnnnnnnnnnnnnnnnnnnnnnnnnnnnnnnnnnnnnnnnnnnnnnnnnnnnnnnnnnnnnnnnnnnnnnnnnnnnnnnnnnnnnnnnnnnnnnnnnnnnnnnnnnnnnnnnnnnnnnnnnnnnnnnnnnnnnnnnnnnnnnnnnnnnnnnnnnnnnnnnnnnnnnnnnnnnnnnnnnnnnnnnnnnnnnnnnnnnnnnnnnnnnnnnnnnnnnnnnnnnnnnnnnnnnnnnnnnnnnnnnnnnnnnnnnnnnnnnnnnnnnnnnnnnnnnnnnnnnnnnnnnnnnnnnnnnnnnnnnnnnnnnnnnnnnnnnnnnnnnnnnnnnnnnnnnnnnnnnnnnnnnnnnnnnnnnnnnnnnnnnnnnnnnnnnnnnnnnnnnnnnnnnnnnnnnnnnnnnnnnnnnnnnnnnnnnnnnnnnnnnnnnnnnnnnnnnnnnnnnnnnnnnnnnnnnnnnnnnnnnnnnnnnnnnnnnnnnnnnnnnnnnnnnnnnnnnnnnnnnnnnnnnnnnnnnnnnnnnnnnnnnnnnnnnnnnnnnnnnnnnnnnnnnnnnnnnnnnnnnnnnnnnnnnnnnnnnnnnnnnnnnnnnnnnnnnnnnnnnnnnnnnnnnnnnnnnnnnnnnnnnnnnnnnnnnnnnnnnnnnnnnnnnnnnnnnnnnnnnnnnnnnnnnnnnnnnnnnnnnnnnnnnnnnnnnnnnnnnnnnnnnnnnnnnnnnnnnnnnnnnnnnnnnnnnnnnnnnnnnnnnnnnnnnnnnnnnnnnnnnnnnnnnnnnnnnnnnnnnnnnnnnnnnnnnnnnnnnnnnnnnnnnnnnnnnnnnnnnnnnnnnnnnnnnnnnnnnnnnnnnnnnnnnnnnnnnnnnnnnnnnnnnnnnnnnnnnnnnnnnnnnnnnnnnnnnnnnnnnnnnnnnnnnnnnnnnnnnnnnnnnnnnnnnnnnnnnnnnnnnnnnnnnnnnnnnnnnnnnnnnnnnnnnnnnnnnnnnnnnnnnnnnnnnnnnnnnnnnnnnnnnnnnnnnnnnnnnnnnnnnnnnnnnnnnnnnnnnnnnnnnnnnnnnnnnnnnnnnnnnnnnnnnnnnnnnnnnnnnnnnnnnnnnnnnnnnnnnnnnnnnnnnnnnnnnnnnnnnnnnnnnnnnnnnnnnnnnnnnnnnnnnnnnnnnnnnnnnnnnnnnnnnnnnnnnnnnnnnnnnnnnnnnnnnnnnnnnnnnnnnnnnnnnnnnnnnnnnnnnnnnnnnnnnnnnnnnnnnnnnnnnnnnnnnnnnnnnnnnnnnnnnnnnnnnnnnnnnnnnnnnnnnnnnnnnnnnnnnnnnnnnnnnnnnnnnnnnnnnnnnnnnnnnnnnnnnnnnnnnnnnnnnnnnnnnnnnnnnnnnnnnnnnnnnnnnnnnnnnnnnnnnnnnnnnnnnnnnnnnnnnnnnnnnnnnnnnnnnnnnnnnnnnnnnnnnnnnnnnnnnnnnnnnnnnnnnnnnnnnnnnnnnnnnnnnnnnnnnnnnnnnnnnnnnnnnnnnnnnnnnnnnnnnnnnnnnnnnnnnnnnnnnnnnnnnnnnnnnnnnnnnnnnnnnnnnnnnnnnnnnnnnnnnnnnnnnnnnnnnnnnnnnnnnnnnnnnnnnnnnnnnnnnnnnnnnnnnnnnnnnnnnnnnnnnnnnnnnnnnnnnnnnnnnnnnnnnnnnnnnnnnnnnnnnnnnnnnnnnnnnnnnnnnnnnnnnnnnnnnnnnnnnnnnnnnnnnnnnnnnnnnnnnnnnnnnnnnnnnnnnnnnnnnnnnnnnnnnnnnnnnnnnnnnnnnnnnnnnnnnnnnnnnnnnnnnnnnnnnnnnnnnnnnnnnnnnnnnnnnnnnnnnnnnnnnnnnnnnnnnnnnnnnnnnnnnnnnnnnnnnnnnnnnnnnnnnnnnnnnnnnnnnnnnnnnnnnnnnnnnnnnnnnnnnnnnnnnnnnnnnnnnnnnnnnnnnnnnnnnnnnnnnnnnnnnnnnnnnnnnnnnnnnnnnnnnnnnnnnnnnnnnnnnnnnnnnnnnnnnnnnnnnnnnnnnnnnnnnnnnnnnnnnnnnnnnnnnnnnnnnnnnnnnnnnnnnnnnnnnnnnnnnnnnnnnnnnnnnnnnnnnnnnnnnnnnnnnnnnnnnnnnnnnnnnnnnnnnnnnnnnnnnnnnnnnnnnnnnnnnnnnnnnnnnnnnnnnnnnnnnnnnnnnnnnnnnnnnnnnnnnnnnnnnnnnnnnnnnnnnnnnnnnnnnnnnnnnnnnnnnnnnnnnnnnnnnnnnnnnnnnnnnnnnnnnnnnnnnnnnnnnnnnnnnnnnnnnnnnnnnnnnnnnnnnnnnnnnnnnnnnnnnnnnnnnnnnnnnnnnnnnnnnnnnnnnnnnnnnnnnnnnnnnnnnnnnnnnnnnnnnnnnnnnnnnnnnnnnnnnnnnnnnnnnnnnnnnnnnnnnnnnnnnnnnnnnnnnnnnnnnnnnnnnnnnnnnnnnnnnnnnnnnnnnnnnnnnnnnnnnnnnnnnnnnnnnnnnnnnnnnnnnnnnnnnnnnnnnnnnnnnnnnnnnnnnnnnnnnnnnnnnnnnnnnnnnnnnnnnnnnnnnnnnnnnnnnnnnnnnnnnnnnnnnnnnnnnnnnnnnnnnnnnnnnnnnnnnnnnnnnnnnnnnnnnnnnnnnnnnnnnnnnnnnnnnnnnnnnnnnnnnnnnnnnnnnnnnnnnnnnnnnnnnnnnnnnnnnnnnnnnnnnnnnnnnnnnnnnnnnnnnnnnnnnnnnnnnnnnnnnnnnnnnnnnnnnnnnnnnnnnnnnnnnnnnnnnnnnnnnnnnnnnnnnnnnnnnnnnnnnnnnnnnnnnnnnnnnnnnnnnnnnnnnnnnnnnnnnnnnnnnnnnnnnnnnnnnnnnnnnnnnnnnnnnnnnnnnnnnnnnnnnnnnnnnnnnnnnnnnnnnnnnnnnnnnnnnnnnnnnnnnnnnnnnnnnnnnnnnnnnnnnnnnnnnnnnnnnnnnnnnnnnnnnnnnnnnnnnnnnnnnnnnnnnnnnnnnnnnnnnnnnnnnnnnnnnnnnnnnnnnnnnnnnnnnnnnnnnnnnnnnnnnnnnnnnnnnnnnnnnnnnnnnnnnnnnnnnnnnnnnnnnnnnnnnnnnnnnnnnnnnnnnnnnnnnnnnnnnnnnnnnnnnnnnnnnnnnnnnnnnnnnnnnnnnnnnnnnnnnnnnnnnnnnnnnnnnnnnnnnnnnnnnnnnnnnnnnnnnnnnnnnnnnnnnnnnnnnnnnnnnnnnnnnnnnnnnnnnnnnnnnnnnnnnnnnnnnnnnnnnnnnnnnnnnnnnnnnnnnnnnnnnnnnnnnnnnnnnnnnnnnnnnnnnnnnnnnnnnnnnnnnnnnnnnnnnnnnnnnnnnnnnnnnnnnnnnnnnnnnnnnnnnnnnnnnnnnnnnnnnnnnnnnnnnnnnnnnnnnnnnnnnnnnnnnnnnnnnnnnnnnnnnnnnnnnnnnnnnnnnnnnnnnnnnnnnnnnnnnnnnnnnnnnnnnnnnnnnnnnnnnnnnnnnnnnnnnnnnnnnnnnnnnnnnnnnnnnnnnnnnnnnnnnnnnnnnnnnnnnnnnnnnnnnnnnnnnnnnnnnnnnnnnnnnnnnnnnnnnnnnnnnnnnnnnnnnnnnnnnnnnnnnnnnnnnnnnnnnnnnnnnnnnnnnnnnnnnnnnnnnnnnnnnnnnnnnnnnnnnnnnnnnnnnnnnnnnnnnnnnnnnnnnnnnnnnnnnnnnnnnnnnnnnnnnnnnnnnnnnnnnnnnnnnnnnnnnnnnnnnnnnnnnnnnnnnnnnnnnnnnnnnnnnnnnnnnnnnnnnnnnnnnnnnnnnnnnnnnnnnnnnnnnnnnnnnnnnnnnnnnnnnnnnnnnnnnnnnnnnnnnnnnnnnnnnnnnnnnnnnnnnnnnnnnnnnnnnnnnnnnnnnnnnnnnnnnnnnnnnnnnnnnnnnnnnnnnnnnnnnnnnnnnnnnnnnnnnnnnnnnnnnnnnnnnnnnnnnnnnnnnnnnnnnnnnnnnnnnnnnnnnnnnnnnnnnnnnnnnnnnnnnnnnnnnnnnnnnnnnnnnnnnnnnnnnnnnnnnnnnnnnnnnnnnnnnnnnnnnnnnnnnnnnnnnnnnnnnnnnnnnnnnnnnnnnnnnnnnnnnnnnnnnnnnnnnnnnnnnnnnnnnnnnnnnnnnnnnnnnnnnnnnnnnnnnnnnnnnnnnnnnnnnnnnnnnnnnnnnnnnnnnnnnnnnnnnnnnnnnnnnnnnnnnnnnnnnnnnnnnnnnnnnnnnnnnnnnnnnnnnnnnnnnnnnnnnnnnnnnnnnnnnnnnnnnnnnnnnnnnnnnnnnnnnnnnnnnnnnnnnnnnnnnnnnnnnnnnnnnnnnnnnnnnnnnnnnnnnnnnnnnnnnnnnnnnnnnnnnnnnnnnnnnnnnnnnnnnnnnnnnnnnnnnnnnnnnnnnnnnnnnnnnnnnnnnnnnnnnnnnnnnnnnnnnnnnnnnnnnnnnnnnnnnnnnnnnnnnnnnnnnnnnnnnnnnnnnnnnnnnnnnnnnnnnnnnnnnnnnnnnnnnnnnnnnnnnnnnnnnnnnnnnnnnnnnnnnnnnnnnnnnnnnnnnnnnnnnnnnnnnnnnnnnnnnnnnnnnnnnnnnnnnnnnnnnnnnnnnnnnnnnnnnnnnnnnnnnnnnnnnnnnnnnnnnnnnnnnnnnnnnnnnnnnnnnnnnnnnnnnnnnnnnnnnnnnnnnnnnnnnnnnnnnnnnnnnnnnnnnnnnnnnnnnnnnnnnnnnnnnnnnnnnnnnnnnnnnnnnnnnnnnnnnnnnnnnnnnnnnnnnnnnnnnnnnnnnnnnnnnnnnnnnnnnnnnnnnnnnnnnnnnnnnnnnnnnnnnnnnnnnnnnnnnnnnnnnnnnnnnnnnnnnnnnnnnnnnnnnnnnnnnnnnnnnnnnnnnnnnnnnnnnnnnnnnnnnnnnnnnnnnnnnnnnnnnnnnnnnnnnnnnnnnnnnnnnnnnnnnnnnnnnnnnnnnnnnnnnnnnnnnnnnnnnnnnnnnnnnnnnnnnnnnnnnnnnnnnnnnnnnnnnnnnnnnnnnnnnnnnnnnnnnnnnnnnnnnnnnnnnnnnnnnnnnnnnnnnnnnnnnnnnnnnnnnnnnnnnnnnnnnnnnnnnnnnnnnnnnnnnnnnnnnnnnnnnnnnnnnnnnnnnnnnnnnnnnnnnnnnnnnnnnnnnnnnnnnnnnnnnnnnnnnnnnnnnnnnnnnnnnnnnnnnnnnnnnnnnnnnnnnnnnnnnnnnnnnnnnnnnnnnnnnnnnnnnnnnnnnnnnnnnnnnnnnnnnnnnnnnnnnnnnnnnnnnnnnnnnnnnnnnnnnnnnnnnnnnnnnnnnnnnnnnnnnnnnnnnnnnnnnnnnnnnnnnnnnnnnnnnnnnnnnnnnnnnnnnnnnnnnnnnnnnnnnnnnnnnnnnnnnnnnnnnnnnnnnnnnnnnnnnnnnnnnnnnnnnnnnnnnnnnnnnnnnnnnnnnnnnnnnnnnnnnnnnnnnnnnnnnnnnnnnnnnnnnnnnnnnnnnnnnnnnnnnnnnnnnnnnnnnnnnnnnnnnnnnnnnnnnnnnnnnnnnnnnnnnnnnnnnnnnnnnnnnnnnnnnnnnnnnnnnnnnnnnnnnnnnnnnnnnnnnnnnnnnnnnnnnnnnnnnnnnnnnnnnnnnnnnnnnnnnnnnnnnnnnnnnnnnnnnnnnnnnnnnnnnnnnnnnnnnnnnnnnnnnnnnnnnnnnnnnnnnnnnnnnnnnnnnnnnnnnnnnnnnnnnnnnnnnnnnnnnnnnnnnnnnnnnnnnnnnnnnnnnnnnnnnnnnnnnnnnnnnnnnnnnnnnnnnnnnnnnnnnnnnnnnnnnnnnnnnnnnnnnnnnnnnnnnnnnnnnnnnnnnnnnnnnnnnnnnnnnnnnnnnnnnnnnnnnnnnnnnnnnnnnnnnnnnnnnnnnnnnnnnnnnnnnnnnnnnnnnnnnnnnnnnnnnnnnnnnnnnnnnnnnnnnnnnnnnnnnnnnnnnnnnnnnnnnnnnnnnnnnnnnnnnnnnnnnnnnnnnnnnnnnnnnnnnnnnnnnnnnnnnnnnnnnnnnnnnnnnnnnnnnnnnnnnnnnnnnnnnnnnnnnnnnnnnnnnnnnnnnnnnnnnnnnnnnnnnnnnnnnnnnnnnnnnnnnnnnnnnnnnnnnnnnnnnnnnnnnnnnnnnnnnnnnnnnnnnnnnnnnnnnnnnnnnnnnnnnnnnnnnnnnnnnnnnnnnnnnnnnnnnnnnnnnnnnnnnnnnnnnnnnnnnnnnnnnnnnnnnnnnnnnnnnnnnnnnnnnnnnnnnnnnnnnnnnnnnnnnnnnnnnnnnnnnnnnnnnnnnnnnnnnnnnnnnnnnnnnnnnnnnnnnnnnnnnnnnnnnnnnnnnnnnnnnnnnnnnnnnnnnnnnnnnnnnnnnnnnnnnnnnnnnnnnnnnnnnnnnnnnnnnnnnnnnnnnnnnnnnnnnnnnnnnnnnnnnnnnnnnnnnnnnnnnnnnnnnnnnnnnnnnnnnnnnnnnnnnnnnnnnnnnnnnnnnnnnnnnnnnnnnnnnnnnnnnnnnnnnnnnnnnnnnnnnnnnnnnnnnnnnnnnnnnnnnnnnnnnnnnnnnnnnnnnnnnnnnnnnnnnnnnnnnnnnnnnnnnnnnnnnnnnnnnnnnnnnnnnnnnnnnnnnnnnnnnnnnnnnnnnnnnnnnnnnnnnnnnnnnnnnnnnnnnnnnnnnnnnnnnnnnnnnnnnnnnnnnnnnnnnnnnnnnnnnnnnnnnnnnnnnnnnnnnnnnnnnnnnnnnnnnnnnnnnnnnnnnnnnnnnnnnnnnnnnnnnnnnnnnnnnnnnnnnnnnnnnnnnnnnnnnnnnnnnnnnnnnnnnnnnnnnnnnnnnnnnnnnnnnnnnnnnnnnnnnnnnnnnnnnnnnnnnnnnnnnnnnnnnnnnnnnnnnnnnnnnnnnnnnnnnnnnnnnnnnnnnnnnnnnnnnnnnnnnnnnnnnnnnnnnnnnnnnnnnnnnnnnnnnnnnnnnnnnnnnnnnnnnnnnnnnnnnnnnnnnnnnnnnnnnnnnnnnnnnnnnnnnnnnnnnnnnnnnnnnnnnnnnnnnnnnnnnnnnnnnnnnnnnnnnnnnnnnnnnnnnnnnnnnnnnnnnnnnnnnnnnnnnnnnnnnnnnnnnnnnnnnnnnnnnnnnnnnnnnnnnnnnnnnnnnnnnnnnnnnnnnnnnnnnnnnnnnnnnnnnnnnnnnnnnnnnnnnnnnnnnnnnnnnnnnnnnnnnnnnnnnnnnnnnnnnnnnnnnnnnnnnnnnnnnnnnnnnnnnnnnnnnnnnnnnnnnnnnnnnnnnnnnnnnnnnnnnnnnnnnnnnnnnnnnnnnnnnnnnnnnnnnnnnnnnnnnnnnnnnnnnnnnnnnnnnnnnnnnnnnnnnnnnnnnnnnnnnnnnnnnnnnnnnnnnnnnnnnnnnnnnnnnnnnnnnnnnnnnnnnnnnnnnnnnnnnnnnnnnnnnnnnnnnnnnnnnnnnnnnnnnnnnnnnnnnnnnnnnnnnnnnnnnnnnnnnnnnnnnnnnnnnnnnnnnnnnnnnncatatagtagatgcaagaatcgttccgaatctgccacaataactgcggattcctttcccaaagcctttttcgcccacggacaggccgtttgccccttcccactaacatcccgtaaacctccccttaaattcccgcccggccaatgggaactcagcgggaagtattttagatgtgtatgggatggggcaaatggggcttctattgatagtgggtatcaaaatgggaggaagtccacaaattgcgcgaattcatacgaattgcttttccagttacgctaccaactgtggtagataacctaaaataaaggacttacttcccaatcgggcaagtaatccatatgtttggagcccgaaggtcccagaacgattggccgacggggacatcgaccttcctgacgctggcgtcgagcgaggcacgagcatggacgccagcaacatctcctgtagtccatactcgcaagctcgctgcactccaggctcaccaacgttggaaggcaaattcacaaattcacaaccggtaaatatggcttgtgaatttgcaacctgctgatagacgggtaattatgaggctaattcacaaaaaaggggtctcttatacatccgcggaagccgattgtaaacaggatatgatgtatccacgctaccagtctataatacatatagaaatagtatatataatatataatagtattatatattattatatattgatattatatcatctctaccttcccttcatctcttgtttgcggcatgagccactgcaaaccggcattctcccctggtccggctggatataagagataagcgtattttgtgaatttgtcccccaactcactgtgccacaataacacacggattcacaagccatatttaccggttgtgaatttgtgaatctgaccttgccggccttaaggaagtttgaaattagagccctattttggacttgacaaattattccttggtaaatttggtgtataatagctatggggcataatgatgttagcctgtggaacggcctctgtaaaggatcaacaagctatcaaccctccccatgcgacaggagcttcaatgtattataatttgacagacaaaccctggatcagtgtgctacagcttgacgggcattctgccaggctcggcctggctgaggtcctgcgaaaagcacacacactgcgtttggcttacggcaatccgatggaccgcatgtccgttttccgtttcctcctcgccctgggctattggtgttttgccaatacaaaacaagcgccggtatcagataagccactgcctcaggcatggacggactggcttgaacaaaaccaagaatatttcgaattgttcggtgatggccccagattctaccaatccccaggaacatccagaatacgccccagcacggaccttatccacgagcttcccacggcaaacaatttctggcacttccgccatgtgaccgatttcatcgatggcatttgcccagcttgctgcgttaccggtctgctgcgcctgccactctttaccaccgtaggcggcagcggaatcggagccggcatcaacagaactcctcccttctatgccatctggcagggtgatagtctgtcggaatcgatattcctgaattgggaacccacttcccggttgggtgttcctgcctggctgaacccgtttggatcccaaaacgagaaggatgtagccttgctgactggcctcacctggctgccccgcaaggtattcctgcttggcccggtgtcagacggagcaaaatgcagcgcctgcggagaagagcatgagcctctggtctatgcctgcaacaatgaggcggtgaaagtgcctccgaaccttgtctggaacgaccctcacgcgatttaccgggatgacaataatggcctgactgcccaggtggctctgatgtccggggacaaatacactttcgctaacagggattggcataaacccctggtcggcttcttacgggcgaaaggcatgtctcggaccgccacgctgtttttagtgggcttcacaagcgttcaagccaaatgtgtggacgtttgggaaaagaccattgccctatccggaaaaacaagctccgaggaactgctggaccagatatccgaaagagcctactccctgcacaggatgaggaaacaagaccgccggggcgattacaaggaatccgtgggaatcaccgccgtggcggacatcatcccgcacgtagagcatcgggttgacgtccattcgggcgagatggtggaaaacagcggcaatgtctggcaggaagcggatgaagattacggattcttcatgaagcgttttgccgtttctctagtgccggaaattacggttgccgccaagcttgaacgagaacaactggctcggcgcaagccctggcccctaaaaccaaaatcaattaaaaaaccttcatccggaggcgataatgaatgagagcaccgtgaaatttgttcggagcctgggcgaactcaaagagggcgacctgggcttgctcagaaagctcaggggtcgccgtctggatgaatccctgccgggtttcgacctgttttccggcctgtggtggccactccgcagtataagccccaaaacccccaggcggaaggtggtctggctagtcaccaagcttttcgcggaattccgctttgagcaaaagaaaggcgccagcctgccttggctcatgggcagaatatgccgtggacttaaagaagaaaaagagttcccacgtgttttagccaggttcgaccgcttgctcacgctcgagttgaaccaactggaggaaccgctggcgcaagtgctcgcgattttaaaaagacatgacattgccagtctggactgggttgccctcatcgatgacctctccgcttgggaacgggaatcaaacagagcgatatggtcagacacatttatttcagcatttaataatcagcaaggaggaatcaaatgttgattgaaatacacatgatccaaaaccacagcccggccaacctgaaccgggacgacctgggcgcgcccaagacctgttatttcggtggggtgttgcggtcccgcatctccagccagtgcctaaagcggagcatcaggatgagcgatgaattcaaaaacttgctcgggggtatccgtacccgtcggttggccgagttgattacaaaagctacaggacaggactgcaggaatcaggcagaggaagttctgaacaaagccggtttgaaacacgaaaacggacatagtaagatgctggtgttcatgacccggaacaagatcgatgcccttgctcaaattgtcaccagcgaaggcctgagtgttgcagagaaagccaagaaagcggcagatgtaatatcgggggcaatacattcccctgacatcgctctgtgcggaagaatgctcgagcccgataccaaggacaagaacacagacaaggtcaagtgggaaaataccactgttgaagcagccctgcaggtgtcgcacgccatttcaacccacatcgcccgcccagaaatagattactatgtagcagctgatgacgagcctggcgacgacacaggtgctggattcatagacgaggcgatgtttgcttcggcctgtttctacaaatattactcaattgattggaataccttgataatcaacctccagggtaatgaaaagttggcagctcatactgtcggagcctttatccaggccgctgcactcactaatcccagcggaaagcagaacagctttgccgcacataaccttcccgatggaatattggtagaaataaaagagacacctgtcagctatgcaaatgcctttgtgcgaccggtgggaatcgttaaggattctgacttggtagaacaaagcattggccaactggccaactatgtgaaggatataagtgccggtttcttccctggacagatgaaaggcaacgctctgtggttctcgcccaatggacgttatcccctaaagcctcaacagggcacgctggacataaagccagtttgcaacctgctagaacttgttcgcgaagcagttgagatgttgggttttgaatgggatgatgtaaaaaacgagaaagtagagagttgaaatgtcttctccgcctaataccctgttcctgagattggaggctccccttcaggcctggggaagcaatgaggccaaattcgccgtgcgcaggacagccgacgcgcccaccaaatccggagtggcaggcctgctctgcgctgccctgggaatcagccgggccgaagccggacagtattggctgggtgaaattgccaaattgcgcatgggggtgcggatagaccgcccgggcatccgctggtgggattaccatactgtgggagcggagcagaagctgcgcatttctgacctgaaaatgcccaacggcctagttctggttggcactgccctggccaaaaacctgggcgcggacaagatcaaatccaaacccggggctttgctctcccgacgcgagtatttggctgatgccagcttcctggttgcgctccagggtgaaccggatatcgtggcacaactggctgaagcgctgaaaaaaccagtctggacgctttatctggggcgaaaatcctgtcccccctcccgtccggtggatgaacacccgccagggttttatgccagtctgaaagaggctttgcggtcgatcccggcgcaactgagggaaaaaggcgaaccgatacctgacagtgttccctgtgtgctcgactgggttccggcccatgatgacgtgcacgctccgccgaacgccgaagcgcattacgacgtgccggtgtcctttgagcctccccaccacttgccccggctggtgatccgctgtaacctgccattggaccgcaacttcgaggcagagaccgtgctttccggcaaagcctggcaaccgccccgcaaccgggcaaattacgacaatcctgaatacaaaagggtccgcgctgagcgtttggtgatggacaatgccgcctgcatgttctgcaaggcacccgccactactgtgcagcacgtgaattaccgacgcgccggaggcagcgagaagccggaggacttgcgcgccctctgccgcctctgccacgatgcctgcaccatgctggaatatggcagcggcatgaccatggaccgcatagatccctgtgaccccgcctggcgtgagcgcatcttggccaaacgcgaggaaataatcaaattccgctcgctggagcagcgcaggcgcaaactcgatccgaaggaggagaacggatgatgtatctatcccaactgctcatcgacacaggcggcaaccctgaccggccaaggcccgggcgcttgtggctgaacaatatctataatgtccaccggcggctcagcatggctttccccatgcgcaagcgcaaggaaggagacccgaggtttctgcagccctttgaccccgcagattttgaaaagcgccagttcctctttcgggtggacaacaacaccgatggagaaaatcaaagggcgatggttttggtgcagtcgtccctgccgccggattgggactgggctttccagaatgccacgggatttttggcagcccctccccaggttaaggaatacgatccccagttctcagcaggtcagcggctgcgcttccgcatcctcgtgaatgccagtgtcaaacgcaaaatcgacgagttgcgggaaggacccggaggaaaggaaaaaacgggaagggttctgcacaaacgggtcgcccttacctgggacacaaattccaacccaaaggatgcggtggcgcaatggtttgccgccaaggctggcagactgggcttcacgcccggggagaccgaactggtaagcctgggctgggtatacggttccaaaccggagccccggggaaattcgccccggcgtgagaacgaataccgtcccctgagataccgttccgccctgctggaaggttatctgacagtggatgatgcctttctgttccgggaagccttggaaaaaggtatcggcagcgccaaaggaatgggcttcggcctcctttccgtggttccggcaagtgatgcgtaacagagaccttcacctaatgccaaaaatgcgggaccgcttcacctatctctatgtggagcatgccaaaatagacaaagaacaacaggcaatcgcctttcacgatgccatgggctccactcctgttccctgcgctggactggccctgctgatgctggggccaggcgtatccatcacccatgcggccatccttgttttagcagaatgcggctgtttggtggcttgggtgggggaacagggagtccgcttttactcatccgggacagggaccacccgtagttccgccaaccttatgcgtcaggctgccgcctggtcaaatcgagatacgcatctgcggatagttcgcagaatgtatgaattgaggttcaaggaaaaactggacccaaccctctctcttgaacagataaggggaaaagagggagcgagagtacgggatacctatttcagactttcaaaagaattcgatgtgcccatgagtgcgaggaattacgacaggagcaactggaataaaaccgaccccatcaacagagccctgtccgttgccaattcctgtctctatggcatctgccacgccgcgatagtggccgctggctattcacctgccctgggtttcgttcatactggcaaacaactgtcatttgtttatgacattgccgatctttataaaatggaaacctccgtgcccgcggctttcatagccacagccgcaggggtcgataacctggacagaaggacacgcattgcctgccgtgaccagttctatcaatttggtctgctaaagaagatagtggccgacattcacgcccttttcggtattctggaaacttcggacgatgagccagaccttgctgatgtcgatccagccgtgccaggcgggctttggaacccagatgataaagtgagccccggcggcttgtcatggggtctggatgatcctggaggccatgatgatggttctggtgcttgaaaaagttccctctggcctgagaggagaaattacacgctggctcctcgaaatcaaggctggagtatttgtcggtcaggtatcggccatgataagggaaaagctgtgggacaaggccaggtctggttgtgccggtggaacttgtatcatgatttacagcaagcattgcgaacaaggctttggaattgagttttggggtgccgcggaaaggatagtgacagaatgggaaggattgaaattgatgaccaagcatccgtgatccatacttgaagcctgttcaatggcctcaaagcgtctactttcgaagtgtgttccccacctgcgtgggggtgaaccgcggattcgccaagcttgtccctaccgtgatgcgtgttccccacctgcgtgggggtgaaccgaagagcggttttgggcgtataacggcccgcttgtgttccccacctgcgtgggggtgaaccgcctctgggccttagctccgcacaggacaagcagtgttccccacctgcgtgggggtgaaccgctgagaccgctcgctccctgtccgtcattgacgtgttccccacctgcgtgggggtgaaccgtggggtgggggcggttgcccgccccgttccccgtgttccccacctgcgtgggggtgaaccggcaaccaaccgcataggcatagcgaaatcaaggtgttccccacctgcgtgggggtgaaccggacatctggaaagattgggtggcaatggcgatgtgttccccacctgcgtgggggtgaaccggtattcttgcccatcatggaaatgccgtgtccgtgttccccacctgcgtgggggtgaaccggtagctcaactacaagcggcgagccgaacctagtgt

SEQ ID NO: 1098 - DNA, 103228 bp, Artificial Sequence
  Synthetic Oligonucleotide
  misc_feature (1)..(95442): n is a, c, g, or t
nnnnnnnnnnnnnnnnnnnnnnnnnnnnnnnnnnnnnnnnnnnnnnnnnnnnnnnnnnnnnnnnnnnnnnnnnnnnnnnnnnnnnnnnnnnnnnnnnnnnnnnnnnnnnnnnnnnnnnnnnnnnnnnnnnnnnnnnnnnnnnnnnnnnnnnnnnnnnnnnnnnnnnnnnnnnnnnnnnnnnnnnnnnnnnnnnnnnnnnnnnnnnnnnnnnnnnnnnnnnnnnnnnnnnnnnnnnnnnnnnnnnnnnnnnnnnnnnnnnnnnnnnnnnnnnnnnnnnnnnnnnnnnnnnnnnnnnnnnnnnnnnnnnnnnnnnnnnnnnnnnnnnnnnnnnnnnnnnnnnnnnnnnnnnnnnnnnnnnnnnnnnnnnnnnnnnnnnnnnnnnnnnnnnnnnnnnnnnnnnnnnnnnnnnnnnnnnnnnnnnnnnnnnnnnnnnnnnnnnnnnnnnnnnnnnnnnnnnnnnnnnnnnnnnnnnnnnnnnnnnnnnnnnnnnnnnnnnnnnnnnnnnnnnnnnnnnnnnnnnnnnnnnnnnnnnnnnnnnnnnnnnnnnnnnnnnnnnnnnnnnnnnnnnnnnnnnnnnnnnnnnnnnnnnnnnnnnnnnnnnnnnnnnnnnnnnnnnnnnnnnnnnnnnnnnnnnnnnnnnnnnnnnnnnnnnnnnnnnnnnnnnnnnnnnnnnnnnnnnnnnnnnnnnnnnnnnnnnnnnnnnnnnnnnnnnnnnnnnnnnnnnnnnnnnnnnnnnnnnnnnnnnnnnnnnnnnnnnnnnnnnnnnnnnnnnnnnnnnnnnnnnnnnnnnnnnnnnnnnnnnnnnnnnnnnnnnnnnnnnnnnnnnnnnnnnnnnnnnnnnnnnnnnnnnnnnnnnnnnnnnnnnnnnnnnnnnnnnnnnnnnnnnnnnnnnnnnnnnnnnnnnnnnnnnnnnnnnnnnnnnnnnnnnnnnnnnnnnnnnnnnnnnnnnnnnnnnnnnnnnnnnnnnnnnnnnnnnnnnnnnnnnnnnnnnnnnnnnnnnnnnnnnnnnnnnnnnnnnnnnnnnnnnnnnnnnnnnnnnnnnnnnnnnnnnnnnnnnnnnnnnnnnnnnnnnnnnnnnnnnnnnnnnnnnnnnnnnnnnnnnnnnnnnnnnnnnnnnnnnnnnnnnnnnnnnnnnnnnnnnnnnnnnnnnnnnnnnnnnnnnnnnnnnnnnnnnnnnnnnnnnnnnnnnnnnnnnnnnnnnnnnnnnnnnnnnnnnnnnnnnnnnnnnnnnnnnnnnnnnnnnnnnnnnnnnnnnnnnnnnnnnnnnnnnnnnnnnnnnnnnnnnnnnnnnnnnnnnnnnnnnnnnnnnnnnnnnnnnnnnnnnnnnnnnnnnnnnnnnnnnnnnnnnnnnnnnnnnnnnnnnnnnnnnnnnnnnnnnnnnnnnnnnnnnnnnnnnnnnnnnnnnnnnnnnnnnnnnnnnnnnnnnnnnnnnnnnnnnnnnnnnnnnnnnnnnnnnnnnnnnnnnnnnnnnnnnnnnnnnnnnnnnnnnnnnnnnnnnnnnnnnnnnnnnnnnnnnnnnnnnnnnnnnnnnnnnnnnnnnnnnnnnnnnnnnnnnnnnnnnnnnnnnnnnnnnnnnnnnnnnnnnnnnnnnnnnnnnnnnnnnnnnnnnnnnnnnnnnnnnnnnnnnnnnnnnnnnnnnnnnnnnnnnnnnnnnnnnnnnnnnnnnnnnnnnnnnnnnnnnnnnnnnnnnnnnnnnnnnnnnnnnnnnnnnnnnnnnnnnnnnnnnnnnnnnnnnnnnnnnnnnnnnnnnnnnnnnnnnnnnnnnnnnnnnnnnnnnnnnnnnnnnnnnnnnnnnnnnnnnnnnnnnnnnnnnnnnnnnnnnnnnnnnnnnnnnnnnnnnnnnnnnnnnnnnnnnnnnnnnnnnnnnnnnnnnnnnnnnnnnnnnnnnnnnnnnnnnnnnnnnnnnnnnnnnnnnnnnnnnnnnnnnnnnnnnnnnnnnnnnnnnnnnnnnnnnnnnnnnnnnnnnnnnnnnnnnnnnnnnnnnnnnnnnnnnnnnnnnnnnnnnnnnnnnnnnnnnnnnnnnnnnnnnnnnnnnnnnnnnnnnnnnnnnnnnnnnnnnnnnnnnnnnnnnnnnnnnnnnnnnnnnnnnnnnnnnnnnnnnnnnnnnnnnnnnnnnnnnnnnnnnnnnnnnnnnnnnnnnnnnnnnnnnnnnnnnnnnnnnnnnnnnnnnnnnnnnnnnnnnnnnnnnnnnnnnnnnnnnnnnnnnnnnnnnnnnnnnnnnnnnnnnnnnnnnnnnnnnnnnnnnnnnnnnnnnnnnnnnnnnnnnnnnnnnnnnnnnnnnnnnnnnnnnnnnnnnnnnnnnnnnnnnnnnnnnnnnnnnnnnnnnnnnnnnnnnnnnnnnnnnnnnnnnnnnnnnnnnnnnnnnnnnnnnnnnnnnnnnnnnnnnnnnnnnnnnnnnnnnnnnnnnnnnnnnnnnnnnnnnnnnnnnnnnnnnnnnnnnnnnnnnnnnnnnnnnnnnnnnnnnnnnnnnnnnnnnnnnnnnnnnnnnnnnnnnnnnnnnnnnnnnnnnnnnnnnnnnnnnnnnnnnnnnnnnnnnnnnnnnnnnnnnnnnnnnnnnnnnnnnnnnnnnnnnnnnnnnnnnnnnnnnnnnnnnnnnnnnnnnnnnnnnnnnnnnnnnnnnnnnnnnnnnnnnnnnnnnnnnnnnnnnnnnnnnnnnnnnnnnnnnnnnnnnnnnnnnnnnnnnnnnnnnnnnnnnnnnnnnnnnnnnnnnnnnnnnnnnnnnnnnnnnnnnnnnnnnnnnnnnnnnnnnnnnnnnnnnnnnnnnnnnnnnnnnnnnnnnnnnnnnnnnnnnnnnnnnnnnnnnnnnnnnnnnnnnnnnnnnnnnnnnnnnnnnnnnnnnnnnnnnnnnnnnnnnnnnnnnnnnnnnnnnnnnnnnnnnnnnnnnnnnnnnnnnnnnnnnnnnnnnnnnnnnnnnnnnnnnnnnnnnnnnnnnnnnnnnnnnnnnnnnnnnnnnnnnnnnnnnnnnnnnnnnnnnnnnnnnnnnnnnnnnnnnnnnnnnnnnnnnnnnnnnnnnnnnnnnnnnnnnnnnnnnnnnnnnnnnnnnnnnnnnnnnnnnnnnnnnnnnnnnnnnnnnnnnnnnnnnnnnnnnnnnnnnnnnnnnnnnnnnnnnnnnnnnnnnnnnnnnnnnnnnnnnnnnnnnnnnnnnnnnnnnnnnnnnnnnnnnnnnnnnnnnnnnnnnnnnnnnnnnnnnnnnnnnnnnnnnnnnnnnnnnnnnnnnnnnnnnnnnnnnnnnnnnnnnnnnnnnnnnnnnnnnnnnnnnnnnnnnnnnnnnnnnnnnnnnnnnnnnnnnnnnnnnnnnnnnnnnnnnnnnnnnnnnnnnnnnnnnnnnnnnnnnnnnnnnnnnnnnnnnnnnnnnnnnnnnnnnnnnnnnnnnnnnnnnnnnnnnnnnnnnnnnnnnnnnnnnnnnnnnnnnnnnnnnnnnnnnnnnnnnnnnnnnnnnnnnnnnnnnnnnnnnnnnnnnnnnnnnnnnnnnnnnnnnnnnnnnnnnnnnnnnnnnnnnnnnnnnnnnnnnnnnnnnnnnnnnnnnnnnnnnnnnnnnnnnnnnnnnnnnnnnnnnnnnnnnnnnnnnnnnnnnnnnnnnnnnnnnnnnnnnnnnnnnnnnnnnnnnnnnnnnnnnnnnnnnnnnnnnnnnnnnnnnnnnnnnnnnnnnnnnnnnnnnnnnnnnnnnnnnnnnnnnnnnnnnnnnnnnnnnnnnnnnnnnnnnnnnnnnnnnnnnnnnnnnnnnnnnnnnnnnnnnnnnnnnnnnnnnnnnnnnnnnnnnnnnnnnnnnnnnnnnnnnnnnnnnnnnnnnnnnnnnnnnnnnnnnnnnnnnnnnnnnnnnnnnnnnnnnnnnnnnnnnnnnnnnnnnnnnnnnnnnnnnnnnnnnnnnnnnnnnnnnnnnnnnnnnnnnnnnnnnnnnnnnnnnnnnnnnnnnnnnnnnnnnnnnnnnnnnnnnnnnnnnnnnnnnnnnnnnnnnnnnnnnnnnnnnnnnnnnnnnnnnnnnnnnnnnnnnnnnnnnnnnnnnnnnnnnnnnnnnnnnnnnnnnnnnnnnnnnnnnnnnnnnnnnnnnnnnnnnnnnnnnnnnnnnnnnnnnnnnnnnnnnnnnnnnnnnnnnnnnnnnnnnnnnnnnnnnnnnnnnnnnnnnnnnnnnnnnnnnnnnnnnnnnnnnnnnnnnnnnnnnnnnnnnnnnnnnnnnnnnnnnnnnnnnnnnnnnnnnnnnnnnnnnnnnnnnnnnnnnnnnnnnnnnnnnnnnnnnnnnnnnnnnnnnnnnnnnnnnnnnnnnnnnnnnnnnnnnnnnnnnnnnnnnnnnnnnnnnnnnnnnnnnnnnnnnnnnnnnnnnnnnnnnnnnnnnnnnnnnnnnnnnnnnnnnnnnnnnnnnnnnnnnnnnnnnnnnnnnnnnnnnnnnnnnnnnnnnnnnnnnnnnnnnnnnnnnnnnnnnnnnnnnnnnnnnnnnnnnnnnnnnnnnnnnnnnnnnnnnnnnnnnnnnnnnnnnnnnnnnnnnnnnnnnnnnnnnnnnnnnnnnnnnnnnnnnnnnnnnnnnnnnnnnnnnnnnnnnnnnnnnnnnnnnnnnnnnnnnnnnnnnnnnnnnnnnnnnnnnnnnnnnnnnnnnnnnnnnnnnnnnnnnnnnnnnnnnnnnnnnnnnnnnnnnnnnnnnnnnnnnnnnnnnnnnnnnnnnnnnnnnnnnnnnnnnnnnnnnnnnnnnnnnnnnnnnnnnnnnnnnnnnnnnnnnnnnnnnnnnnnnnnnnnnnnnnnnnnnnnnnnnnnnnnnnnnnnnnnnnnnnnnnnnnnnnnnnnnnnnnnnnnnnnnnnnnnnnnnnnnnnnnnnnnnnnnnnnnnnnnnnnnnnnnnnnnnnnnnnnnnnnnnnnnnnnnnnnnnnnnnnnnnnnnnnnnnnnnnnnnnnnnnnnnnnnnnnnnnnnnnnnnnnnnnnnnnnnnnnnnnnnnnnnnnnnnnnnnnnnnnnnnnnnnnnnnnnnnnnnnnnnnnnnnnnnnnnnnnnnnnnnnnnnnnnnnnnnnnnnnnnnnnnnnnnnnnnnnnnnnnnnnnnnnnnnnnnnnnnnnnnnnnnnnnnnnnnnnnnnnnnnnnnnnnnnnnnnnnnnnnnnnnnnnnnnnnnnnnnnnnnnnnnnnnnnnnnnnnnnnnnnnnnnnnnnnnnnnnnnnnnnnnnnnnnnnnnnnnnnnnnnnnnnnnnnnnnnnnnnnnnnnnnnnnnnnnnnnnnnnnnnnnnnnnnnnnnnnnnnnnnnnnnnnnnnnnnnnnnnnnnnnnnnnnnnnnnnnnnnnnnnnnnnnnnnnnnnnnnnnnnnnnnnnnnnnnnnnnnnnnnnnnnnnnnnnnnnnnnnnnnnnnnnnnnnnnnnnnnnnnnnnnnnnnnnnnnnnnnnnnnnnnnnnnnnnnnnnnnnnnnnnnnnnnnnnnnnnnnnnnnnnnnnnnnnnnnnnnnnnnnnnnnnnnnnnnnnnnnnnnnnnnnnnnnnnnnnnnnnnnnnnnnnnnnnnnnnnnnnnnnnnnnnnnnnnnnnnnnnnnnnnnnnnnnnnnnnnnnnnnnnnnnnnnnnnnnnnnnnnnnnnnnnnnnnnnnnnnnnnnnnnnnnnnnnnnnnnnnnnnnnnnnnnnnnnnnnnnnnnnnnnnnnnnnnnnnnnnnnnnnnnnnnnnnnnnnnnnnnnnnnnnnnnnnnnnnnnnnnnnnnnnnnnnnnnnnnnnnnnnnnnnnnnnnnnnnnnnnnnnnnnnnnnnnnnnnnnnnnnnnnnnnnnnnnnnnnnnnnnnnnnnnnnnnnnnnnnnnnnnnnnnnnnnnnnnnnnnnnnnnnnnnnnnnnnnnnnnnnnnnnnnnnnnnnnnnnnnnnnnnnnnnnnnnnnnnnnnnnnnnnnnnnnnnnnnnnnnnnnnnnnnnnnnnnnnnnnnnnnnnnnnnnnnnnnnnnnnnnnnnnnnnnnnnnnnnnnnnnnnnnnnnnnnnnnnnnnnnnnnnnnnnnnnnnnnnnnnnnnnnnnnnnnnnnnnnnnnnnnnnnnnnnnnnnnnnnnnnnnnnnnnnnnnnnnnnnnnnnnnnnnnnnnnnnnnnnnnnnnnnnnnnnnnnnnnnnnnnnnnnnnnnnnnnnnnnnnnnnnnnnnnnnnnnnnnnnnnnnnnnnnnnnnnnnnnnnnnnnnnnnnnnnnnnnnnnnnnnnnnnnnnnnnnnnnnnnnnnnnnnnnnnnnnnnnnnnnnnnnnnnnnnnnnnnnnnnnnnnnnnnnnnnnnnnnnnnnnnnnnnnnnnnnnnnnnnnnnnnnnnnnnnnnnnnnnnnnnnnnnnnnnnnnnnnnnnnnnnnnnnnnnnnnnnnnnnnnnnnnnnnnnnnnnnnnnnnnnnnnnnnnnnnnnnnnnnnnnnnnnnnnnnnnnnnnnnnnnnnnnnnnnnnnnnnnnnnnnnnnnnnnnnnnnnnnnnnnnnnnnnnnnnnnnnnnnnnnnnnnnnnnnnnnnnnnnnnnnnnnnnnnnnnnnnnnnnnnnnnnnnnnnnnnnnnnnnnnnnnnnnnnnnnnnnnnnnnnnnnnnnnnnnnnnnnnnnnnnnnnnnnnnnnnnnnnnnnnnnnnnnnnnnnnnnnnnnnnnnnnnnnnnnnnnnnnnnnnnnnnnnnnnnnnnnnnnnnnnnnnnnnnnnnnnnnnnnnnnnnnnnnnnnnnnnnnnnnnnnnnnnnnnnnnnnnnnnnnnnnnnnnnnnnnnnnnnnnnnnnnnnnnnnnnnnnnnnnnnnnnnnnnnnnnnnnnnnnnnnnnnnnnnnnnnnnnnnnnnnnnnnnnnnnnnnnnnnnnnnnnnnnnnnnnnnnnnnnnnnnnnnnnnnnnnnnnnnnnnnnnnnnnnnnnnnnnnnnnnnnnnnnnnnnnnnnnnnnnnnnnnnnnnnnnnnnnnnnnnnnnnnnnnnnnnnnnnnnnnnnnnnnnnnnnnnnnnnnnnnnnnnnnnnnnnnnnnnnnnnnnnnnnnnnnnnnnnnnnnnnnnnnnnnnnnnnnnnnnnnnnnnnnnnnnnnnnnnnnnnnnnnnnnnnnnnnnnnnnnnnnnnnnnnnnnnnnnnnnnnnnnnnnnnnnnnnnnnnnnnnnnnnnnnnnnnnnnnnnnnnnnnnnnnnnnnnnnnnnnnnnnnnnnnnnnnnnnnnnnnnnnnnnnnnnnnnnnnnnnnnnnnnnnnnnnnnnnnnnnnnnnnnnnnnnnnnnnnnnnnnnnnnnnnnnnnnnnnnnnnnnnnnnnnnnnnnnnnnnnnnnnnnnnnnnnnnnnnnnnnnnnnnnnnnnnnnnnnnnnnnnnnnnnnnnnnnnnnnnnnnnnnnnnnnnnnnnnnnnnnnnnnnnnnnnnnnnnnnnnnnnnnnnnnnnnnnnnnnnnnnnnnnnnnnnnnnnnnnnnnnnnnnnnnnnnnnnnnnnnnnnnnnnnnnnnnnnnnnnnnnnnnnnnnnnnnnnnnnnnnnnnnnnnnnnnnnnnnnnnnnnnnnnnnnnnnnnnnnnnnnnnnnnnnnnnnnnnnnnnnnnnnnnnnnnnnnnnnnnnnnnnnnnnnnnnnnnnnnnnnnnnnnnnnnnnnnnnnnnnnnnnnnnnnnnnnnnnnnnnnnnnnnnnnnnnnnnnnnnnnnnnnnnnnnnnnnnnnnnnnnnnnnnnnnnnnnnnnnnnnnnnnnnnnnnnnnnnnnnnnnnnnnnnnnnnnnnnnnnnnnnnnnnnnnnnnnnnnnnnnnnnnnnnnnnnnnnnnnnnnnnnnnnnnnnnnnnnnnnnnnnnnnnnnnnnnnnnnnnnnnnnnnnnnnnnnnnnnnnnnnnnnnnnnnnnnnnnnnnnnnnnnnnnnnnnnnnnnnnnnnnnnnnnnnnnnnnnnnnnnnnnnnnnnnnnnnnnnnnnnnnnnnnnnnnnnnnnnnnnnnnnnnnnnnnnnnnnnnnnnnnnnnnnnnnnnnnnnnnnnnnnnnnnnnnnnnnnnnnnnnnnnnnnnnnnnnnnnnnnnnnnnnnnnnnnnnnnnnnnnnnnnnnnnnnnnnnnnnnnnnnnnnnnnnnnnnnnnnnnnnnnnnnnnnnnnnnnnnnnnnnnnnnnnnnnnnnnnnnnnnnnnnnnnnnnnnnnnnnnnnnnnnnnnnnnnnnnnnnnnnnnnnnnnnnnnnnnnnnnnnnnnnnnnnnnnnnnnnnnnnnnnnnnnnnnnnnnnnnnnnnnnnnnnnnnnnnnnnnnnnnnnnnnnnnnnnnnnnnnnnnnnnnnnnnnnnnnnnnnnnnnnnnnnnnnnnnnnnnnnnnnnnnnnnnnnnnnnnnnnnnnnnnnnnnnnnnnnnnnnnnnnnnnnnnnnnnnnnnnnnnnnnnnnnnnnnnnnnnnnnnnnnnnnnnnnnnnnnnnnnnnnnnnnnnnnnnnnnnnnnnnnnnnnnnnnnnnnnnnnnnnnnnnnnnnnnnnnnnnnnnnnnnnnnnnnnnnnnnnnnnnnnnnnnnnnnnnnnnnnnnnnnnnnnnnnnnnnnnnnnnnnnnnnnnnnnnnnnnnnnnnnnnnnnnnnnnnnnnnnnnnnnnnnnnnnnnnnnnnnnnnnnnnnnnnnnnnnnnnnnnnnnnnnnnnnnnnnnnnnnnnnnnnnnnnnnnnnnnnnnnnnnnnnnnnnnnnnnnnnnnnnnnnnnnnnnnnnnnnnnnnnnnnnnnnnnnnnnnnnnnnnnnnnnnnnnnnnnnnnnnnnnnnnnnnnnnnnnnnnnnnnnnnnnnnnnnnnnnnnnnnnnnnnnnnnnnnnnnnnnnnnnnnnnnnnnnnnnnnnnnnnnnnnnnnnnnnnnnnnnnnnnnnnnnnnnnnnnnnnnnnnnnnnnnnnnnnnnnnnnnnnnnnnnnnnnnnnnnnnnnnnnnnnnnnnnnnnnnnnnnnnnnnnnnnnnnnnnnnnnnnnnnnnnnnnnnnnnnnnnnnnnnnnnnnnnnnnnnnnnnnnnnnnnnnnnnnnnnnnnnnnnnnnnnnnnnnnnnnnnnnnnnnnnnnnnnnnnnnnnnnnnnnnnnnnnnnnnnnnnnnnnnnnnnnnnnnnnnnnnnnnnnnnnnnnnnnnnnnnnnnnnnnnnnnnnnnnnnnnnnnnnnnnnnnnnnnnnnnnnnnnnnnnnnnnnnnnnnnnnnnnnnnnnnnnnnnnnnnnnnnnnnnnnnnnnnnnnnnnnnnnnnnnnnnnnnnnnnnnnnnnnnnnnnnnnnnnnnnnnnnnnnnnnnnnnnnnnnnnnnnnnnnnnnnnnnnnnnnnnnnnnnnnnnnnnnnnnnnnnnnnnnnnnnnnnnnnnnnnnnnnnnnnnnnnnnnnnnnnnnnnnnnnnnnnnnnnnnnnnnnnnnnnnnnnnnnnnnnnnnnnnnnnnnnnnnnnnnnnnnnnnnnnnnnnnnnnnnnnnnnnnnnnnnnnnnnnnnnnnnnnnnnnnnnnnnnnnnnnnnnnnnnnnnnnnnnnnnnnnnnnnnnnnnnnnnnnnnnnnnnnnnnnnnnnnnnnnnnnnnnnnnnnnnnnnnnnnnnnnnnnnnnnnnnnnnnnnnnnnnnnnnnnnnnnnnnnnnnnnnnnnnnnnnnnnnnnnnnnnnnnnnnnnnnnnnnnnnnnnnnnnnnnnnnnnnnnnnnnnnnnnnnnnnnnnnnnnnnnnnnnnnnnnnnnnnnnnnnnnnnnnnnnnnnnnnnnnnnnnnnnnnnnnnnnnnnnnnnnnnnnnnnnnnnnnnnnnnnnnnnnnnnnnnnnnnnnnnnnnnnnnnnnnnnnnnnnnnnnnnnnnnnnnnnnnnnnnnnnnnnnnnnnnnnnnnnnnnnnnnnnnnnnnnnnnnnnnnnnnnnnnnnnnnnnnnnnnnnnnnnnnnnnnnnnnnnnnnnnnnnnnnnnnnnnnnnnnnnnnnnnnnnnnnnnnnnnnnnnnnnnnnnnnnnnnnnnnnnnnnnnnnnnnnnnnnnnnnnnnnnnnnnnnnnnnnnnnnnnnnnnnnnnnnnnnnnnnnnnnnnnnnnnnnnnnnnnnnnnnnnnnnnnnnnnnnnnnnnnnnnnnnnnnnnnnnnnnnnnnnnnnnnnnnnnnnnnnnnnnnnnnnnnnnnnnnnnnnnnnnnnnnnnnnnnnnnnnnnnnnnnnnnnnnnnnnnnnnnnnnnnnnnnnnnnnnnnnnnnnnnnnnnnnnnnnnnnnnnnnnnnnnnnnnnnnnnnnnnnnnnnnnnnnnnnnnnnnnnnnnnnnnnnnnnnnnnnnnnnnnnnnnnnnnnnnnnnnnnnnnnnnnnnnnnnnnnnnnnnnnnnnnnnnnnnnnnnnnnnnnnnnnnnnnnnnnnnnnnnnnnnnnnnnnnnnnnnnnnnnnnnnnnnnnnnnnnnnnnnnnnnnnnnnnnnnnnnnnnnnnnnnnnnnnnnnnnnnnnnnnnnnnnnnnnnnnnnnnnnnnnnnnnnnnnnnnnnnnnnnnnnnnnnnnnnnnnnnnnnnnnnnnnnnnnnnnnnnnnnnnnnnnnnnnnnnnnnnnnnnnnnnnnnnnnnnnnnnnnnnnnnnnnnnnnnnnnnnnnnnnnnnnnnnnnnnnnnnnnnnnnnnnnnnnnnnnnnnnnnnnnnnnnnnnnnnnnnnnnnnnnnnnnnnnnnnnnnnnnnnnnnnnnnnnnnnnnnnnnnnnnnnnnnnnnnnnnnnnnnnnnnnnnnnnnnnnnnnnnnnnnnnnnnnnnnnnnnnnnnnnnnnnnnnnnnnnnnnnnnnnnnnnnnnnnnnnnnnnnnnnnnnnnnnnnnnnnnnnnnnnnnnnnnnnnnnnnnnnnnnnnnnnnnnnnnnnnnnnnnnnnnnnnnnnnnnnnnnnnnnnnnnnnnnnnnnnnnnnnnnnnnnnnnnnnnnnnnnnnnnnnnnnnnnnnnnnnnnnnnnnnnnnnnnnnnnnnnnnnnnnnnnnnnnnnnnnnnnnnnnnnnnnnnnnnnnnnnnnnnnnnnnnnnnnnnnnnnnnnnnnnnnnnnnnnnnnnnnnnnnnnnnnnnnnnnnnnnnnnnnnnnnnnnnnnnnnnnnnnnnnnnnnnnnnnnnnnnnnnnnnnnnnnnnnnnnnnnnnnnnnnnnnnnnnnnnnnnnnnnnnnnnnnnnnnnnnnnnnnnnnnnnnnnnnnnnnnnnnnnnnnnnnnnnnnnnnnnnnnnnnnnnnnnnnnnnnnnnnnnnnnnnnnnnnnnnnnnnnnnnnnnnnnnnnnnnnnnnnnnnnnnnnnnnnnnnnnnnnnnnnnnnnnnnnnnnnnnnnnnnnnnnnnnnnnnnnnnnnnnnnnnnnnnnnnnnnnnnnnnnnnnnnnnnnnnnnnnnnnnnnnnnnnnnnnnnnnnnnnnnnnnnnnnnnnnnnnnnnnnnnnnnnnnnnnnnnnnnnnnnnnnnnnnnnnnnnnnnnnnnnnnnnnnnnnnnnnnnnnnnnnnnnnnnnnnnnnnnnnnnnnnnnnnnnnnnnnnnnnnnnnnnnnnnnnnnnnnnnnnnnnnnnnnnnnnnnnnnnnnnnnnnnnnnnnnnnnnnnnnnnnnnnnnnnnnnnnnnnnnnnnnnnnnnnnnnnnnnnnnnnnnnnnnnnnnnnnnnnnnnnnnnnnnnnnnnnnnnnnnnnnnnnnnnnnnnnnnnnnnnnnnnnnnnnnnnnnnnnnnnnnnnnnnnnnnnnnnnnnnnnnnnnnnnnnnnnnnnnnnnnnnnnnnnnnnnnnnnnnnnnnnnnnnnnnnnnnnnnnnnnnnnnnnnnnnnnnnnnnnnnnnnnnnnnnnnnnnnnnnnnnnnnnnnnnnnnnnnnnnnnnnnnnnnnnnnnnnnnnnnnnnnnnnnnnnnnnnnnnnnnnnnnnnnnnnnnnnnnnnnnnnnnnnnnnnnnnnnnnnnnnnnnnnnnnnnnnnnnnnnnnnnnnnnnnnnnnnnnnnnnnnnnnnnnnnnnnnnnnnnnnnnnnnnnnnnnnnnnnnnnnnnnnnnnnnnnnnnnnnnnnnnnnnnnnnnnnnnnnnnnnnnnnnnnnnnnnnnnnnnnnnnnnnnnnnnnnnnnnnnnnnnnnnnnnnnnnnnnnnnnnnnnnnnnnnnnnnnnnnnnnnnnnnnnnnnnnnnnnnnnnnnnnnnnnnnnnnnnnnnnnnnnnnnnnnnnnnnnnnnnnnnnnnnnnnnnnnnnnnnnnnnnnnnnnnnnnnnnnnnnnnnnnnnnnnnnnnnnnnnnnnnnnnnnnnnnnnnnnnnnnnnnnnnnnnnnnnnnnnnnnnnnnnnnnnnnnnnnnnnnnnnnnnnnnnnnnnnnnnnnnnnnnnnnnnnnnnnnnnnnnnnnnnnnnnnnnnnnnnnnnnnnnnnnnnnnnnnnnnnnnnnnnnnnnnnnnnnnnnnnnnnnnnnnnnnnnnnnnnnnnnnnnnnnnnnnnnnnnnnnnnnnnnnnnnnnnnnnnnnnnnnnnnnnnnnnnnnnnnnnnnnnnnnnnnnnnnnnnnnnnnnnnnnnnnnnnnnnnnnnnnnnnnnnnnnnnnnnnnnnnnnnnnnnnnnnnnnnnnnnnnnnnnnnnnnnnnnnnnnnnnnnnnnnnnnnnnnnnnnnnnnnnnnnnnnnnnnnnnnnnnnnnnnnnnnnnnnnnnnnnnnnnnnnnnnnnnnnnnnnnnnnnnnnnnnnnnnnnnnnnnnnnnnnnnnnnnnnnnnnnnnnnnnnnnnnnnnnnnnnnnnnnnnnnnnnnnnnnnnnnnnnnnnnnnnnnnnnnnnnnnnnnnnnnnnnnnnnnnnnnnnnnnnnnnnnnnnnnnnnnnnnnnnnnnnnnnnnnnnnnnnnnnnnnnnnnnnnnnnnnnnnnnnnnnnnnnnnnnnnnnnnnnnnnnnnnnnnnnnnnnnnnnnnnnnnnnnnnnnnnnnnnnnnnnnnnnnnnnnnnnnnnnnnnnnnnnnnnnnnnnnnnnnnnnnnnnnnnnnnnnnnnnnnnnnnnnnnnnnnnnnnnnnnnnnnnnnnnnnnnnnnnnnnnnnnnnnnnnnnnnnnnnnnnnnnnnnnnnnnnnnnnnnnnnnnnnnnnnnnnnnnnnnnnnnnnnnnnnnnnnnnnnnnnnnnnnnnnnnnnnnnnnnnnnnnnnnnnnnnnnnnnnnnnnnnnnnnnnnnnnnnnnnnnnnnnnnnnnnnnnnnnnnnnnnnnnnnnnnnnnnnnnnnnnnnnnnnnnnnnnnnnnnnnnnnnnnnnnnnnnnnnnnnnnnnnnnnnnnnnnnnnnnnnnnnnnnnnnnnnnnnnnnnnnnnnnnnnnnnnnnnnnnnnnnnnnnnnnnnnnnnnnnnnnnnnnnnnnnnnnnnnnnnnnnnnnnnnnnnnnnnnnnnnnnnnnnnnnnnnnnnnnnnnnnnnnnnnnnnnnnnnnnnnnnnnnnnnnnnnnnnnnnnnnnnnnnnnnnnnnnnnnnnnnnnnnnnnnnnnnnnnnnnnnnnnnnnnnnnnnnnnnnnnnnnnnnnnnnnnnnnnnnnnnnnnnnnnnnnnnnnnnnnnnnnnnnnnnnnnnnnnnnnnnnnnnnnnnnnnnnnnnnnnnnnnnnnnnnnnnnnnnnnnnnnnnnnnnnnnnnnnnnnnnnnnnnnnnnnnnnnnnnnnnnnnnnnnnnnnnnnnnnnnnnnnnnnnnnnnnnnnnnnnnnnnnnnnnnnnnnnnnnnnnnnnnnnnnnnnnnnnnnnnnnnnnnnnnnnnnnnnnnnnnnnnnnnnnnnnnnnnnnnnnnnnnnnnnnnnnnnnnnnnnnnnnnnnnnnnnnnnnnnnnnnnnnnnnnnnnnnnnnnnnnnnnnnnnnnnnnnnnnnnnnnnnnnnnnnnnnnnnnnnnnnnnnnnnnnnnnnnnnnnnnnnnnnnnnnnnnnnnnnnnnnnnnnnnnnnnnnnnnnnnnnnnnnnnnnnnnnnnnnnnnnnnnnnnnnnnnnnnnnnnnnnnnnnnnnnnnnnnnnnnnnnnnnnnnnnnnnnnnnnnnnnnnnnnnnnnnnnnnnnnnnnnnnnnnnnnnnnnnnnnnnnnnnnnnnnnnnnnnnnnnnnnnnnnnnnnnnnnnnnnnnnnnnnnnnnnnnnnnnnnnnnnnnnnnnnnnnnnnnnnnnnnnnnnnnnnnnnnnnnnnnnnnnnnnnnnnnnnnnnnnnnnnnnnnnnnnnnnnnnnnnnnnnnnnnnnnnnnnnnnnnnnnnnnnnnnnnnnnnnnnnnnnnnnnnnnnnnnnnnnnnnnnnnnnnnnnnnnnnnnnnnnnnnnnnnnnnnnnnnnnnnnnnnnnnnnnnnnnnnnnnnnnnnnnnnnnnnnnnnnnnnnnnnnnnnnnnnnnnnnnnnnnnnnnnnnnnnnnnnnnnnnnnnnnnnnnnnnnnnnnnnnnnnnnnnnnnnnnnnnnnnnnnnnnnnnnnnnnnnnnnnnnnnnnnnnnnnnnnnnnnnnnnnnnnnnnnnnnnnnnnnnnnnnnnnnnnnnnnnnnnnnnnnnnnnnnnnnnnnnnnnnnnnnnnnnnnnnnnnnnnnnnnnnnnnnnnnnnnnnnnnnnnnnnnnnnnnnnnnnnnnnnnnnnnnnnnnnnnnnnnnnnnnnnnnnnnnnnnnnnnnnnnnnnnnnnnnnnnnnnnnnnnnnnnnnnnnnnnnnnnnnnnnnnnnnnnnnnnnnnnnnnnnnnnnnnnnnnnnnnnnnnnnnnnnnnnnnnnnnnnnnnnnnnnnnnnnnnnnnnnnnnnnnnnnnnnnnnnnnnnnnnnnnnnnnnnnnnnnnnnnnnnnnnnnnnnnnnnnnnnnnnnnnnnnnnnnnnnnnnnnnnnnnnnnnnnnnnnnnnnnnnnnnnnnnnnnnnnnnnnnnnnnnnnnnnnnnnnnnnnnnnnnnnnnnnnnnnnnnnnnnnnnnnnnnnnnnnnnnnnnnnnnnnnnnnnnnnnnnnnnnnnnnnnnnnnnnnnnnnnnnnnnnnnnnnnnnnnnnnnnnnnnnnnnnnnnnnnnnnnnnnnnnnnnnnnnnnnnnnnnnnnnnnnnnnnnnnnnnnnnnnnnnnnnnnnnnnnnnnnnnnnnnnnnnnnnnnnnnnnnnnnnnnnnnnnnnnnnnnnnnnnnnnnnnnnnnnnnnnnnnnnnnnnnnnnnnnnnnnnnnnnnnnnnnnnnnnnnnnnnnnnnnnnnnnnnnnnnnnnnnnnnnnnnnnnnnnnnnnnnnnnnnnnnnnnnnnnnnnnnnnnnnnnnnnnnnnnnnnnnnnnnnnnnnnnnnnnnnnnnnnnnnnnnnnnnnnnnnnnnnnnnnnnnnnnnnnnnnnnnnnnnnnnnnnnnnnnnnnnnnnnnnnnnnnnnnnnnnnnnnnnnnnnnnnnnnnnnnnnnnnnnnnnnnnnnnnnnnnnnnnnnnnnnnnnnnnnnnnnnnnnnnnnnnnnnnnnnnnnnnnnnnnnnnnnnnnnnnnnnnnnnnnnnnnnnnnnnnnnnnnnnnnnnnnnnnnnnnnnnnnnnnnnnnnnnnnnnnnnnnnnnnnnnnnnnnnnnnnnnnnnnnnnnnnnnnnnnnnnnnnnnnnnnnnnnnnnnnnnnnnnnnnnnnnnnnnnnnnnnnnnnnnnnnnnnnnnnnnnnnnnnnnnnnnnnnnnnnnnnnnnnnnnnnnnnnnnnnnnnnnnnnnnnnnnnnnnnnnnnnnnnnnnnnnnnnnnnnnnnnnnnnnnnnnnnnnnnnnnnnnnnnnnnnnnnnnnnnnnnnnnnnnnnnnnnnnnnnnnnnnnnnnnnnnnnnnnnnnnnnnnnnnnnnnnnnnnnnnnnnnnnnnnnnnnnnnnnnnnnnnnnnnnnnnnnnnnnnnnnnnnnnnnnnnnnnnnnnnnnnnnnnnnnnnnnnnnnnnnnnnnnnnnnnnnnnnnnnnnnnnnnnnnnnnnnnnnnnnnnnnnnnnnnnnnnnnnnnnnnnnnnnnnnnnnnnnnnnnnnnnnnnnnnnnnnnnnnnnnnnnnnnnnnnnnnnnnnnnnnnnnnnnnnnnnnnnnnnnnnnnnnnnnnnnnnnnnnnnnnnnnnnnnnnnnnnnnnnnnnnnnnnnnnnnnnnnnnnnnnnnnnnnnnnnnnnnnnnnnnnnnnnnnnnnnnnnnnnnnnnnnnnnnnnnnnnnnnnnnnnnnnnnnnnnnnnnnnnnnnnnnnnnnnnnnnnnnnnnnnnnnnnnnnnnnnnnnnnnnnnnnnnnnnnnnnnnnnnnnnnnnnnnnnnnnnnnnnnnnnnnnnnnnnnnnnnnnnnnnnnnnnnnnnnnnnnnnnnnnnnnnnnnnnnnnnnnnnnnnnnnnnnnnnnnnnnnnnnnnnnnnnnnnnnnnnnnnnnnnnnnnnnnnnnnnnnnnnnnnnnnnnnnnnnnnnnnnnnnnnnnnnnnnnnnnnnnnnnnnnnnnnnnnnnnnnnnnnnnnnnnnnnnnnnnnnnnnnnnnnnnnnnnnnnnnnnnnnnnnnnnnnnnnnnnnnnnnnnnnnnnnnnnnnnnnnnnnnnnnnnnnnnnnnnnnnnnnnnnnnnnnnnnnnnnnnnnnnnnnnnnnnnnnnnnnnnnnnnnnnnnnnnnnnnnnnnnnnnnnnnnnnnnnnnnnnnnnnnnnnnnnnnnnnnnnnnnnnnnnnnnnnnnnnnnnnnnnnnnnnnnnnnnnnnnnnnnnnnnnnnnnnnnnnnnnnnnnnnnnnnnnnnnnnnnnnnnnnnnnnnnnnnnnnnnnnnnnnnnnnnnnnnnnnnnnnnnnnnnnnnnnnnnnnnnnnnnnnnnnnnnnnnnnnnnnnnnnnnnnnnnnnnnnnnnnnnnnnnnnnnnnnnnnnnnnnnnnnnnnnnnnnnnnnnnnnnnnnnnnnnnnnnnnnnnnnnnnnnnnnnnnnnnnnnnnnnnnnnnnnnnnnnnnnnnnnnnnnnnnnnnnnnnnnnnnnnnnnnnnnnnnnnnnnnnnnnnnnnnnnnnnnnnnnnnnnnnnnnnnnnnnnnnnnnnnnnnnnnnnnnnnnnnnnnnnnnnnnnnnnnnnnnnnnnnnnnnnnnnnnnnnnnnnnnnnnnnnnnnnnnnnnnnnnnnnnnnnnnnnnnnnnnnnnnnnnnnnnnnnnnnnnnnnnnnnnnnnnnnnnnnnnnnnnnnnnnnnnnnnnnnnnnnnnnnnnnnnnnnnnnnnnnnnnnnnnnnnnnnnnnnnnnnnnnnnnnnnnnnnnnnnnnnnnnnnnnnnnnnnnnnnnnnnnnnnnnnnnnnnnnnnnnnnnnnnnnnnnnnnnnnnnnnnnnnnnnnnnnnnnnnnnnnnnnnnnnnnnnnnnnnnnnnnnnnnnnnnnnnnnnnnnnnnnnnnnnnnnnnnnnnnnnnnnnnnnnnnnnnnnnnnnnnnnnnnnnnnnnnnnnnnnnnnnnnnnnnnnnnnnnnnnnnnnnnnnnnnnnnnnnnnnnnnnnnnnnnnnnnnnnnnnnnnnnnnnnnnnnnnnnnnnnnnnnnnnnnnnnnnnnnnnnnnnnnnnnnnnnnnnnnnnnnnnnnnnnnnnnnnnnnnnnnnnnnnnnnnnnnnnnnnnnnnnnnnnnnnnnnnnnnnnnnnnnnnnnnnnnnnnnnnnnnnnnnnnnnnnnnnnnnnnnnnnnnnnnnnnnnnnnnnnnnnnnnnnnnnnnnnnnnnnnnnnnnnnnnnnnnnnnnnnnnnnnnnnnnnnnnnnnnnnnnnnnnnnnnnnnnnnnnnnnnnnnnnnnnnnnnnnnnnnnnnnnnnnnnnnnnnnnnnnnnnnnnnnnnnnnnnnnnnnnnnnnnnnnnnnnnnnnnnnnnnnnnnnnnnnnnnnnnnnnnnnnnnnnnnnnnnnnnnnnnnnnnnnnnnnnnnnnnnnnnnnnnnnnnnnnnnnnnnnnnnnnnnnnnnnnnnnnnnnnnnnnnnnnnnnnnnnnnnnnnnnnnnnnnnnnnnnnnnnnnnnnnnnnnnnnnnnnnnnnnnnnnnnnnnnnnnnnnnnnnnnnnnnnnnnnnnnnnnnnnnnnnnnnnnnnnnnnnnnnnnnnnnnnnnnnnnnnnnnnnnnnnnnnnnnnnnnnnnnnnnnnnnnnnnnnnnnnnnnnnnnnnnnnnnnnnnnnnnnnnnnnnnnnnnnnnnnnnnnnnnnnnnnnnnnnnnnnnnnnnnnnnnnnnnnnnnnnnnnnnnnnnnnnnnnnnnnnnnnnnnnnnnnnnnnnnnnnnnnnnnnnnnnnnnnnnnnnnnnnnnnnnnnnnnnnnnnnnnnnnnnnnnnnnnnnnnnnnnnnnnnnnnnnnnnnnnnnnnnnnnnnnnnnnnnnnnnnnnnnnnnnnnnnnnnnnnnnnnnnnnnnnnnnnnnnnnnnnnnnnnnnnnnnnnnnnnnnnnnnnnnnnnnnnnnnnnnnnnnnnnnnnnnnnnnnnnnnnnnnnnnnnnnnnnnnnnnnnnnnnnnnnnnnnnnnnnnnnnnnnnnnnnnnnnnnnnnnnnnnnnnnnnnnnnnnnnnnnnnnnnnnnnnnnnnnnnnnnnnnnnnnnnnnnnnnnnnnnnnnnnnnnnnnnnnnnnnnnnnnnnnnnnnnnnnnnnnnnnnnnnnnnnnnnnnnnnnnnnnnnnnnnnnnnnnnnnnnnnnnnnnnnnnnnnnnnnnnnnnnnnnnnnnnnnnnnnnnnnnnnnnnnnnnnnnnnnnnnnnnnnnnnnnnnnnnnnnnnnnnnnnnnnnnnnnnnnnnnnnnnnnnnnnnnnnnnnnnnnnnnnnnnnnnnnnnnnnnnnnnnnnnnnnnnnnnnnnnnnnnnnnnnnnnnnnnnnnnnnnnnnnnnnnnnnnnnnnnnnnnnnnnnnnnnnnnnnnnnnnnnnnnnnnnnnnnnnnnnnnnnnnnnnnnnnnnnnnnnnnnnnnnnnnnnnnnnnnnnnnnnnnnnnnnnnnnnnnnnnnnnnnnnnnnnnnnnnnnnnnnnnnnnnnnnnnnnnnnnnnnnnnnnnnnnnnnnnnnnnnnnnnnnnnnnnnnnnnnnnnnnnnnnnnnnnnnnnnnnnnnnnnnnnnnnnnnnnnnnnnnnnnnnnnnnnnnnnnnnnnnnnnnnnnnnnnnnnnnnnnnnnnnnnnnnnnnnnnnnnnnnnnnnnnnnnnnnnnnnnnnnnnnnnnnnnnnnnnnnnnnnnnnnnnnnnnnnnnnnnnnnnnnnnnnnnnnnnnnnnnnnnnnnnnnnnnnnnnnnnnnnnnnnnnnnnnnnnnnnnnnnnnnnnnnnnnnnnnnnnnnnnnnnnnnnnnnnnnnnnnnnnnnnnnnnnnnnnnnnnnnnnnnnnnnnnnnnnnnnnnnnnnnnnnnnnnnnnnnnnnnnnnnnnnnnnnnnnnnnnnnnnnnnnnnnnnnnnnnnnnnnnnnnnnnnnnnnnnnnnnnnnnnnnnnnnnnnnnnnnnnnnnnnnnnnnnnnnnnnnnnnnnnnnnnnnnnnnnnnnnnnnnnnnnnnnnnnnnnnnnnnnnnnnnnnnnnnnnnnnnnnnnnnnnnnnnnnnnnnnnnnnnnnnnnnnnnnnnnnnnnnnnnnnnnnnnnnnnnnnnnnnnnnnnnnnnnnnnnnnnnnnnnnnnnnnnnnnnnnnnnnnnnnnnnnnnnnnnnnnnnnnnnnnnnnnnnnnnnnnnnnnnnnnnnnnnnnnnnnnnnnnnnnnnnnnnnnnnnnnnnnnnnnnnnnnnnnnnnnnnnnnnnnnnnnnnnnnnnnnnnnnnnnnnnnnnnnnnnnnnnnnnnnnnnnnnnnnnnnnnnnnnnnnnnnnnnnnnnnnnnnnnnnnnnnnnnnnnnnnnnnnnnnnnnnnnnnnnnnnnnnnnnnnnnnnnnnnnnnnnnnnnnnnnnnnnnnnnnnnnnnnnnnnnnnnnnnnnnnnnnnnnnnnnnnnnnnnnnnnnnnnnnnnnnnnnnnnnnnnnnnnnnnnnnnnnnnnnnnnnnnnnnnnnnnnnnnnnnnnnnnnnnnnnnnnnnnnnnnnnnnnnnnnnnnnnnnnnnnnnnnnnnnnnnnnnnnnnnnnnnnnnnnnnnnnnnnnnnnnnnnnnnnnnnnnnnnnnnnnnnnnnnnnnnnnnnnnnnnnnnnnnnnnnnnnnnnnnnnnnnnnnnnnnnnnnnnnnnnnnnnnnnnnnnnnnnnnnnnnnnnnnnnnnnnnnnnnnnnnnnnnnnnnnnnnnnnnnnnnnnnnnnnnnnnnnnnnnnnnnnnnnnnnnnnnnnnnnnnnnnnnnnnnnnnnnnnnnnnnnnnnnnnnnnnnnnnnnnnnnnnnnnnnnnnnnnnnnnnnnnnnnnnnnnnnnnnnnnnnnnnnnnnnnnnnnnnnnnnnnnnnnnnnnnnnnnnnnnnnnnnnnnnnnnnnnnnnnnnnnnnnnnnnnnnnnnnnnnnnnnnnnnnnnnnnnnnnnnnnnnnnnnnnnnnnnnnnnnnnnnnnnnnnnnnnnnnnnnnnnnnnnnnnnnnnnnnnnnnnnnnnnnnnnnnnnnnnnnnnnnnnnnnnnnnnnnnnnnnnnnnnnnnnnnnnnnnnnnnnnnnnnnnnnnnnnnnnnnnnnnnnnnnnnnnnnnnnnnnnnnnnnnnnnnnnnnnnnnnnnnnnnnnnnnnnnnnnnnnnnnnnnnnnnnnnnnnnnnnnnnnnnnnnnnnnnnnnnnnnnnnnnnnnnnnnnnnnnnnnnnnnnnnnnnnnnnnnnnnnnnnnnnnnnnnnnnnnnnnnnnnnnnnnnnnnnnnnnnnnnnnnnnnnnnnnnnnnnnnnnnnnnnnnnnnnnnnnnnnnnnnnnnnnnnnnnnnnnnnnnnnnnnnnnnnnnnnnnnnnnnnnnnnnnnnnnnnnnnnnnnnnnnnnnnnnnnnnnnnnnnnnnnnnnnnnnnnnnnnnnnnnnnnnnnnnnnnnnnnnnnnnnnnnnnnnnnnnnnnnnnnnnnnnnnnnnnnnnnnnnnnnnnnnnnnnnnnnnnnnnnnnnnnnnnnnnnnnnnnnnnnnnnnnnnnnnnnnnnnnnnnnnnnnnnnnnnnnnnnnnnnnnnnnnnnnnnnnnnnnnnnnnnnnnnnnnnnnnnnnnnnnnnnnnnnnnnnnnnnnnnnnnnnnnnnnnnnnnnnnnnnnnnnnnnnnnnnnnnnnnnnnnnnnnnnnnnnnnnnnnnnnnnnnnnnnnnnnnnnnnnnnnnnnnnnnnnnnnnnnnnnnnnnnnnnnnnnnnnnnnnnnnnnnnnnnnnnnnnnnnnnnnnnnnnnnnnnnnnnnnnnnnnnnnnnnnnnnnnnnnnnnnnnnnnnnnnnnnnnnnnnnnnnnnnnnnnnnnnnnnnnnnnnnnnnnnnnnnnnnnnnnnnnnnnnnnnnnnnnnnnnnnnnnnnnnnnnnnnnnnnnnnnnnnnnnnnnnnnnnnnnnnnnnnnnnnnnnnnnnnnnnnnnnnnnnnnnnnnnnnnnnnnnnnnnnnnnnnnnnnnnnnnnnnnnnnnnnnnnnnnnnnnnnnnnnnnnnnnnnnnnnnnnnnnnnnnnnnnnnnnnnnnnnnnnnnnnnnnnnnnnnnnnnnnnnnnnnnnnnnnnnnnnnnnnnnnnnnnnnnnnnnnnnnnnnnnnnnnnnnnnnnnnnnnnnnnnnnnnnnnnnnnnnnnnnnnnnnnnnnnnnnnnnnnnnnnnnnnnnnnnnnnnnnnnnnnnnnnnnnnnnnnnnnnnnnnnnnnnnnnnnnnnnnnnnnnnnnnnnnnnnnnnnnnnnnnnnnnnnnnnnnnnnnnnnnnnnnnnnnnnnnnnnnnnnnnnnnnnnnnnnnnnnnnnnnnnnnnnnnnnnnnnnnnnnnnnnnnnnnnnnnnnnnnnnnnnnnnnnnnnnnnnnnnnnnnnnnnnnnnnnnnnnnnnnnnnnnnnnnnnnnnnnnnnnnnnnnnnnnnnnnnnnnnnnnnnnnnnnnnnnnnnnnnnnnnnnnnnnnnnnnnnnnnnnnnnnnnnnnnnnnnnnnnnnnnnnnnnnnnnnnnnnnnnnnnnnnnnnnnnnnnnnnnnnnnnnnnnnnnnnnnnnnnnnnnnnnnnnnnnnnnnnnnnnnnnnnnnnnnnnnnnnnnnnnnnnnnnnnnnnnnnnnnnnnnnnnnnnnnnnnnnnnnnnnnnnnnnnnnnnnnnnnnnnnnnnnnnnnnnnnnnnnnnnnnnnnnnnnnnnnnnnnnnnnnnnnnnnnnnnnnnnnnnnnnnnnnnnnnnnnnnnnnnnnnnnnnnnnnnnnnnnnnnnnnnnnnnnnnnnnnnnnnnnnnnnnnnnnnnnnnnnnnnnnnnnnnnnnnnnnnnnnnnnnnnnnnnnnnnnnnnnnnnnnnnnnnnnnnnnnnnnnnnnnnnnnnnnnnnnnnnnnnnnnnnnnnnnnnnnnnnnnnnnnnnnnnnnnnnnnnnnnnnnnnnnnnnnnnnnnnnnnnnnnnnnnnnnnnnnnnnnnnnnnnnnnnnnnnnnnnnnnnnnnnnnnnnnnnnnnnnnnnnnnnnnnnnnnnnnnnnnnnnnnnnnnnnnnnnnnnnnnnnnnnnnnnnnnnnnnnnnnnnnnnnnnnnnnnnnnnnnnnnnnnnnnnnnnnnnnnnnnnnnnnnnnnnnnnnnnnnnnnnnnnnnnnnnnnnnnnnnnnnnnnnnnnnnnnnnnnnnnnnnnnnnnnnnnnnnnnnnnnnnnnnnnnnnnnnnnnnnnnnnnnnnnnnnnnnnnnnnnnnnnnnnnnnnnnnnnnnnnnnnnnnnnnnnnnnnnnnnnnnnnnnnnnnnnnnnnnnnnnnnnnnnnnnnnnnnnnnnnnnnnnnnnnnnnnnnnnnnnnnnnnnnnnnnnnnnnnnnnnnnnnnnnnnnnnnnnnnnnnnnnnnnnnnnnnnnnnnnnnnnnnnnnnnnnnnnnnnnnnnnnnnnnnnnnnnnnnnnnnnnnnnnnnnnnnnnnnnnnnnnnnnnnnnnnnnnnnnnnnnnnnnnnnnnnnnnnnnnnnnnnnnnnnnnnnnnnnnnnnnnnnnnnnnnnnnnnnnnnnnnnnnnnnnnnnnnnnnnnnnnnnnnnnnnnnnnnnnnnnnnnnnnnnnnnnnnnnnnnnnnnnnnnnnnnnnnnnnnnnnnnnnnnnnnnnnnnnnnnnnnnnnnnnnnnnnnnnnnnnnnnnnnnnnnnnnnnnnnnnnnnnnnnnnnnnnnnnnnnnnnnnnnnnnnnnnnnnnnnnnnnnnnnnnnnnnnnnnnnnnnnnnnnnnnnnnnnnnnnnnnnnnnnnnnnnnnnnnnnnnnnnnnnnnnnnnnnnnnnnnnnnnnnnnnnnnnnnnnnnnnnnnnnnnnnnnnnnnnnnnnnnnnnnnnnnnnnnnnnnnnnnnnnnnnnnnnnnnnnnnnnnnnnnnnnnnnnnnnnnnnnnnnnnnnnnnnnnnnnnnnnnnnnnnnnnnnnnnnnnnnnnnnnnnnnnnnnnnnnnnnnnnnnnnnnnnnnnnnnnnnnnnnnnnnnnnnnnnnnnnnnnnnnnnnnnnnnnnnnnnnnnnnnnnnnnnnnnnnnnnnnnnnnnnnnnnnnnnnnnnnnnnnnnnnnnnnnnnnnnnnnnnnnnnnnnnnnnnnnnnnnnnnnnnnnnnnnnnnnnnnnnnnnnnnnnnnnnnnnnnnnnnnnnnnnnnnnnnnnnnnnnnnnnnnnnnnnnnnnnnnnnnnnnnnnnnnnnnnnnnnnnnnnnnnnnnnnnnnnnnnnnnnnnnnnnnnnnnnnnnnnnnnnnnnnnnnnnnnnnnnnnnnnnnnnnnnnnnnnnnnnnnnnnnnnnnnnnnnnnnnnnnnnnnnnnnnnnnnnnnnnnnnnnnnnnnnnnnnnnnnnnnnnnnnnnnnnnnnnnnnnnnnnnnnnnnnnnnnnnnnnnnnnnnnnnnnnnnnnnnnnnnnnnnnnnnnnnnnnnnnnnnnnnnnnnnnnnnnnnnnnnnnnnnnnnnnnnnnnnnnnnnnnnnnnnnnnnnnnnnnnnnnnnnnnnnnnnnnnnnnnnnnnnnnnnnnnnnnnnnnnnnnnnnnnnnnnnnnnnnnnnnnnnnnnnnnnnnnnnnnnnnnnnnnnnnnnnnnnnnnnnnnnnnnnnnnnnnnnnnnnnnnnnnnnnnnnnnnnnnnnnnnnnnnnnnnnnnnnnnnnnnnnnnnnnnnnnnnnnnnnnnnnnnnnnnnnnnnnnnnnnnnnnnnnnnnnnnnnnnnnnnnnnnnnnnnnnnnnnnnnnnnnnnnnnnnnnnnnnnnnnnnnnnnnnnnnnnnnnnnnnnnnnnnnnnnnnnnnnnnnnnnnnnnnnnnnnnnnnnnnnnnnnnnnnnnnnnnnnnnnnnnnnnnnnnnnnnnnnnnnnnnnnnnnnnnnnnnnnnnnnnnnnnnnnnnnnnnnnnnnnnnnnnnnnnnnnnnnnnnnnnnnnnnnnnnnnnnnnnnnnnnnnnnnnnnnnnnnnnnnnnnnnnnnnnnnnnnnnnnnnnnnnnnnnnnnnnnnnnnnnnnnnnnnnnnnnnnnnnnnnnnnnnnnnnnnnnnnnnnnnnnnnnnnnnnnnnnnnnnnnnnnnnnnnnnnnnnnnnnnnnnnnnnnnnnnnnnnnnnnnnnnnnnnnnnnnnnnnnnnnnnnnnnnnnnnnnnnnnnnnnnnnnnnnnnnnnnnnnnnnnnnnnnnnnnnnnnnnnnnnnnnnnnnnnnnnnnnnnnnnnnnnnnnnnnnnnnnnnnnnnnnnnnnnnnnnnnnnnnnnnnnnnnnnnnnnnnnnnnnnnnnnnnnnnnnnnnnnnnnnnnnnnnnnnnnnnnnnnnnnnnnnnnnnnnnnnnnnnnnnnnnnnnnnnnnnnnnnnnnnnnnnnnnnnnnnnnnnnnnnnnnnnnnnnnnnnnnnnnnnnnnnnnnnnnnnnnnnnnnnnnnnnnnnnnnnnnnnnnnnnnnnnnnnnnnnnnnnnnnnnnnnnnnnnnnnnnnnnnnnnnnnnnnnnnnnnnnnnnnnnnnnnnnnnnnnnnnnnnnnnnnnnnnnnnnnnnnnnnnnnnnnnnnnnnnnnnnnnnnnnnnnnnnnnnnnnnnnnnnnnnnnnnnnnnnnnnnnnnnnnnnnnnnnnnnnnnnnnnnnnnnnnnnnnnnnnnnnnnnnnnnnnnnnnnnnnnnnnnnnnnnnnnnnnnnnnnnnnnnnnnnnnnnnnnnnnnnnnnnnnnnnnnnnnnnnnnnnnnnnnnnnnnnnnnnnnnnnnnnnnnnnnnnnnnnnnnnnnnnnnnnnnnnnnnnnnnnnnnnnnnnnnnnnnnnnnnnnnnnnnnnnnnnnnnnnnnnnnnnnnnnnnnnnnnnnnnnnnnnnnnnnnnnnnnnnnnnnnnnnnnnnnnnnnnnnnnnnnnnnnnnnnnnnnnnnnnnnnnnnnnnnnnnnnnnnnnnnnnnnnnnnnnnnnnnnnnnnnnnnnnnnnnnnnnnnnnnnnnnnnnnnnnnnnnnnnnnnnnnnnnnnnnnnnnnnnnnnnnnnnnnnnnnnnnnnnnnnnnnnnnnnnnnnnnnnnnnnnnnnnnnnnnnnnnnnnnnnnnnnnnnnnnnnnnnnnnnnnnnnnnnnnnnnnnnnnnnnnnnnnnnnnnnnnnnnnnnnnnnnnnnnnnnnnnnnnnnnnnnnnnnnnnnnnnnnnnnnnnnnnnnnnnnnnnnnnnnnnnnnnnnnnnnnnnnnnnnnnnnnnnnnnnnnnnnnnnnnnnnnnnnnnnnnnnnnnnnnnnnnnnnnnnnnnnnnnnnnnnnnnnnnnnnnnnnnnnnnnnnnnnnnnnnnnnnnnnnnnnnnnnnnnnnnnnnnnnnnnnnnnnnnnnnnnnnnnnnnnnnnnnnnnnnnnnnnnnnnnnnnnnnnnnnnnnnnnnnnnnnnnnnnnnnnnnnnnnnnnnnnnnnnnnnnnnnnnnnnnnnnnnnnnnnnnnnnnnnnnnnnnnnnnnnnnnnnnnnnnnnnnnnnnnnnnnnnnnnnnnnnnnnnnnnnnnnnnnnnnnnnnnnnnnnnnnnnnnnnnnnnnnnnnnnnnnnnnnnnnnnnnnnnnnnnnnnnnnnnnnnnnnnnnnnnnnnnnnnnnnnnnnnnnnnnnnnnnnnnnnnnnnnnnnnnnnnnnnnnnnnnnnnnnnnnnnnnnnnnnnnnnnnnnnnnnnnnnnnnnnnnnnnnnnnnnnnnnnnnnnnnnnnnnnnnnnnnnnnnnnnnnnnnnnnnnnnnnnnnnnnnnnnnnnnnnnnnnnnnnnnnnnnnnnnnnnnnnnnnnnnnnnnnnnnnnnnnnnnnnnnnnnnnnnnnnnnnnnnnnnnnnnnnnnnnnnnnnnnnnnnnnnnnnnnnnnnnnnnnnnnnnnnnnnnnnnnnnnnnnnnnnnnnnnnnnnnnnnnnnnnnnnnnnnnnnnnnnnnnnnnnnnnnnnnnnnnnnnnnnnnnnnnnnnnnnnnnnnnnnnnnnnnnnnnnnnnnnnnnnnnnnnnnnnnnnnnnnnnnnnnnnnnnnnnnnnnnnnnnnnnnnnnnnnnnnnnnnnnnnnnnnnnnnnnnnnnnnnnnnnnnnnnnnnnnnnnnnnnnnnnnnnnnnnnnnnnnnnnnnnnnnnnnnnnnnnnnnnnnnnnnnnnnnnnnnnnnnnnnnnnnnnnnnnnnnnnnnnnnnnnnnnnnnnnnnnnnnnnnnnnnnnnnnnnnnnnnnnnnnnnnnnnnnnnnnnnnnnnnnnnnnnnnnnnnnnnnnnnnnnnnnnnnnnnnnnnnnnnnnnnnnnnnnnnnnnnnnnnnnnnnnnnnnnnnnnnnnnnnnnnnnnnnnnnnnnnnnnnnnnnnnnnnnnnnnnnnnnnnnnnnnnnnnnnnnnnnnnnnnnnnnnnnnnnnnnnnnnnnnnnnnnnnnnnnnnnnnnnnnnnnnnnnnnnnnnnnnnnnnnnnnnnnnnnnnnnnnnnnnnnnnnnnnnnnnnnnnnnnnnnnnnnnnnnnnnnnnnnnnnnnnnnnnnnnnnnnnnnnnnnnnnnnnnnnnnnnnnnnnnnnnnnnnnnnnnnnnnnnnnnnnnnnnnnnnnnnnnnnnnnnnnnnnnnnnnnnnnnnnnnnnnnnnnnnnnnnnnnnnnnnnnnnnnnnnnnnnnnnnnnnnnnnnnnnnnnnnnnnnnnnnnnnnnnnnnnnnnnnnnnnnnnnnnnnnnnnnnnnnnnnnnnnnnnnnnnnnnnnnnnnnnnnnnnnnnnnnnnnnnnnnnnnnnnnnnnnnnnnnnnnnnnnnnnnnnnnnnnnnnnnnnnnnnnnnnnnnnnnnnnnnnnnnnnnnnnnnnnnnnnnnnnnnnnnnnnnnnnnnnnnnnnnnnnnnnnnnnnnnnnnnnnnnnnnnnnnnnnnnnnnnnnnnnnnnnnnnnnnnnnnnnnnnnnnnnnnnnnnnnnnnnnnnnnnnnnnnnnnnnnnnnnnnnnnnnnnnnnnnnnnnnnnnnnnnnnnnnnnnnnnnnnnnnnnnnnnnnnnnnnnnnnnnnnnnnnnnnnnnnnnnnnnnnnnnnnnnnnnnnnnnnnnnnnnnnnnnnnnnnnnnnnnnnnnnnnnnnnnnnnnnnnnnnnnnnnnnnnnnnnnnnnnnnnnnnnnnnnnnnnnnnnnnnnnnnnnnnnnnnnnnnnnnnnnnnnnnnnnnnnnnnnnnnnnnnnnnnnnnnnnnnnnnnnnnnnnnnnnnnnnnnnnnnnnnnnnnnnnnnnnnnnnnnnnnnnnnnnnnnnnnnnnnnnnnnnnnnnnnnnnnnnnnnnnnnnnnnnnnnnnnnnnnnnnnnnnnnnnnnnnnnnnnnnnnnnnnnnnnnnnnnnnnnnnnnnnnnnnnnnnnnnnnnnnnnnnnnnnnnnnnnnnnnnnnnnnnnnnnnnnnnnnnnnnnnnnnnnnnnnnnnnnnnnnnnnnnnnnnnnnnnnnnnnnnnnnnnnnnnnnnnnnnnnnnnnnnnnnnnnnnnnnnnnnnnnnnnnnnnnnnnnnnnnnnnnnnnnnnnnnnnnnnnnnnnnnnnnnnnnnnnnnnnnnnnnnnnnnnnnnnnnnnnnnnnnnnnnnnnnnnnnnnnnnnnnnnnnnnnnnnnnnnnnnnnnnnnnnnnnnnnnnnnnnnnnnnnnnnnnnnnnnnnnnnnnnnnnnnnnnnnnnnnnnnnnnnnnnnnnnnnnnnnnnnnnnnnnnnnnnnnnnnnnnnnnnnnnnnnnnnnnnnnnnnnnnnnnnnnnnnnnnnnnnnnnnnnnnnnnnnnnnnnnnnnnnnnnnnnnnnnnnnnnnnnnnnnnnnnnnnnnnnnnnnnnnnnnnnnnnnnnnnnnnnnnnnnnnnnnnnnnnnnnnnnnnnnnnnnnnnnnnnnnnnnnnnnnnnnnnnnnnnnnnnnnnnnnnnnnnnnnnnnnnnnnnnnnnnnnnnnnnnnnnnnnnnnnnnnnnnnnnnnnnnnnnnnnnnnnnnnnnnnnnnnnnnnnnnnnnnnnnnnnnnnnnnnnnnnnnnnnnnnnnnnnnnnnnnnnnnnnnnnnnnnnnnnnnnnnnnnnnnnnnnnnnnnnnnnnnnnnnnnnnnnnnnnnnnnnnnnnnnnnnnnnnnnnnnnnnnnnnnnnnnnnnnnnnnnnnnnnnnnnnnnnnnnnnnnnnnnnnnnnnnnnnnnnnnnnnnnnnnnnnnnnnnnnnnnnnnnnnnnnnnnnnnnnnnnnnnnnnnnnnnnnnnnnnnnnnnnnnnnnnnnnnnnnnnnnnnnnnnnnnnnnnnnnnnnnnnnnnnnnnnnnnnnnnnnnnnnnnnnnnnnnnnnnnnnnnnnnnnnnnnnnnnnnnnnnnnnnnnnnnnnnnnnnnnnnnnnnnnnnnnnnnnnnnnnnnnnnnnnnnnnnnnnnnnnnnnnnnnnnnnnnnnnnnnnnnnnnnnnnnnnnnnnnnnnnnnnnnnnnnnnnnnnnnnnnnnnnnnnnnnnnnnnnnnnnnnnnnnnnnnnnnnnnnnnnnnnnnnnnnnnnnnnnnnnnnnnnnnnnnnnnnnnnnnnnnnnnnnnnnnnnnnnnnnnnnnnnnnnnnnnnnnnnnnnnnnnnnnnnnnnnnnnnnnnnnnnnnnnnnnnnnnnnnnnnnnnnnnnnnnnnnnnnnnnnnnnnnnnnnnnnnnnnnnnnnnnnnnnnnnnnnnnnnnnnnnnnnnnnnnnnnnnnnnnnnnnnnnnnnnnnnnnnnnnnnnnnnnnnnnnnnnnnnnnnnnnnnnnnnnnnnnnnnnnnnnnnnnnnnnnnnnnnnnnnnnnnnnnnnnnnnnnnnnnnnnnnnnnnnnnnnnnnnnnnnnnnnnnnnnnnnnnnnnnnnnnnnnnnnnnnnnnnnnnnnnnnnnnnnnnnnnnnnnnnnnnnnnnnnnnnnnnnnnnnnnnnnnnnnnnnnnnnnnnnnnnnnnnnnnnnnnnnnnnnnnnnnnnnnnnnnnnnnnnnnnnnnnnnnnnnnnnnnnnnnnnnnnnnnnnnnnnnnnnnnnnnnnnnnnnnnnnnnnnnnnnnnnnnnnnnnnnnnnnnnnnnnnnnnnnnnnnnnnnnnnnnnnnnnnnnnnnnnnnnnnnnnnnnnnnnnnnnnnnnnnnnnnnnnnnnnnnnnnnnnnnnnnnnnnnnnnnnnnnnnnnnnnnnnnnnnnnnnnnnnnnnnnnnnnnnnnnnnnnnnnnnnnnnnnnnnnnnnnnnnnnnnnnnnnnnnnnnnnnnnnnnnnnnnnnnnnnnnnnnnnnnnnnnnnnnnnnnnnnnnnnnnnnnnnnnnnnnnnnnnnnnnnnnnnnnnnnnnnnnnnnnnnnnnnnnnnnnnnnnnnnnnnnnnnnnnnnnnnnnnnnnnnnnnnnnnnnnnnnnnnnnnnnnnnnnnnnnnnnnnnnnnnnnnnnnnnnnnnnnnnnnnnnnnnnnnnnnnnnnnnnnnnnnnnnnnnnnnnnnnnnnnnnnnnnnnnnnnnnnnnnnnnnnnnnnnnnnnnnnnnnnnnnnnnnnnnnnnnnnnnnnnnnnnnnnnnnnnnnnnnnnnnnnnnnnnnnnnnnnnnnnnnnnnnnnnnnnnnnnnnnnnnnnnnnnnnnnnnnnnnnnnnnnnnnnnnnnnnnnnnnnnnnnnnnnnnnnnnnnnnnnnnnnnnnnnnnnnnnnnnnnnnnnnnnnnnnnnnnnnnnnnnnnnnnnnnnnnnnnnnnnnnnnnnnnnnnnnnnnnnnnnnnnnnnnnnnnnnnnnnnnnnnnnnnnnnnnnnnnnnnnnnnnnnnnnnnnnnnnnnnnnnnnnnnnnnnnnnnnnnnnnnnnnnnnnnnnnnnnnnnnnnnnnnnnnnnnnnnnnnnnnnnnnnnnnnnnnnnnnnnnnnnnnnnnnnnnnnnnnnnnnnnnnnnnnnnnnnnnnnnnnnnnnnnnnnnnnnnnnnnnnnnnnnnnnnnnnnnnnnnnnnnnnnnnnnnnnnnnnnnnnnnnnnnnnnnnnnnnnnnnnnnnnnnnnnnnnnnnnnnnnnnnnnnnnnnnnnnnnnnnnnnnnnnnnnnnnnnnnnnnnnnnnnnnnnnnnnnnnnnnnnnnnnnnnnnnnnnnnnnnnnnnnnnnnnnnnnnnnnnnnnnnnnnnnnnnnnnnnnnnnnnnnnnnnnnnnnnnnnnnnnnnnnnnnnnnnnnnnnnnnnnnnnnnnnnnnnnnnnnnnnnnnnnnnnnnnnnnnnnnnnnnnnnnnnnnnnnnnnnnnnnnnnnnnnnnnnnnnnnnnnnnnnnnnnnnnnnnnnnnnnnnnnnnnnnnnnnnnnnnnnnnnnnnnnnnnnnnnnnnnnnnnnnnnnnnnnnnnnnnnnnnnnnnnnnnnnnnnnnnnnnnnnnnnnnnnnnnnnnnnnnnnnnnnnnnnnnnnnnnnnnnnnnnnnnnnnnnnnnnnnnnnnnnnnnnnnnnnnnnnnnnnnnnnnnnnnnnnnnnnnnnnnnnnnnnnnnnnnnnnnnnnnnnnnnnnnnnnnnnnnnnnnnnnnnnnnnnnnnnnnnnnnnnnnnnnnnnnnnnnnnnnnnnnnnnnnnnnnnnnnnnnnnnnnnnnnnnnnnnnnnnnnnnnnnnnnnnnnnnnnnnnnnnnnnnnnnnnnnnnnnnnnnnnnnnnnnnnnnnnnnnnnnnnnnnnnnnnnnnnnnnnnnnnnnnnnnnnnnnnnnnnnnnnnnnnnnnnnnnnnnnnnnnnnnnnnnnnnnnnnnnnnnnnnnnnnnnnnnnnnnnnnnnnnnnnnnnnnnnnnnnnnnnnnnnnnnnnnnnnnnnnnnnnnnnnnnnnnnnnnnnnnnnnnnnnnnnnnnnnnnnnnnnnnnnnnnnnnnnnnnnnnnnnnnnnnnnnnnnnnnnnnnnnnnnnnnnnnnnnnnnnnnnnnnnnnnnnnnnnnnnnnnnnnnnnnnnnnnnnnnnnnnnnnnnnnnnnnnnnnnnnnnnnnnnnnnnnnnnnnnnnnnnnnnnnnnnnnnnnnnnnnnnnnnnnnnnnnnnnnnnnnnnnnnnnnnnnnnnnnnnnnnnnnnnnnnnnnnnnnnnnnnnnnnnnnnnnnnnnnnnnnnnnnnnnnnnnnnnnnnnnnnnnnnnnnnnnnnnnnnnnnnnnnnnnnnnnnnnnnnnnnnnnnnnnnnnnnnnnnnnnnnnnnnnnnnnnnnnnnnnnnnnnnnnnnnnnnnnnnnnnnnnnnnnnnnnnnnnnnnnnnnnnnnnnnnnnnnnnnnnnnnnnnnnnnnnnnnnnnnnnnnnnnnnnnnnnnnnnnnnnnnnnnnnnnnnnnnnnnnnnnnnnnnnnnnnnnnnnnnnnnnnnnnnnnnnnnnnnnnnnnnnnnnnnnnnnnnnnnnnnnnnnnnnnnnnnnnnnnnnnnnnnnnnnnnnnnnnnnnnnnnnnnnnnnnnnnnnnnnnnnnnnnnnnnnnnnnnnnnnnnnnnnnnnnnnnnnnnnnnnnnnnnnnnnnnnnnnnnnnnnnnnnnnnnnnnnnnnnnnnnnnnnnnnnnnnnnnnnnnnnnnnnnnnnnnnnnnnnnnnnnnnnnnnnnnnnnnnnnnnnnnnnnnnnnnnnnnnnnnnnnnnnnnnnnnnnnnnnnnnnnnnnnnnnnnnnnnnnnnnnnnnnnnnnnnnnnnnnnnnnnnnnnnnnnnnnnnnnnnnnnnnnnnnnnnnnnnnnnnnnnnnnnnnnnnnnnnnnnnnnnnnnnnnnnnnnnnnnnnnnnnnnnnnnnnnnnnnnnnnnnnnnnnnnnnnnnnnnnnnnnnnnnnnnnnnnnnnnnnnnnnnnnnnnnnnnnnnnnnnnnnnnnnnnnnnnnnnnnnnnnnnnnnnnnnnnnnnnnnnnnnnnnnnnnnnnnnnnnnnnnnnnnnnnnnnnnnnnnnnnnnnnnnnnnnnnnnnnnnnnnnnnnnnnnnnnnnnnnnnnnnnnnnnnnnnnnnnnnnnnnnnnnnnnnnnnnnnnnnnnnnnnnnnnnnnnnnnnnnnnnnnnnnnnnnnnnnnnnnnnnnnnnnnnnnnnnnnnnnnnnnnnnnnnnnnnnnnnnnnnnnnnnnnnnnnnnnnnnnnnnnnnnnnnnnnnnnnnnnnnnnnnnnnnnnnnnnnnnnnnnnnnnnnnnnnnnnnnnnnnnnnnnnnnnnnnnnnnnnnnnnnnnnnnnnnnnnnnnnnnnnnnnnnnnnnnnnnnnnnnnnnnnnnnnnnnnnnnnnnnnnnnnnnnnnnnnnnnnnnnnnnnnnnnnnnnnnnnnnnnnnnnnnnnnnnnnnnnnnnnnnnnnnnnnnnnnnnnnnnnnnnnnnnnnnnnnnnnnnnnnnnnnnnnnnnnnnnnnnnnnnnnnnnnnnnnnnnnnnnnnnnnnnnnnnnnnnnnnnnnnnnnnnnnnnnnnnnnnnnnnnnnnnnnnnnnnnnnnnnnnnnnnnnnnnnnnnnnnnnnnnnnnnnnnnnnnnnnnnnnnnnnnnnnnnnnnnnnnnnnnnnnnnnnnnnnnnnnnnnnnnnnnnnnnnnnnnnnnnnnnnnnnnnnnnnnnnnnnnnnnnnnnnnnnnnnnnnnnnnnnnnnnnnnnnnnnnnnnnnnnnnnnnnnnnnnnnnnnnnnnnnnnnnnnnnnnnnnnnnnnnnnnnnnnnnnnnnnnnnnnnnnnnnnnnnnnnnnnnnnnnnnnnnnnnnnnnnnnnnnnnnnnnnnnnnnnnnnnnnnnnnnnnnnnnnnnnnnnnnnnnnnnnnnnnnnnnnnnnnnnnnnnnnnnnnnnnnnnnnnnnnnnnnnnnnnnnnnnnnnnnnnnnnnnnnnnnnnnnnnnnnnnnnnnnnnnnnnnnnnnnnnnnnnnnnnnnnnnnnnnnnnnnnnnnnnnnnnnnnnnnnnnnnnnnnnnnnnnnnnnnnnnnnnnnnnnnnnnnnnnnnnnnnnnnnnnnnnnnnnnnnnnnnnnnnnnnnnnnnnnnnnnnnnnnnnnnnnnnnnnnnnnnnnnnnnnnnnnnnnnnnnnnnnnnnnnnnnnnnnnnnnnnnnnnnnnnnnnnnnnnnnnnnnnnnnnnnnnnnnnnnnnnnnnnnnnnnnnnnnnnnnnnnnnnnnnnnnnnnnnnnnnnnnnnnnnnnnnnnnnnnnnnnnnnnnnnnnnnnnnnnnnnnnnnnnnnnnnnnnnnnnnnnnnnnnnnnnnnnnnnnnnnnnnnnnnnnnnnnnnnnnnnnnnnnnnnnnnnnnnnnnnnnnnnnnnnnnnnnnnnnnnnnnnnnnnnnnnnnnnnnnnnnnnnnnnnnnnnnnnnnnnnnnnnnnnnnnnnnnnnnnnnnnnnnnnnnnnnnnnnnnnnnnnnnnnnnnnnnnnnnnnnnnnnnnnnnnnnnnnnnnnnnnnnnnnnnnnnnnnnnnnnnnnnnnnnnnnnnnnnnnnnnnnnnnnnnnnnnnnnnnnnnnnnnnnnnnnnnnnnnnnnnnnnnnnnnnnnnnnnnnnnnnnnnnnnnnnnnnnnnnnnnnnnnnnnnnnnnnnnnnnnnnnnnnnnnnnnnnnnnnnnnnnnnnnnnnnnnnnnnnnnnnnnnnnnnnnnnnnnnnnnnnnnnnnnnnnnnnnnnnnnnnnnnnnnnnnnnnnnnnnnnnnnnnnnnnnnnnnnnnnnnnnnnnnnnnnnnnnnnnnnnnnnnnnnnnnnnnnnnnnnnnnnnnnnnnnnnnnnnnnnnnnnnnnnnnnnnnnnnnnnnnnnnnnnnnnnnnnnnnnnnnnnnnnnnnnnnnnnnnnnnnnnnnnnnnnnnnnnnnnnnnnnnnnnnnnnnnnnnnnnnnnnnnnnnnnnnnnnnnnnnnnnnnnnnnnnnnnnnnnnnnnnnnnnnnnnnnnnnnnnnnnnnnnnnnnnnnnnnnnnnnnnnnnnnnnnnnnnnnnnnnnnnnnnnnnnnnnnnnnnnnnnnnnnnnnnnnnnnnnnnnnnnnnnnnnnnnnnnnnnnnnnnnnnnnnnnnnnnnnnnnnnnnnnnnnnnnnnnnnnnnnnnnnnnnnnnnnnnnnnnnnnnnnnnnnnnnnnnnnnnnnnnnnnnnnnnnnnnnnnnnnnnnnnnnnnnnnnnnnnnnnnnnnnnnnnnnnnnnnnnnnnnnnnnnnnnnnnnnnnnnnnnnnnnnnnnnnnnnnnnnnnnnnnnnnnnnnnnnnnnnnnnnnnnnnnnnnnnnnnnnnnnnnnnnnnnnnnnnnnnnnnnnnnnnnnnnnnnnnnnnnnnnnnnnnnnnnnnnnnnnnnnnnnnnnnnnnnnnnnnnnnnnnnnnnnnnnnnnnnnnnnnnnnnnnnnnnnnnnnnnnnnnnnnnnnnnnnnnnnnnnnnnnnnnnnnnnnnnnnnnnnnnnnnnnnnnnnnnnnnnnnnnnnnnnnnnnnnnnnnnnnnnnnnnnnnnnnnnnnnnnnnnnnnnnnnnnnnnnnnnnnnnnnnnnnnnnnnnnnnnnnnnnnnnnnnnnnnnnnnnnnnnnnnnnnnnnnnnnnnnnnnnnnnnnnnnnnnnnnnnnnnnnnnnnnnnnnnnnnnnnnnnnnnnnnnnnnnnnnnnnnnnnnnnnnnnnnnnnnnnnnnnnnnnnnnnnnnnnnnnnnnnnnnnnnnnnnnnnnnnnnnnnnnnnnnnnnnnnnnnnnnnnnnnnnnnnnnnnnnnnnnnnnnnnnnnnnnnnnnnnnnnnnnnnnnnnnnnnnnnnnnnnnnnnnnnnnnnnnnnnnnnnnnnnnnnnnnnnnnnnnnnnnnnnnnnnnnnnnnnnnnnnnnnnnnnnnnnnnnnnnnnnnnnnnnnnnnnnnnnnnnnnnnnnnnnnnnnnnnnnnnnnnnnnnnnnnnnnnnnnnnnnnnnnnnnnnnnnnnnnnnnnnnnnnnnnnnnnnnnnnnnnnnnnnnnnnnnnnnnnnnnnnnnnnnnnnnnnnnnnnnnnnnnnnnnnnnnnnnnnnnnnnnnnnnnnnnnnnnnnnnnnnnnnnnnnnnnnnnnnnnnnnnnnnnnnnnnnnnnnnnnnnnnnnnnnnnnnnnnnnnnnnnnnnnnnnnnnnnnnnnnnnnnnnnnnnnnnnnnnnnnnnnnnnnnnnnnnnnnnnnnnnnnnnnnnnnnnnnnnnnnnnnnnnnnnnnnnnnnnnnnnnnnnnnnnnnnnnnnnnnnnnnnnnnnnnnnnnnnnnnnnnnnnnnnnnnnnnnnnnnnnnnnnnnnnnnnnnnnnnnnnnnnnnnnnnnnnnnnnnnnnnnnnnnnnnnnnnnnnnnnnnnnnnnnnnnnnnnnnnnnnnnnnnnnnnnnnnnnnnnnnnnnnnnnnnnnnnnnnnnnnnnnnnnnnnnnnnnnnnnnnnnnnnnnnnnnnnnnnnnnnnnnnnnnnnnnnnnnnnnnnnnnnnnnnnnnnnnnnnnnnnnnnnnnnnnnnnnnnnnnnnnnnnnnnnnnnnnnnnnnnnnnnnnnnnnnnnnnnnnnnnnnnnnnnnnnnnnnnnnnnnnnnnnnnnnnnnnnnnnnnnnnnnnnnnnnnnnnnnnnnnnnnnnnnnnnnnnnnnnnnnnnnnnnnnnnnnnnnnnnnnnnnnnnnnnnnnnnnnnnnnnnnnnnnnnnnnnnnnnnnnnnnnnnnnnnnnnnnnnnnnnnnnnnnnnnnnnnnnnnnnnnnnnnnnnnnnnnnnnnnnnnnnnnnnnnnnnnnnnnnnnnnnnnnnnnnnnnnnnnnnnnnnnnnnnnnnnnnnnnnnnnnnnnnnnnnnnnnnnnnnnnnnnnnnnnnnnnnnnnnnnnnnnnnnnnnnnnnnnnnnnnnnnnnnnnnnnnnnnnnnnnnnnnnnnnnnnnnnnnnnnnnnnnnnnnnnnnnnnnnnnnnnnnnnnnnnnnnnnnnnnnnnnnnnnnnnnnnnnnnnnnnnnnnnnnnnnnnnnnnnnnnnnnnnnnnnnnnnnnnnnnnnnnnnnnnnnnnnnnnnnnnnnnnnnnnnnnnnnnnnnnnnnnnnnnnnnnnnnnnnnnnnnnnnnnnnnnnnnnnnnnnnnnnnnnnnnnnnnnnnnnnnnnnnnnnnnnnnnnnnnnnnnnnnnnnnnnnnnnnnnnnnnnnnnnnnnnnnnnnnnnnnnnnnnnnnnnnnnnnnnnnnnnnnnnnnnnnnnnnnnnnnnnnnnnnnnnnnnnnnnnnnnnnnnnnnnnnnnnnnnnnnnnnnnnnnnnnnnnnnnnnnnnnnnnnnnnnnnnnnnnnnnnnnnnnnnnnnnnnnnnnnnnnnnnnnnnnnnnnnnnnnnnnnnnnnnnnnnnnnnnnnnnnnnnnnnnnnnnnnnnnnnnnnnnnnnnnnnnnnnnnnnnnnnnnnnnnnnnnnnnnnnnnnnnnnnnnnnnnnnnnnnnnnnnnnnnnnnnnnnnnnnnnnnnnnnnnnnnnnnnnnnnnnnnnnnnnnnnnnnnnnnnnnnnnnnnnnnnnnnnnnnnnnnnnnnnnnnnnnnnnnnnnnnnnnnnnnnnnnnnnnnnnnnnnnnnnnnnnnnnnnnnnnnnnnnnnnnnnnnnnnnnnnnnnnnnnnnnnnnnnnnnnnnnnnnnnnnnnnnnnnnnnnnnnnnnnnnnnnnnnnnnnnnnnnnnnnnnnnnnnnnnnnnnnnnnnnnnnnnnnnnnnnnnnnnnnnnnnnnnnnnnnnnnnnnnnnnnnnnnnnnnnnnnnnnnnnnnnnnnnnnnnnnnnnnnnnnnnnnnnnnnnnnnnnnnnnnnnnnnnnnnnnnnnnnnnnnnnnnnnnnnnnnnnnnnnnnnnnnnnnnnnnnnnnnnnnnnnnnnnnnnnnnnnnnnnnnnnnnnnnnnnnnnnnnnnnnnnnnnnnnnnnnnnnnnnnnnnnnnnnnnnnnnnnnnnnnnnnnnnnnnnnnnnnnnnnnnnnnnnnnnnnnnnnnnnnnnnnnnnnnnnnnnnnnnnnnnnnnnnnnnnnnnnnnnnnnnnnnnnnnnnnnnnnnnnnnnnnnnnnnnnnnnnnnnnnnnnnnnnnnnnnnnnnnnnnnnnnnnnnnnnnnnnnnnnnnnnnnnnnnnnnnnnnnnnnnnnnnnnnnnnnnnnnnnnnnnnnnnnnnnnnnnnnnnnnnnnnnnnnnnnnnnnnnnnnnnnnnnnnnnnnnnnnnnnnnnnnnnnnnnnnnnnnnnnnnnnnnnnnnnnnnnnnnnnnnnnnnnnnnnnnnnnnnnnnnnnnnnnnnnnnnnnnnnnnnnnnnnnnnnnnnnnnnnnnnnnnnnnnnnnnnnnnnnnnnnnnnnnnnnnnnnnnnnnnnnnnnnnnnnnnnnnnnnnnnnnnnnnnnnnnnnnnnnnnnnnnnnnnnnnnnnnnnnnnnnnnnnnnnnnnnnnnnnnnnnnnnnnnnnnnnnnnnnnnnnnnnnnnnnnnnnnnnnnnnnnnnnnnnnnnnnnnnnnnnnnnnnnnnnnnnnnnnnnnnnnnnnnnnnnnnnnnnnnnnnnnnnnnnnnnnnnnnnnnnnnnnnnnnnnnnnnnnnnnnnnnnnnnnnnnnnnnnnnnnnnnnnnnnnnnnnnnnnnnnnnnnnnnnnnnnnnnnnnnnnnnnnnnnnnnnnnnnnnnnnnnnnnnnnnnnnnnnnnnnnnnnnnnnnnnnnnnnnnnnnnnnnnnnnnnnnnnnnnnnnnnnnnnnnnnnnnnnnnnnnnnnnnnnnnnnnnnnnnnnnnnnnnnnnnnnnnnnnnnnnnnnnnnnnnnnnnnnnnnnnnnnnnnnnnnnnnnnnnnnnnnnnnnnnnnnnnnnnnnnnnnnnnnnnnnnnnnnnnnnnnnnnnnnnnnnnnnnnnnnnnnnnnnnnnnnnnnnnnnnnnnnnnnnnnnnnnnnnnnnnnnnnnnnnnnnnnnnnnnnnnnnnnnnnnnnnnnnnnnnnnnnnnnnnnnnnnnnnnnnnnnnnnnnnnnnnnnnnnnnnnnnnnnnnnnnnnnnnnnnnnnnnnnnnnnnnnnnnnnnnnnnnnnnnnnnnnnnnnnnnnnnnnnnnnnnnnnnnnnnnnnnnnnnnnnnnnnnnnnnnnnnnnnnnnnnnnnnnnnnnnnnnnnnnnnnnnnnnnnnnnnnnnnnnnnnnnnnnnnnnnnnnnnnnnnnnnnnnnnnnnnnnnnnnnnnnnnnnnnnnnnnnnnnnnnnnnnnnnnnnnnnnnnnnnnnnnnnnnnnnnnnnnnnnnnnnnnnnnnnnnnnnnnnnnnnnnnnnnnnnnnnnnnnnnnnnnnnnnnnnnnnnnnnnnnnnnnnnnnnnnnnnnnnnnnnnnnnnnnnnnnnnnnnnnnnnnnnnnnnnnnnnnnnnnnnnnnnnnnnnnnnnnnnnnnnnnnnnnnnnnnnnnnnnnnnnnnnnnnnnnnnnnnnnnnnnnnnnnnnnnnnnnnnnnnnnnnnnnnnnnnnnnnnnnnnnnnnnnnnnnnnnnnnnnnnnnnnnnnnnnnnnnnnnnnnnnnnnnnnnnnnnnnnnnnnnnnnnnnnnnnnnnnnnnnnnnnnnnnnnnnnnnnnnnnnnnnnnnnnnnnnnnnnnnnnnnnnnnnnnnnnnnnnnnnnnnnnnnnnnnnnnnnnnnnnnnnnnnnnnnnnnnnnnnnnnnnnnnnnnnnnnnnnnnnnnnnnnnnnnnnnnnnnnnnnnnnnnnnnnnnnnnnnnnnnnnnnnnnnnnnnnnnnnnnnnnnnnnnnnnnnnnnnnnnnnnnnnnnnnnnnnnnnnnnnnnnnnnnnnnnnnnnnnnnnnnnnnnnnnnnnnnnnnnnnnnnnnnnnnnnnnnnnnnnnnnnnnnnnnnnnnnnnnnnnnnnnnnnnnnnnnnnnnnnnnnnnnnnnnnnnnnnnnnnnnnnnnnnnnnnnnnnnnnnnnnnnnnnnnnnnnnnnnnnnnnnnnnnnnnnnnnnnnnnnnnnnnnnnnnnnnnnnnnnnnnnnnnnnnnnnnnnnnnnnnnnnnnnnnnnnnnnnnnnnnnnnnnnnnnnnnnnnnnnnnnnnnnnnnnnnnnnnnnnnnnnnnnnnnnnnnnnnnnnnnnnnnnnnnnnnnnnnnnnnnnnnnnnnnnnnnnnnnnnnnnnnnnnnnnnnnnnnnnnnnnnnnnnnnnnnnnnnnnnnnnnnnnnnnnnnnnnnnnnnnnnnnnnnnnnnnnnnnnnnnnnnnnnnnnnnnnnnnnnnnnnnnnnnnnnnnnnnnnnnnnnnnnnnnnnnnnnnnnnnnnnnnnnnnnnnnnnnnnnnnnnnnnnnnnnnnnnnnnnnnnnnnnnnnnnnnnnnnnnnnnnnnnnnnnnnnnnnnnnnnnnnnnnnnnnnnnnnnnnnnnnnnnnnnnnnnnnnnnnnnnnnnnnnnnnnnnnnnnnnnnnnnnnnnnnnnnnnnnnnnnnnnnnnnnnnnnnnnnnnnnnnnnnnnnnnnnnnnnnnnnnnnnnnnnnnnnnnnnnnnnnnnnnnnnnnnnnnnnnnnnnnnnnnnnnnnnnnnnnnnnnnnnnnnnnnnnnnnnnnnnnnnnnnnnnnnnnnnnnnnnnnnnnnnnnnnnnnnnnnnnnnnnnnnnnnnnnnnnnnnnnnnnnnnnnnnnnnnnnnnnnnnnnnnnnnnnnnnnnnnnnnnnnnnnnnnnnnnnnnnnnnnnnnnnnnnnnnnnnnnnnnnnnnnnnnnnnnnnnnnnnnnnnnnnnnnnnnnnnnnnnnnnnnnnnnnnnnnnnnnnnnnnnnnnnnnnnnnnnnnnnnnnnnnnnnnnnnnnnnnnnnnnnnnnnnnnnnnnnnnnnnnnnnnnnnnnnnnnnnnnnnnnnnnnnnnnnnnnnnnnnnnnnnnnnnnnnnnnnnnnnnnnnnnnnnnnnnnnnnnnnnnnnnnnnnnnnnnnnnnnnnnnnnnnnnnnnnnnnnnnnnnnnnnnnnnnnnnnnnnnnnnnnnnnnnnnnnnnnnnnnnnnnnnnnnnnnnnnnnnnnnnnnnnnnnnnnnnnnnnnnnnnnnnnnnnnnnnnnnnnnnnnnnnnnnnnnnnnnnnnnnnnnnnnnnnnnnnnnnnnnnnnnnnnnnnnnnnnnnnnnnnnnnnnnnnnnnnnnnnnnnnnnnnnnnnnnnnnnnnnnnnnnnnnnnnnnnnnnnnnnnnnnnnnnnnnnnnnnnnnnnnnnnnnnnnnnnnnnnnnnnnnnnnnnnnnnnnnnnnnnnnnnnnnnnnnnnnnnnnnnnnnnnnnnnnnnnnnnnnnnnnnnnnnnnnnnnnnnnnnnnnnnnnnnnnnnnnnnnnnnnnnnnnnnnnnnnnnnnnnnnnnnnnnnnnnnnnnnnnnnnnnnnnnnnnnnnnnnnnnnnnnnnnnnnnnnnnnnnnnnnnnnnnnnnnnnnnnnnnnnnnnnnnnnnnnnnnnnnnnnnnnnnnnnnnnnnnnnnnnnnnnnnnnnnnnnnnnnnnnnnnnnnnnnnnnnnnnnnnnnnnnnnnnnnnnnnnnnnnnnnnnnnnnnnnnnnnnnnnnnnnnnnnnnnnnnnnnnnnnnnnnnnnnnnnnnnnnnnnnnnnnnnnnnnnnnnnnnnnnnnnnnnnnnnnnnnnnnnnnnnnnnnnnnnnnnnnnnnnnnnnnnnnnnnnnnnnnnnnnnnnnnnnnnnnnnnnnnnnnnnnnnnnnnnnnnnnnnnnnnnnnnnnnnnnnnnnnnnnnnnnnnnnnnnnnnnnnnnnnnnnnnnnnnnnnnnnnnnnnnnnnnnnnnnnnnnnnnnnnnnnnnnnnnnnnnnnnnnnnnnnnnnnnnnnnnnnnnnnnnnnnnnnnnnnnnnnnnnnnnnnnnnnnnnnnnnnnnnnnnnnnnnnnnnnnnnnnnnnnnnnnnnnnnnnnnnnnnnnnnnnnnnnnnnnnnnnnnnnnnnnnnnnnnnnnnnnnnnnnnnnnnnnnnnnnnnnnnnnnnnnnnnnnnnnnnnnnnnnnnnnnnnnnnnnnnnnnnnnnnnnnnnnnnnnnnnnnnnnnnnnnnnnnnnnnnnnnnnnnnnnnnnnnnnnnnnnnnnnnnnnnnnnnnnnnnnnnnnnnnnnnnnnnnnnnnnnnnnnnnnnnnnnnnnnnnnnnnnnnnnnnnnnnnnnnnnnnnnnnnnnnnnnnnnnnnnnnnnnnnnnnnnnnnnnnnnnnnnnnnnnnnnnnnnnnnnnnnnnnnnnnnnnnnnnnnnnnnnnnnnnnnnnnnnnnnnnnnnnnnnnnnnnnnnnnnnnnnnnnnnnnnnnnnnnnnnnnnnnnnnnnnnnnnnnnnnnnnnnnnnnnnnnnnnnnnnnnnnnnnnnnnnnnnnnnnnnnnnnnnnnnnnnnnnnnnnnnnnnnnnnnnnnnnnnnnnnnnnnnnnnnnnnnnnnnnnnnnnnnnnnnnnnnnnnnnnnnnnnnnnnnnnnnnnnnnnnnnnnnnnnnnnnnnnnnnnnnnnnnnnnnnnnnnnnnnnnnnnnnnnnnnnnnnnnnnnnnnnnnnnnnnnnnnnnnnnnnnnnnnnnnnnnnnnnnnnnnnnnnnnnnnnnnnnnnnnnnnnnnnnnnnnnnnnnnnnnnnnnnnnnnnnnnnnnnnnnnnnnnnnnnnnnnnnnnnnnnnnnnnnnnnnnnnnnnnnnnnnnnnnnnnnnnnnnnnnnnnnnnnnnnnnnnnnnnnnnnnnnnnnnnnnnnnnnnnnnnnnnnnnnnnnnnnnnnnnnnnnnnnnnnnnnnnnnnnnnnnnnnnnnnnnnnnnnnnnnnnnnnnnnnnnnnnnnnnnnnnnnnnnnnnnnnnnnnnnnnnnnnnnnnnnnnnnnnnnnnnnnnnnnnnnnnnnnnnnnnnnnnnnnnnnnnnnnnnnnnnnnnnnnnnnnnnnnnnnnnnnnnnnnnnnnnnnnnnnnnnnnnnnnnnnnnnnnnnnnnnnnnnnnnnnnnnnnnnnnnnnnnnnnnnnnnnnnnnnnnnnnnnnnnnnnnnnnnnnnnnnnnnnnnnnnnnnnnnnnnnnnnnnnnnnnnnnnnnnnnnnnnnnnnnnnnnnnnnnnnnnnnnnnnnnnnnnnnnnnnnnnnnnnnnnnnnnnnnnnnnnnnnnnnnnnnnnnnnnnnnnnnnnnnnnnnnnnnnnnnnnnnnnnnnnnnnnnnnnnnnnnnnnnnnnnnnnnnnnnnnnnnnnnnnnnnnnnnnnnnnnnnnnnnnnnnnnnnnnnnnnnnnnnnnnnnnnnnnnnnnnnnnnnnnnnnnnnnnnnnnnnnnnnnnnnnnnnnnnnnnnnnnnnnnnnnnnnnnnnnnnnnnnnnnnnnnnnnnnnnnnnnnnnnnnnnnnnnnnnnnnnnnnnnnnnnnnnnnnnnnnnnnnnnnnnnnnnnnnnnnnnnnnnnnnnnnnnnnnnnnnnnnnnnnnnnnnnnnnnnnnnnnnnnnnnnnnnnnnnnnnnnnnnnnnnnnnnnnnnnnnnnnnnnnnnnnnnnnnnnnnnnnnnnnnnnnnnnnnnnnnnnnnnnnnnnnnnnnnnnnnnnnnnnnnnnnnnnnnnnnnnnnnnnnnnnnnnnnnnnnnnnnnnnnnnnnnnnnnnnnnnnnnnnnnnnnnnnnnnnnnnnnnnnnnnnnnnnnnnnnnnnnnnnnnnnnnnnnnnnnnnnnnnnnnnnnnnnnnnnnnnnnnnnnnnnnnnnnnnnnnnnnnnnnnnnnnnnnnnnnnnnnnnnnnnnnnnnnnnnnnnnnnnnnnnnnnnnnnnnnnnnnnnnnnnnnnnnnnnnnnnnnnnnnnnnnnnnnnnnnnnnnnnnnnnnnnnnnnnnnnnnnnnnnnnnnnnnnnnnnnnnnnnnnnnnnnnnnnnnnnnnnnnnnnnnnnnnnnnnnnnnnnnnnnnnnnnnnnnnnnnnnnnnnnnnnnnnnnnnnnnnnnnnnnnnnnnnnnnnnnnnnnnnnnnnnnnnnnnnnnnnnnnnnnnnnnnnnnnnnnnnnnnnnnnnnnnnnnnnnnnnnnnnnnnnnnnnnnnnnnnnnnnnnnnnnnnnnnnnnnnnnnnnnnnnnnnnnnnnnnnnnnnnnnnnnnnnnnnnnnnnnnnnnnnnnnnnnnnnnnnnnnnnnnnnnnnnnnnnnnnnnnnnnnnnnnnnnnnnnnnnnnnnnnnnnnnnnnnnnnnnnnnnnnnnnnnnnnnnnnnnnnnnnnnnnnnnnnnnnnnnnnnnnnnnnnnnnnnnnnnnnnnnnnnnnnnnnnnnnnnnnnnnnnnnnnnnnnnnnnnnnnnnnnnnnnnnnnnnnnnnnnnnnnnnnnnnnnnnnnnnnnnnnnnnnnnnnnnnnnnnnnnnnnnnnnnnnnnnnnnnnnnnnnnnnnnnnnnnnnnnnnnnnnnnnnnnnnnnnnnnnnnnnnnnnnnnnnnnnnnnnnnnnnnnnnnnnnnnnnnnnnnnnnnnnnnnnnnnnnnnnnnnnnnnnnnnnnnnnnnnnnnnnnnnnnnnnnnnnnnnnnnnnnnnnnnnnnnnnnnnnnnnnnnnnnnnnnnnnnnnnnnnnnnnnnnnnnnnnnnnnnnnnnnnnnnnnnnnnnnnnnnnnnnnnnnnnnnnnnnnnnnnnnnnnnnnnnnnnnnnnnnnnnnnnnnnnnnnnnnnnnnnnnnnnnnnnnnnnnnnnnnnnnnnnnnnnnnnnnnnnnnnnnnnnnnnnnnnnnnnnnnnnnnnnnnnnnnnnnnnnnnnnnnnnnnnnnnnnnnnnnnnnnnnnnnnnnnnnnnnnnnnnnnnnnnnnnnnnnnnnnnnnnnnnnnnnnnnnnnnnnnnnnnnnnnnnnnnnnnnnnnnnnnnnnnnnnnnnnnnnnnnnnnnnnnnnnnnnnnnnnnnnnnnnnnnnnnnnnnnnnnnnnnnnnnnnnnnnnnnnnnnnnnnnnnnnnnnnnnnnnnnnnnnnnnnnnnnnnnnnnnnnnnnnnnnnnnnnnnnnnnnnnnnnnnnnnnnnnnnnnnnnnnnnnnnnnnnnnnnnnnnnnnnnnnnnnnnnnnnnnnnnnnnnnnnnnnnnnnnnnnnnnnnnnnnnnnnnnnnnnnnnnnnnnnnnnnnnnnnnnnnnnnnnnnnnnnnnnnnnnnnnnnnnnnnnnnnnnnnnnnnnnnnnnnnnnnnnnnnnnnnnnnnnnnnnnnnnnnnnnnnnnnnnnnnnnnnnnnnnnnnnnnnnnnnnnnnnnnnnnnnnnnnnnnnnnnnnnnnnnnnnnnnnnnnnnnnnnnnnnnnnnnnnnnnnnnnnnnnnnnnnnnnnnnnnnnnnnnnnnnnnnnnnnnnnnnnnnnnnnnnnnnnnnnnnnnnnnnnnnnnnnnnnnnnnnnnnnnnnnnnnnnnnnnnnnnnnnnnnnnnnnnnnnnnnnnnnnnnnnnnnnnnnnnnnnnnnnnnnnnnnnnnnnnnnnnnnnnnnnnnnnnnnnnnnnnnnnnnnnnnnnnnnnnnnnnnnnnnnnnnnnnnnnnnnnnnnnnnnnnnnnnnnnnnnnnnnnnnnnnnnnnnnnnnnnnnnnnnnnnnnnnnnnnnnnnnnnnnnnnnnnnnnnnnnnnnnnnnnnnnnnnnnnnnnnnnnnnnnnnnnnnnnnnnnnnnnnnnnnnnnnnnnnnnnnnnnnnnnnnnnnnnnnnnnnnnnnnnnnnnnnnnnnnnnnnnnnnnnnnnnnnnnnnnnnnnnnnnnnnnnnnnnnnnnnnnnnnnnnnnnnnnnnnnnnnnnnnnnnnnnnnnnnnnnnnnnnnnnnnnnnnnnnnnnnnnnnnnnnnnnnnnnnnnnnnnnnnnnnnnnnnnnnnnnnnnnnnnnnnnnnnnnnnnnnnnnnnnnnnnnnnnnnnnnnnnnnnnnnnnnnnnnnnnnnnnnnnnnnnnnnnnnnnnnnnnnnnnnnnnnnnnnnnnnnnnnnnnnnnnnnnnnnnnnnnnnnnnnnnnnnnnnnnnnnnnnnnnnnnnnnnnnnnnnnnnnnnnnnnnnnnnnnnnnnnnnnnnnnnnnnnnnnnnnnnnnnnnnnnnnnnnnnnnnnnnnnnnnnnnnnnnnnnnnnnnnnnnnnnnnnnnnnnnnnnnnnnnnnnnnnnnnnnnnnnnnnnnnnnnnnnnnnnnnnnnnnnnnnnnnnnnnnnnnnnnnnnnnnnnnnnnnnnnnnnnnnnnnnnnnnnnnnnnnnnnnnnnnnnnnnnnnnnnnnnnnnnnnnnnnnnnnnnnnnnnnnnnnnnnnnnnnnnnnnnnnnnnnnnnnnnnnnnnnnnnnnnnnnnnnnnnnnnnnnnnnnnnnnnnnnnnnnnnnnnnnnnnnnnnnnnnnnnnnnnnnnnnnnnnnnnnnnnnnnnnnnnnnnnnnnnnnnnnnnnnnnnnnnnnnnnnnnnnnnnnnnnnnnnnnnnnnnnnnnnnnnnnnnnnnnnnnnnnnnnnnnnnnnnnnnnnnnnnnnnnnnnnnnnnnnnnnnnnnnnnnnnnnnnnnnnnnnnnnnnnnnnnnnnnnnnnnnnnnnnnnnnnnnnnnnnnnnnnnnnnnnnnnnnnnnnnnnnnnnnnnnnnnnnnnnnnnnnnnnnnnnnnnnnnnnnnnnnnnnnnnnnnnnnnnnnnnnnnnnnnnnnnnnnnnnnnnnnnnnnnnnnnnnnnnnnnnnnnnnnnnnnnnnnnnnnnnnnnnnnnnnnnnnnnnnnnnnnnnnnnnnnnnnnnnnnnnnnnnnnnnnnnnnnnnnnnnnnnnnnnnnnnnnnnnnnnnnnnnnnnnnnnnnnnnnnnnnnnnnnnnnnnnnnnnnnnnnnnnnnnnnnnnnnnnnnnnnnnnnnnnnnnnnnnnnnnnnnnnnnnnnnnnnnnnnnnnnnnnnnnnnnnnnnnnnnnnnnnnnnnnnnnnnnnnnnnnnnnnnnnnnnnnnnnnnnnnnnnnnnnnnnnnnnnnnnnnnnnnnnnnnnnnnnnnnnnnnnnnnnnnnnnnnnnnnnnnnnnnnnnnnnnnnnnnnnnnnnnnnnnnnnnnnnnnnnnnnnnnnnnnnnnnnnnnnnnnnnnnnnnnnnnnnnnnnnnnnnnnnnnnnnnnnnnnnnnnnnnnnnnnnnnnnnnnnnnnnnnnnnnnnnnnnnnnnnnnnnnnnnnnnnnnnnnnnnnnnnnnnnnnnnnnnnnnnnnnnnnnnnnnnnnnnnnnnnnnnnnnnnnnnnnnnnnnnnnnnnnnnnnnnnnnnnnnnnnnnnnnnnnnnnnnnnnnnnnnnnnnnnnnnnnnnnnnnnnnnnnnnnnnnnnnnnnnnnnnnnnnnnnnnnnnnnnnnnnnnnnnnnnnnnnnnnnnnnnnnnnnnnnnnnnnnnnnnnnnnnnnnnnnnnnnnnnnnnnnnnnnnnnnnnnnnnnnnnnnnnnnnnnnnnnnnnnnnnnnnnnnnnnnnnnnnnnnnnnnnnnnnnnnnnnnnnnnnnnnnnnnnnnnnnnnnnnnnnnnnnnnnnnnnnnnnnnnnnnnnnnnnnnnnnnnnnnnnnnnnnnnnnnnnnnnnnnnnnnnnnnnnnnnnnnnnnnnnnnnnnnnnnnnnnnnnnnnnnnnnnnnnnnnnnnnnnnnnnnnnnnnnnnnnnnnnnnnnnnnnnnnnnnnnnnnnnnnnnnnnnnnnnnnnnnnnnnnnnnnnnnnnnnnnnnnnnnnnnnnnnnnnnnnnnnnnnnnnnnnnnnnnnnnnnnnnnnnnnnnnnnnnnnnnnnnnnnnnnnnnnnnnnnnnnnnnnnnnnnnnnnnnnnnnnnnnnnnnnnnnnnnnnnnnnnnnnnnnnnnnnnnnnnnnnnnnnnnnnnnnnnnnnnnnnnnnnnnnnnnnnnnnnnnnnnnnnnnnnnnnnnnnnnnnnnnnnnnnnnnnnnnnnnnnnnnnnnnnnnnnnnnnnnnnnnnnnnnnnnnnnnnnnnnnnnnnnnnnnnnnnnnnnnnnnnnnnnnnnnnnnnnnnnnnnnnnnnnnnnnnnnnnnnnnnnnnnnnnnnnnnnnnnnnnnnnnnnnnnnnnnnnnnnnnnnnnnnnnnnnnnnnnnnnnnnnnnnnnnnnnnnnnnnnnnnnnnnnnnnnnnnnnnnnnnnnnnnnnnnnnnnnnnnnnnnnnnnnnnnnnnnnnnnnnnnnnnnnnnnnnnnnnnnnnnnnnnnnnnnnnnnnnnnnnnnnnnnnnnnnnnnnnnnnnnnnnnnnnnnnnnnnnnnnnnnnnnnnnnnnnnnnnnnnnnnnnnnnnnnnnnnnnnnnnnnnnnnnnnnnnnnnnnnnnnnnnnnnnnnnnnnnnnnnnnnnnnnnnnnnnnnnnnnnnnnnnnnnnnnnnnnnnnnnnnnnnnnnnnnnnnnnnnnnnnnnnnnnnnnnnnnnnnnnnnnnnnnnnnnnnnnnnnnnnnnnnnnnnnnnnnnnnnnnnnnnnnnnnnnnnnnnnnnnnnnnnnnnnnnnnnnnnnnnnnnnnnnnnnnnnnnnnnnnnnnnnnnnnnnnnnnnnnnnnnnnnnnnnnnnnnnnnnnnnnnnnnnnnnnnnnnnnnnnnnnnnnnnnnnnnnnnnnnnnnnnnnnnnnnnnnnnnnnnnnnnnnnnnnnnnnnnnnnnnnnnnnnnnnnnnnnnnnnnnnnnnnnnnnnnnnnnnnnnnnnnnnnnnnnnnnnnnnnnnnnnnnnnnnnnnnnnnnnnnnnnnnnnnnnnnnnnnnnnnnnnnnnnnnnnnnnnnnnnnnnnnnnnnnnnnnnnnnnnnnnnnnnnnnnnnnnnnnnnnnnnnnnnnnnnnnnnnnnnnnnnnnnnnnnnnnnnnnnnnnnnnnnnnnnnnnnnnnnnnnnnnnnnnnnnnnnnnnnnnnnnnnnnnnnnnnnnnnnnnnnnnnnnnnnnnnnnnnnnnnnnnnnnnnnnnnnnnnnnnnnnnnnnnnnnnnnnnnnnnnnnnnnnnnnnnnnnnnnnnnnnnnnnnnnnnnnnnnnnnnnnnnnnnnnnnnnnnnnnnnnnnnnnnnnnnnnnnnnnnnnnnnnnnnnnnnnnnnnnnnnnnnnnnnnnnnnnnnnnnnnnnnnnnnnnnnnnnnnnnnnnnnnnnnnnnnnnnnnnnnnnnnnnnnnnnnnnnnnnnnnnnnnnnnnnnnnnnnnnnnnnnnnnnnnnnnnnnnnnnnnnnnnnnnnnnnnnnnnnnnnnnnnnnnnnnnnnnnnnnnnnnnnnnnnnnnnnnnnnnnnnnnnnnnnnnnnnnnnnnnnnnnnnnnnnnnnnnnnnnnnnnnnnnnnnnnnnnnnnnnnnnnnnnnnnnnnnnnnnnnnnnnnnnnnnnnnnnnnnnnnnnnnnnnnnnnnnnnnnnnnnnnnnnnnnnnnnnnnnnnnnnnnnnnnnnnnnnnnnnnnnnnnnnnnnnnnnnnnnnnnnnnnnnnnnnnnnnnnnnnnnnnnnnnnnnnnnnnnnnnnnnnnnnnnnnnnnnnnnnnnnnnnnnnnnnnnnnnnnnnnnnnnnnnnnnnnnnnnnnnnnnnnnnnnnnnnnnnnnnnnnnnnnnnnnnnnnnnnnnnnnnnnnnnnnnnnnnnnnnnnnnnnnnnnnnnnnnnnnnnnnnnnnnnnnnnnnnnnnnnnnnnnnnnnnnnnnnnnnnnnnnnnnnnnnnnnnnnnnnnnnnnnnnnnnnnnnnnnnnnnnnnnnnnnnnnnnnnnnnnnnnnnnnnnnnnnnnnnnnnnnnnnnnnnnnnnnnnnnnnnnnnnnnnnnnnnnnnnnnnnnnnnnnnnnnnnnnnnnnnnnnnnnnnnnnnnnnnnnnnnnnnnnnnnnnnnnnnnnnnnnnnnnnnnnnnnnnnnnnnnnnnnnnnnnnnnnnnnnnnnnnnnnnnnnnnnnnnnnnnnnnnnnnnnnnnnnnnnnnnnnnnnnnnnnnnnnnnnnnnnnnnnnnnnnnnnnnnnnnnnnnnnnnnnnnnnnnnnnnnnnnnnnnnnnnnnnnnnnnnnnnnnnnnnnnnnnnnnnnnnnnnnnnnnnnnnnnnnnnnnnnnnnnnnnnnnnnnnnnnnnnnnnnnnnnnnnnnnnnnnnnnnnnnnnnnnnnnnnnnnnnnnnnnnnnnnnnnnnnnnnnnnnnnnnnnnnnnnnnnnnnnnnnnnnnnnnnnnnnnnnnnnnnnnnnnnnnnnnnnnnnnnnnnnnnnnnnnnnnnnnnnnnnnnnnnnnnnnnnnnnnnnnnnnnnnnnnnnnnnnnnnnnnnnnnnnnnnnnnnnnnnnnnnnnnnnnnnnnnnnnnnnnnnnnnnnnnnnnnnnnnnnnnnnnnnnnnnnnnnnnnnnnnnnnnnnnnnnnnnnnnnnnnnnnnnnnnnnnnnnnnnnnnnnnnnnnnnnnnnnnnnnnnnnnnnnnnnnnnnnnnnnnnnnnnnnnnnnnnnnnnnnnnnnnnnnnnnnnnnnnnnnnnnnnnnnnnnnnnnnnnnnnnnnnnnnnnnnnnnnnnnnnnnnnnnnnnnnnnnnnnnnnnnnnnnnnnnnnnnnnnnnnnnnnnnnnnnnnnnnnnnnnnnnnnnnnnnnnnnnnnnnnnnnnnnnnnnnnnnnnnnnnnnnnnnnnnnnnnnnnnnnnnnnnnnnnnnnnnnnnnnnnnnnnnnnnnnnnnnnnnnnnnnnnnnnnnnnnnnnnnnnnnnnnnnnnnnnnnnnnnnnnnnnnnnnnnnnnnnnnnnnnnnnnnnnnnnnnnnnnnnnnnnnnnnnnnnnnnnnnnnnnnnnnnnnnnnnnnnnnnnnnnnnnnnnnnnnnnnnnnnnnnnnnnnnnnnnnnnnnnnnnnnnnnnnnnnnnnnnnnnnnnnnnnnnnnnnnnnnnnnnnnnnnnnnnnnnnnnnnnnnnnnnnnnnnnnnnnnnnnnnnnnnnnnnnnnnnnnnnnnnnnnnnnnnnnnnnnnnnnnnnnnnnnnnnnnnnnnnnnnnnnnnnnnnnnnnnnnnnnnnnnnnnnnnnnnnnnnnnnnnnnnnnnnnnnnnnnnnnnnnnnnnnnnnnnnnnnnnnnnnnnnnnnnnnnnnnnnnnnnnnnnnnnnnnnnnnnnnnnnnnnnnnnnnnnnnnnnnnnnnnnnnnnnnnnnnnnnnnnnnnnnnnnnnnnnnnnnnnnnnnnnnnnnnnnnnnnnnnnnnnnnnnnnnnnnnnnnnnnnnnnnnnnnnnnnnnnnnnnnnnnnnnnnnnnnnnnnnnnnnnnnnnnnnnnnnnnnnnnnnnnnnnnnnnnnnnnnnnnnnnnnnnnnnnnnnnnnnnnnnnnnnnnnnnnnnnnnnnnnnnnnnnnnnnnnnnnnnnnnnnnnnnnnnnnnnnnnnnnnnnnnnnnnnnnnnnnnnnnnnnnnnnnnnnnnnnnnnnnnnnnnnnnnnnnnnnnnnnnnnnnnnnnnnnnnnnnnnnnnnnnnnnnnnnnnnnnnnnnnnnnnnnnnnnnnnnnnnnnnnnnnnnnnnnnnnnnnnnnnnnnnnnnnnnnnnnnnnnnnnnnnnnnnnnnnnnnnnnnnnnnnnnnnnnnnnnnnnnnnnnnnnnnnnnnnnnnnnnnnnnnnnnnnnnnnnnnnnnnnnnnnnnnnnnnnnnnnnnnnnnnnnnnnnnnnnnnnnnnnnnnnnnnnnnnnnnnnnnnnnnnnnnnnnnnnnnnnnnnnnnnnnnnnnnnnnnnnnnnnnnnnnnnnnnnnnnnnnnnnnnnnnnnnnnnnnnnnnnnnnnnnnnnnnnnnnnnnnnnnnnnnnnnnnnnnnnnnnnnnnnnnnnnnnnnnnnnnnnnnnnnnnnnnnnnnnnnnnnnnnnnnnnnnnnnnnnnnnnnnnnnnnnnnnnnnnnnnnnnnnnnnnnnnnnnnnnnnnnnnnnnnnnnnnnnnnnnnnnnnnnnnnnnnnnnnnnnnnnnnnnnnnnnnnnnnnnnnnnnnnnnnnnnnnnnnnnnnnnnnnnnnnnnnnnnnnnnnnnnnnnnnnnnnnnnnnnnnnnnnnnnnnnnnnnnnnnnnnnnnnnnnnnnnnnnnnnnnnnnnnnnnnnnnnnnnnnnnnnnnnnnnnnnnnnnnnnnnnnnnnnnnnnnnnnnnnnnnnnnnnnnnnnnnnnnnnnnnnnnnnnnnnnnnnnnnnnnnnnnnnnnnnnnnnnnnnnnnnnnnnnnnnnnnnnnnnnnnnnnnnnnnnnnnnnnnnnnnnnnnnnnnnnnnnnnnnnnnnnnnnnnnnnnnnnnnnnnnnnnnnnnnnnnnnnnnnnnnnnnnnnnnnnnnnnnnnnnnnnnnnnnnnnnnnnnnnnnnnnnnnnnnnnnnnnnnnnnnnnnnnnnnnnnnnnnnnnnnnnnnnnnnnnnnnnnnnnnnnnnnnnnnnnnnnnnnnnnnnnnnnnnnnnnnnnnnnnnnnnnnnnnnnnnnnnnnnnnnnnnnnnnnnnnnnnnnnnnnnnnnnnnnnnnnnnnnnnnnnnnnnnnnnnnnnnnnnnnnnnnnnnnnnnnnnnnnnnnnnnnnnnnnnnnnnnnnnnnnnnnnnnnnnnnnnnnnnnnnnnnnnnnnnnnnnnnnnnnnnnnnnnnnnnnnnnnnnnnnnnnnnnnnnnnnnnnnnnnnnnnnnnnnnnnnnnnnnnnnnnnnnnnnnnnnnnnnnnnnnnnnnnnnnnnnnnnnnnnnnnnnnnnnnnnnnnnnnnnnnnnnnnnnnnnnnnnnnnnnnnnnnnnnnnnnnnnnnnnnnnnnnnnnnnnnnnnnnnnnnnnnnnnnnnnnnnnnnnnnnnnnnnnnnnnnnnnnnnnnnnnnnnnnnnnnnnnnnnnnnnnnnnnnnnnnnnnnnnnnnnnnnnnnnnnnnnnnnnnnnnnnnnnnnnnnnnnnnnnnnnnnnnnnnnnnnnnnnnnnnnnnnnnnnnnnnnnnnnnnnnnnnnnnnnnnnnnnnnnnnnnnnnnnnnnnnnnnnnnnnnnnnnnnnnnnnnnnnnnnnnnnnnnnnnnnnnnnnnnnnnnnnnnnnnnnnnnnnnnnnnnnnnnnnnnnnnnnnnnnnnnnnnnnnnnnnnnnnnnnnnnnnnnnnnnnnnnnnnnnnnnnnnnnnnnnnnnnnnnnnnnnnnnnnnnnnnnnnnnnnnnnnnnnnnnnnnnnnnnnnnnnnnnnnnnnnnnnnnnnnnnnnnnnnnnnnnnnnnnnnnnnnnnnnnnnnnnnnnnnnnnnnnnnnnnnnnnnnnnnnnnnnnnnnnnnnnnnnnnnnnnnnnnnnnnnnnnnnnnnnnnnnnnnnnnnnnnnnnnnnnnnnnnnnnnnnnnnnnnnnnnnnnnnnnnnnnnnnnnnnnnnnnnnnnnnnnnnnnnnnnnnnnnnnnnnnnnnnnnnnnnnnnnnnnnnnnnnnnnnnnnnnnnnnnnnnnnnnnnnnnnnnnnnnnnnnnnnnnnnnnnnnnnnnnnnnnnnnnnnnnnnnnnnnnnnnnnnnnnnnnnnnnnnnnnnnnnnnnnnnnnnnnnnnnnnnnnnnnnnnnnnnnnnnnnnnnnnnnnnnnnnnnnnnnnnnnnnnnnnnnnnnnnnnnnnnnnnnnnnnnnnnnnnnnnnnnnnnnnnnnnnnnnnnnnnnnnnnnnnnnnnnnnnnnnnnnnnnnnnnnnnnnnnnnnnnnnnnnnnnnnnnnnnnnnnnnnnnnnnnnnnnnnnnnnnnnnnnnnnnnnnnnnnnnnnnnnnnnnnnnnnnnnnnnnnnnnnnnnnnnnnnnnnnnnnnnnnnnnnnnnnnnnnnnnnnnnnnnnnnnnnnnnnnnnnnnnnnnnnnnnnnnnnnnnnnnnnnnnnnnnnnnnnnnnnnnnnnnnnnnnnnnnnnnnnnnnnnnnnnnnnnnnnnnnnnnnnnnnnnnnnnnnnnnnnnnnnnnnnnnnnnnnnnnnnnnnnnnnnnnnnnnnnnnnnnnnnnnnnnnnnnnnnnnnnnnnnnnnnnnnnnnnnnnnnnnnnnnnnnnnnnnnnnnnnnnnnnnnnnnnnnnnnnnnnnnnnnnnnnnnnnnnnnnnnnnnnnnnnnnnnnnnnnnnnnnnnnnnnnnnnnnnnnnnnnnnnnnnnnnnnnnnnnnnnnnnnnnnnnnnnnnnnnnnnnnnnnnnnnnnnnnnnnnnnnnnnnnnnnnnnnnnnnnnnnnnnnnnnnnnnnnnnnnnnnnnnnnnnnnnnnnnnnnnnnnnnnnnnnnnnnnnnnnnnnnnnnnnnnnnnnnnnnnnnnnnnnnnnnnnnnnnnnnnnnnnnnnnnnnnnnnnnnnnnnnnnnnnnnnnnnnnnnnnnnnnnnnnnnnnnnnnnnnnnnnnnnnnnnnnnnnnnnnnnnnnnnnnnnnnnnnnnnnnnnnnnnnnnnnnnnnnnnnnnnnnnnnnnnnnnnnnnnnnnnnnnnnnnnnnnnnnnnnnnnnnnnnnnnnnnnnnnnnnnnnnnnnnnnnnnnnnnnnnnnnnnnnnnnnnnnnnnnnnnnnnnnnnnnnnnnnnnnnnnnnnnnnnnnnnnnnnnnnnnnnnnnnnnnnnnnnnnnnnnnnnnnnnnnnnnnnnnnnnnnnnnnnnnnnnnnnnnnnnnnnnnnnnnnnnnnnnnnnnnnnnnnnnnnnnnnnnnnnnnnnnnnnnnnnnnnnnnnnnnnnnnnnnnnnnnnnnnnnnnnnnnnnnnnnnnnnnnnnnnnnnnnnnnnnnnnnnnnnnnnnnnnnnnnnnnnnnnnnnnnnnnnnnnnnnnnnnnnnnnnnnnnnnnnnnnnnnnnnnnnnnnnnnnnnnnnnnnnnnnnnnnnnnnnnnnnnnnnnnnnnnnnnnnnnnnnnnnnnnnnnnnnnnnnnnnnnnnnnnnnnnnnnnnnnnnnnnnnnnnnnnnnnnnnnnnnnnnnnnnnnnnnnnnnnnnnnnnnnnnnnnnnnnnnnnnnnnnnnnnnnnnnnnnnnnnnnnnnnnnnnnnnnnnnnnnnnnnnnnnnnnnnnnnnnnnnnnnnnnnnnnnnnnnnnnnnnnnnnnnnnnnnnnnnnnnnnnnnnnnnnnnnnnnnnnnnnnnnnnnnnnnnnnnnnnnnnnnnnnnnnnnnnnnnnnnnnnnnnnnnnnnnnnnnnnnnnnnnnnnnnnnnnnnnnnnnnnnnnnnnnnnnnnnnnnnnnnnnnnnnnnnnnnnnnnnnnnnnnnnnnnnnnnnnnnnnnnnnnnnnnnnnnnnnnnnnnnnnnnnnnnnnnnnnnnnnnnnnnnnnnnnnnnnnnnnnnnnnnnnnnnnnnnnnnnnnnnnnnnnnnnnnnnnnnnnnnnnnnnnnnnnnnnnnnnnnnnnnnnnnnnnnnnnnnnnnnnnnnnnnnnnnnnnnnnnnnnnnnnnnnnnnnnnnnnnnnnnnnnnnnnnnnnnnnnnnnnnnnnnnnnnnnnnnnnnnnnnnnnnnnnnnnnnnnnnnnnnnnnnnnnnnnnnnnnnnnnnnnnnnnnnnnnnnnnnnnnnnnnnnnnnnnnnnnnnnnnnnnnnnnnnnnnnnnnnnnnnnnnnnnnnnnnnnnnnnnnnnnnnnnnnnnnnnnnnnnnnnnnnnnnnnnnnnnnnnnnnnnnnnnnnnnnnnnnnnnnnnnnnnnnnnnnnnnnnnnnnnnnnnnnnnnnnnnnnnnnnnnnnnnnnnnnnnnnnnnnnnnnnnnnnnnnnnnnnnnnnnnnnnnnnnnnnnnnnnnnnnnnnnnnnnnnnnnnnnnnnnnnnnnnnnnnnnnnnnnnnnnnnnnnnnnnnnnnnnnnnnnnnnnnnnnnnnnnnnnnnnnnnnnnnnnnnnnnnnnnnnnnnnnnnnnnnnnnnnnnnnnnnnnnnnnnnnnnnnnnnnnnnnnnnnnnnnnnnnnnnnnnnnnnnnnnnnnnnnnnnnnnnnnnnnnnnnnnnnnnnnnnnnnnnnnnnnnnnnnnnnnnnnnnnnnnnnnnnnnnnnnnnnnnnnnnnnnnnnnnnnnnnnnnnnnnnnnnnnnnnnnnnnnnnnnnnnnnnnnnnnnnnnnnnnnnnnnnnnnnnnnnnnnnnnnnnnnnnnnnnnnnnnnnnnnnnnnnnnnnnnnnnnnnnnnnnnnnnnnnnnnnnnnnnnnnnnnnnnnnnnnnnnnnnnnnnnnnnnnnnnnnnnnnnnnnnnnnnnnnnnnnnnnnnnnnnnnnnnnnnnnnnnnnnnnnnnnnnnnnnnnnnnnnnnnnnnnnnnnnnnnnnnnnnnnnnnnnnnnnnnnnnnnnnnnnnnnnnnnnnnnnnnnnnnnnnnnnnnnnnnnnnnnnnnnnnnnnnnnnnnnnnnnnnnnnnnnnnnnnnnnnnnnnnnnnnnnnnnnnnnnnnnnnnnnnnnnnnnnnnnnnnnnnnnnnnnnnnnnnnnnnnnnnnnnnnnnnnnnnnnnnnnnnnnnnnnnnnnnnnnnnnnnnnnnnnnnnnnnnnnnnnnnnnnnnnnnnnnnnnnnnnnnnnnnnnnnnnnnnnnnnnnnnnnnnnnnnnnnnnnnnnnnnnnnnnnnnnnnnnnnnnnnnnnnnnnnnnnnnnnnnnnnnnnnnnnnnnnnnnnnnnnnnnnnnnnnnnnnnnnnnnnnnnnnnnnnnnnnnnnnnnnnnnnnnnnnnnnnnnnnnnnnnnnnnnnnnnnnnnnnnnnnnnnnnnnnnnnnnnnnnnnnnnnnnnnnnnnnnnnnnnnnnnnnnnnnnnnnnnnnnnnnnnnnnnnnnnnnnnnnnnnnnnnnnnnnnnnnnnnnnnnnnnnnnnnnnnnnnnnnnnnnnnnnnnnnnnnnnnnnnnnnnnnnnnnnnnnnnnnnnnnnnnnnnnnnnnnnnnnnnnnnnnnnnnnnnnnnnnnnnnnnnnnnnnnnnnnnnnnnnnnnnnnnnnnnnnnnnnnnnnnnnnnnnnnnnnnnnnnnnnnnnnnnnnnnnnnnnnnnnnnnnnnnnnnnnnnnnnnnnnnnnnnnnnnnnnnnnnnnnnnnnnnnnnnnnnnnnnnnnnnnnnnnnnnnnnnnnnnnnnnnnnnnnnnnnnnnnnnnnnnnnnnnnnnnnnnnnnnnnnnnnnnnnnnnnnnnnnnnnnnnnnnnnnnnnnnnnnnnnnnnnnnnnnnnnnnnnnnnnnnnnnnnnnnnnnnnnnnnnnnnnnnnnnnnnnnnnnnnnnnnnnnnnnnnnnnnnnnnnnnnnnnnnnnnnnnnnnnnnnnnnnnnnnnnnnnnnnnnnnnnnnnnnnnnnnnnnnnnnnnnnnnnnnnnnnnnnnnnnnnnnnnnnnnnnnnnnnnnnnnnnnnnnnnnnnnnnnnnnnnnnnnnnnnnnnnnnnnnnnnnnnnnnnnnnnnnnnnnnnnnnnnnnnnnnnnnnnnnnnnnnnnnnnnnnnnnnnnnnnnnnnnnnnnnnnnnnnnnnnnnnnnnnnnnnnnnnnnnnnnnnnnnnnnnnnnnnnnnnnnnnnnnnnnnnnnnnnnnnnnnnnnnnnnnnnnnnnnnnnnnnnnnnnnnnnnnnnnnnnnnnnnnnnnnnnnnnnnnnnnnnnnnnnnnnnnnnnnnnnnnnnnnnnnnnnnnnnnnnnnnnnnnnnnnnnnnnnnnnnnnnnnnnnnnnnnnnnnnnnnnnnnnnnnnnnnnnnnnnnnnnnnnnnnnnnnnnnnnnnnnnnnnnnnnnnnnnnnnnnnnnnnnnnnnnnnnnnnnnnnnnnnnnnnnnnnnnnnnnnnnnnnnnnnnnnnnnnnnnnnnnnnnnnnnnnnnnnnnnnnnnnnnnnnnnnnnnnnnnnnnnnnnnnnnnnnnnnnnnnnnnnnnnnnnnnnnnnnnnnnnnnnnnnnnnnnnnnnnnnnnnnnnnnnnnnnnnnnnnnnnnnnnnnnnnnnnnnnnnnnnnnnnnnnnnnnnnnnnnnnnnnnnnnnnnnnnnnnnnnnnnnnnnnnnnnnnnnnnnnnnnnnnnnnnnnnnnnnnnnnnnnnnnnnnnnnnnnnnnnnnnnnnnnnnnnnnnnnnnnnnnnnnnnnnnnnnnnnnnnnnnnnnnnnnnnnnnnnnnnnnnnnnnnnnnnnnnnnnnnnnnnnnnnnnnnnnnnnnnnnnnnnnnnnnnnnnnnnnnnnnnnnnnnnnnnnnnnnnnnnnnnnnnnnnnnnnnnnnnnnnnnnnnnnnnnnnnnnnnnnnnnnnnnnnnnnnnnnnnnnnnnnnnnnnnnnnnnnnnnnnnnnnnnnnnnnnnnnnnnnnnnnnnnnnnnnnnnnnnnnnnnnnnnnnnnnnnnnnnnnnnnnnnnnnnnnnnnnnnnnnnnnnnnnnnnnnnnnnnnnnnnnnnnnnnnnnnnnnnnnnnnnnnnnnnnnnnnnnnnnnnnnnnnnnnnnnnnnnnnnnnnnnnnnnnnnnnnnnnnnnnnnnnnnnnnnnnnnnnnnnnnnnnnnnnnnnnnnnnnnnnnnnnnnnnnnnnnnnnnnnnnnnnnnnnnnnnnnnnnnnnnnnnnnnnnnnnnnnnnnnnnnnnnnnnnnnnnnnnnnnnnnnnnnnnnnnnnnnnnnnnnnnnnnnnnnnnnnnnnnnnnnnnnnnnnnnnnnnnnnnnnnnnnnnnnnnnnnnnnnnnnnnnnnnnnnnnnnnnnnnnnnnnnnnnnnnnnnnnnnnnnnnnnnnnnnnnnnnnnnnnnnnnnnnnnnnnnnnnnnnnnnnnnnnnnnnnnnnnnnnnnnnnnnnnnnnnnnnnnnnnnnnnnnnnnnnnnnnnnnnnnnnnnnnnnnnnnnnnnnnnnnnnnnnnnnnnnnnnnnnnnnnnnnnnnnnnnnnnnnnnnnnnnnnnnnnnnnnnnnnnnnnnnnnnnnnnnnnnnnnnnnnnnnnnnnnnnnnnnnnnnnnnnnnnnnnnnnnnnnnnnnnnnnnnnnnnnnnnnnnnnnnnnnnnnnnnnnnnnnnnnnnnnnnnnnnnnnnnnnnnnnnnnnnnnnnnnnnnnnnnnnnnnnnnnnnnnnnnnnnnnnnnnnnnnnnnnnnnnnnnnnnnnnnnnnnnnnnnnnnnnnnnnnnnnnnnnnnnnnnnnnnnnnnnnnnnnnnnnnnnnnnnnnnnnnnnnnnnnnnnnnnnnnnnnnnnnnnnnnnnnnnnnnnnnnnnnnnnnnnnnnnnnnnnnnnnnnnnnnnnnnnnnnnnnnnnnnnnnnnnnnnnnnnnnnnnnnnnnnnnnnnnnnnnnnnnnnnnnnnnnnnnnnnnnnnnnnnnnnnnnnnnnnnnnnnnnnnnnnnnnnnnnnnnnnnnnnnnnnnnnnnnnnnnnnnnnnnnnnnnnnnnnnnnnnnnnnnnnnnnnnnnnnnnnnnnnnnnnnnnnnnnnnnnnnnnnnnnnnnnnnnnnnnnnnnnnnnnnnnnnnnnnnnnnnnnnnnnnnnnnnnnnnnnnnnnnnnnnnnnnnnnnnnnnnnnnnnnnnnnnnnnnnnnnnnnnnnnnnnnnnnnnnnnnnnnnnnnnnnnnnnnnnnnnnnnnnnnnnnnnnnnnnnnnnnnnnnnnnnnnnnnnnnnnnnnnnnnnnnnnnnnnnnnnnnnnnnnnnnnnnnnnnnnnnnnnnnnnnnnnnnnnnnnnnnnnnnnnnnnnnnnnnnnnnnnnnnnnnnnnnnnnnnnnnnnnnnnnnnnnnnnnnnnnnnnnnnnnnnnnnnnnnnnnnnnnnnnnnnnnnnnnnnnnnnnnnnnnnnnnnnnnnnnnnnnnnnnnnnnnnnnnnnnnnnnnnnnnnnnnnnnnnnnnnnnnnnnnnnnnnnnnnnnnnnnnnnnnnnnnnnnnnnnnnnnnnnnnnnnnnnnnnnnnnnnnnnnnnnnnnnnnnnnnnnnnnnnnnnnnnnnnnnnnnnnnnnnnnnnnnnnnnnnnnnnnnnnnnnnnnnnnnnnnnnnnnnnnnnnnnnnnnnnnnnnnnnnnnnnnnnnnnnnnnnnnnnnnnnnnnnnnnnnnnnnnnnnnnnnnnnnnnnnnnnnnnnnnnnnnnnnnnnnnnnnnnnnnnnnnnnnnnnnnnnnnnnnnnnnnnnnnnnnnnnnnnnnnnnnnnnnnnnnnnnnnnnnnnnnnnnnnnnnnnnnnnnnnnnnnnnnnnnnnnnnnnnnnnnnnnnnnnnnnnnnnnnnnnnnnnnnnnnnnnnnnnnnnnnnnnnnnnnnnnnnnnnnnnnnnnnnnnnnnnnnnnnnnnnnnnnnnnnnnnnnnnnnnnnnnnnnnnnnnnnnnnnnnnnnnnnnnnnnnnnnnnnnnnnnnnnnnnnnnnnnnnnnnnnnnnnnnnnnnnnnnnnnnnnnnnnnnnnnnnnnnnnnnnnnnnnnnnnnnnnnnnnnnnnnnnnnnnnnnnnnnnnnnnnnnnnnnnnnnnnnnnnnnnnnnnnnnnnnnnnnnnnnnnnnnnnnnnnnnnnnnnnnnnnnnnnnnnnnnnnnnnnnnnnnnnnnnnnnnnnnnnnnnnnnnnnnnnnnnnnnnnnnnnnnnnnnnnnnnnnnnnnnnnnnnnnnnnnnnnnnnnnnnnnnnnnnnnnnnnnnnnnnnnnnnnnnnnnnnnnnnnnnnnnnnnnnnnnnnnnnnnnnnnnnnnnnnnnnnnnnnnnnnnnnnnnnnnnnnnnnnnnnnnnnnnnnnnnnnnnnnnnnnnnnnnnnnnnnnnnnnnnnnnnnnnnnnnnnnnnnnnnnnnnnnnnnnnnnnnnnnnnnnnnnnnnnnnnnnnnnnnnnnnnnnnnnnnnnnnnnnnnnnnnnnnnnnnnnnnnnnnnnnnnnnnnnnnnnnnnnnnnnnnnnnnnnnnnnnnnnnnnnnnnnnnnnnnnnnnnnnnnnnnnnnnnnnnnnnnnnnnnnnnnnnnnnnnnnnnnnnnnnnnnnnnnnnnnnnnnnnnnnnnnnnnnnnnnnnnnnnnnnnnnnnnnnnnnnnnnnnnnnnnnnnnnnnnnnnnnnnnnnnnnnnnnnnnnnnnnnnnnnnnnnnnnnnnnnnnnnnnnnnnnnnnnnnnnnnnnnnnnnnnnnnnnnnnnnnnnnnnnnnnnnnnnnnnnnnnnnnnnnnnnnnnnnnnnnnnnnnnnnnnnnnnnnnnnnnnnnnnnnnnnnnnnnnnnnnnnnnnnnnnnnnnnnnnnnnnnnnnnnnnnnnnnnnnnnnnnnnnnnnnnnnnnnnnnnnnnnnnnnnnnnnnnnnnnnnnnnnnnnnnnnnnnnnnnnnnnnnnnnnnnnnnnnnnnnnnnnnnnnnnnnnnnnnnnnnnnnnnnnnnnnnnnnnnnnnnnnnnnnnnnnnnnnnnnnnnnnnnnnnnnnnnnnnnnnnnnnnnnnnnnnnnnnnnnnnnnnnnnnnnnnnnnnnnnnnnnnnnnnnnnnnnnnnnnnnnnnnnnnnnnnnnnnnnnnnnnnnnnnnnnnnnnnnnnnnnnnnnnnnnnnnnnnnnnnnnnnnnnnnnnnnnnnnnnnnnnnnnnnnnnnnnnnnnnnnnnnnnnnnnnnnnnnnnnnnnnnnnnnnnnnnnnnnnnnnnnnnnnnnnnnnnnnnnnnnnnnnnnnnnnnnnnnnnnnnnnnnnnnnnnnnnnnnnnnnnnnnnnnnnnnnnnnnnnnnnnnnnnnnnnnnnnnnnnnnnnnnnnnnnnnnnnnnnnnnnnnnnnnnnnnnnnnnnnnnnnnnnnnnnnnnnnnnnnnnnnnnnnnnnnnnnnnnnnnnnnnnnnnnnnnnnnnnnnnnnnnnnnnnnnnnnnnnnnnnnnnnnnnnnnnnnnnnnnnnnnnnnnnnnnnnnnnnnnnnnnnnnnnnnnnnnnnnnnnnnnnnnnnnnnnnnnnnnnnnnnnnnnnnnnnnnnnnnnnnnnnnnnnnnnnnnnnnnnnnnnnnnnnnnnnnnnnnnnnnnnnnnnnnnnnnnnnnnnnnnnnnnnnnnnnnnnnnnnnnnnnnnnnnnnnnnnnnnnnnnnnnnnnnnnnnnnnnnnnnnnnnnnnnnnnnnnnnnnnnnnnnnnnnnnnnnnnnnnnnnnnnnnnnnnnnnnnnnnnnnnnnnnnnnnnnnnnnnnnnnnnnnnnnnnnnnnnnnnnnnnnnnnnnnnnnnnnnnnnnnnnnnnnnnnnnnnnnnnnnnnnnnnnnnnnnnnnnnnnnnnnnnnnnnnnnnnnnnnnnnnnnnnnnnnnnnnnnnnnnnnnnnnnnnnnnnnnnnnnnnnnnnnnnnnnnnnnnnnnnnnnnnnnnnnnnnnnnnnnnnnnnnnnnnnnnnnnnnnnnnnnnnnnnnnnnnnnnnnnnnnnnnnnnnnnnnnnnnnnnnnnnnnnnnnnnnnnnnnnnnnnnnnnnnnnnnnnnnnnnnnnnnnnnnnnnnnnnnnnnnnnnnnnnnnnnnnnnnnnnnnnnnnnnnnnnnnnnnnnnnnnnnnnnnnnnnnnnnnnnnnnnnnnnnnnnnnnnnnnnnnnnnnnnnnnnnnnnnnnnnnnnnnnnnnnnnnnnnnnnnnnnnnnnnnnnnnnnnnnnnnnnnnnnnnnnnnnnnnnnnnnnnnnnnnnnnnnnnnnnnnnnnnnnnnnnnnnnnnnnnnnnnnnnnnnnnnnnnnnnnnnnnnnnnnnnnnnnnnnnnnnnnnnnnnnnnnnnnnnnnnnnnnnnnnnnnnnnnnnnnnnnnnnnnnnnnnnnnnnnnnnnnnnnnnnnnnnnnnnnnnnnnnnnnnnnnnnnnnnnnnnnnnnnnnnnnnnnnnnnnnnnnnnnnnnnnnnnnnnnnnnnnnnnnnnnnnnnnnnnnnnnnnnnnnnnnnnnnnnnnnnnnnnnnnnnnnnnnnnnnnnnnnnnnnnnnnnnnnnnnnnnnnnnnnnnnnnnnnnnnnnnnnnnnnnnnnnnnnnnnnnnnnnnnnnnnnnnnnnnnnnnnnnnnnnnnnnnnnnnnnnnnnnnnnnnnnnnnnnnnnnnnnnnnnnnnnnnnnnnnnnnnnnnnnnnnnnnnnnnnnnnnnnnnnnnnnnnnnnnnnnnnnnnnnnnnnnnnnnnnnnnnnnnnnnnnnnnnnnnnnnnnnnnnnnnnnnnnnnnnnnnnnnnnnnnnnnnnnnnnnnnnnnnnnnnnnnnnnnnnnnnnnnnnnnnnnnnnnnnnnnnnnnnnnnnnnnnnnnnnnnnnnnnnnnnnnnnnnnnnnnnnnnnnnnnnnnnnnnnnnnnnnnnnnnnnnnnnnnnnnnnnnnnnnnnnnnnnnnnnnnnnnnnnnnnnnnnnnnnnnnnnnnnnnnnnnnnnnnnnnnnnnnnnnnnnnnnnnnnnnnnnnnnnnnnnnnnnnnnnnnnnnnnnnnnnnnnnnnnnnnnnnnnnnnnnnnnnnnnnnnnnnnnnnnnnnnnnnnnnnnnnnnnnnnnnnnnnnnnnnnnnnnnnnnnnnnnnnnnnnnnnnnnnnnnnnnnnnnnnnnnnnnnnnnnnnnnnnnnnnnnnnnnnnnnnnnnnnnnnnnnnnnnnnnnnnnnnnnnnnnnnnnnnnnnnnnnnnnnnnnnnnnnnnnnnnnnnnnnnnnnnnnnnnnnnnnnnnnnnnnnnnnnnnnnnnnnnnnnnnnnnnnnnnnnnnnnnnnnnnnnnnnnnnnnnnnnnnnnnnnnnnnnnnnnnnnnnnnnnnnnnnnnnnnnnnnnnnnnnnnnnnnnnnnnnnnnnnnnnnnnnnnnnnnnnnnnnnnnnnnnnnnnnnnnnnnnnnnnnnnnnnnnnnnnnnnnnnnnnnnnnnnnnnnnnnnnnnnnnnnnnnnnnnnnnnnnnnnnnnnnnnnnnnnnnnnnnnnnnnnnnnnnnnnnnnnnnnnnnnnnnnnnnnnnnnnnnnnnnnnnnnnnnnnnnnnnnnnnnnnnnnnnnnnnnnnnnnnnnnnnnnnnnnnnnnnnnnnnnnnnnnnnnnnnnnnnnnnnnnnnnnnnnnnnnnnnnnnnnnnnnnnnnnnnnnnnnnnnnnnnnnnnnnnnnnnnnnnnnnnnnnnnnnnnnnnnnnnnnnnnnnnnnnnnnnnnnnnnnnnnnnnnnnnnnnnnnnnnnnnnnnnnnnnnnnnnnnnnnnnnnnnnnnnnnnnnnnnnnnnnnnnnnnnnnnnnnnnnnnnnnnnnnnnnnnnnnnnnnnnnnnnnnnnnnnnnnnnnnnnnnnnnnnnnnnnnnnnnnnnnnnnnnnnnnnnnnnnnnnnnnnnnnnnnnnnnnnnnnnnnnnnnnnnnnnnnnnnnnnnnnnnnnnnnnnnnnnnnnnnnnnnnnnnnnnnnnnnnnnnnnnnnnnnnnnnnnnnnnnnnnnnnnnnnnnnnnnnnnnnnnnnnnnnnnnnnnnnnnnnnnnnnnnnnnnnnnnnnnnnnnnnnnnnnnnnnnnnnnnnnnnnnnnnnnnnnnnnnnnnnnnnnnnnnnnnnnnnnnnnnnnnnnnnnnnnnnnnnnnnnnnnnnnnnnnnnnnnnnnnnnnnnnnnnnnnnnnnnnnnnnnnnnnnnnnnnnnnnnnnnnnnnnnnnnnnnnnnnnnnnnnnnnnnnnnnnnnnnnnnnnnnnnnnnnnnnnnnnnnnnnnnnnnnnnnnnnnnnnnnnnnnnnnnnnnnnnnnnnnnnnnnnnnnnnnnnnnnnnnnnnnnnnnnnnnnnnnnnnnnnnnnnnnnnnnnnnnnnnnnnnnnnnnnnnnnnnnnnnnnnnnnnnnnnnnnnnnnnnnnnnnnnnnnnnnnnnnnnnnnnnnnnnnnnnnnnnnnnnnnnnnnnnnnnnnnnnnnnnnnnnnnnnnnnnnnnnnnnnnnnnnnnnnnnnnnnnnnnnnnnnnnnnnnnnnnnnnnnnnnnnnnnnnnnnnnnnnnnnnnnnnnnnnnnnnnnnnnnnnnnnnnnnnnnnnnnnnnnnnnnnnnnnnnnnnnnnnnnnnnnnnnnnnnnnnnnnnnnnnnnnnnnnnnnnnnnnnnnnnnnnnnnnnnnnnnnnnnnnnnnnnnnnnnnnnnnnnnnnnnnnnnnnnnnnnnnnnnnnnnnnnnnnnnnnnnnnnnnnnnnnnnnnnnnnnnnnnnnnnnnnnnnnnnnnnnnnnnnnnnnnnnnnnnnnnnnnnnnnnnnnnnnnnnnnnnnnnnnnnnnnnnnnnnnnnnnnnnnnnnnnnnnnnnnnnnnnnnnnnnnnnnnnnnnnnnnnnnnnnnnnnnnnnnnnnnnnnnnnnnnnnnnnnnnnnnnnnnnnnnnnnnnnnnnnnnnnnnnnnnnnnnnnnnnnnnnnnnnnnnnnnnnnnnnnnnnnnnnnnnnnnnnnnnnnnnnnnnnnnnnnnnnnnnnnnnnnnnnnnnnnnnnnnnnnnnnnnnnnnnnnnnnnnnnnnnnnnnnnnnnnnnnnnnnnnnnnnnnnnnnnnnnnnnnnnnnnnnnnnnnnnnnnnnnnnnnnnnnnnnnnnnnnnnnnnnnnnnnnnnnnnnnnnnnnnnnnnnnnnnnnnnnnnnnnnnnnnnnnnnnnnnnnnnnnnnnnnnnnnnnnnnnnnnnnnnnnnnnnnnnnnnnnnnnnnnnnnnnnnnnnnnnnnnnnnnnnnnnnnnnnnnnnnnnnnnnnnnnnnnnnnnnnnnnnnnnnnnnnnnnnnnnnnnnnnnnnnnnnnnnnnnnnnnnnnnnnnnnnnnnnnnnnnnnnnnnnnnnnnnnnnnnnnnnnnnnnnnnnnnnnnnnnnnnnnnnnnnnnnnnnnnnnnnnnnnnnnnnnnnnnnnnnnnnnnnnnnnnnnnnnnnnnnnnnnnnnnnnnnnnnnnnnnnnnnnnnnnnnnnnnnnnnnnnnnnnnnnnnnnnnnnnnnnnnnnnnnnnnnnnnnnnnnnnnnnnnnnnnnnnnnnnnnnnnnnnnnnnnnnnnnnnnnnnnnnnnnnnnnnnnnnnnnnnnnnnnnnnnnnnnnnnnnnnnnnnnnnnnnnnnnnnnnnnnnnnnnnnnnnnnnnnnnnnnnnnnnnnnnnnnnnnnnnnnnnnnnnnnnnnnnnnnnnnnnnnnnnnnnnnnnnnnnnnnnnnnnnnnnnnnnnnnnnnnnnnnnnnnnnnnnnnnnnnnnnnnnnnnnnnnnnnnnnnnnnnnnnnnnnnnnnnnnnnnnnnnnnnnnnnnnnnnnnnnnnnnnnnnnnnnnnnnnnnnnnnnnnnnnnnnnnnnnnnnnnnnnnnnnnnnnnnnnnnnnnnnnnnnnnnnnnnnnnnnnnnnnnnnnnnnnnnnnnnnnnnnnnnnnnnnnnnnnnnnnnnnnnnnnnnnnnnnnnnnnnnnnnnnnnnnnnnnnnnnnnnnnnnnnnnnnnnnnnnnnnnnnnnnnnnnnnnnnnnnnnnnnnnnnnnnnnnnnnnnnnnnnnnnnnnnnnnnnnnnnnnnnnnnnnnnnnnnnnnnnnnnnnnnnnnnnnnnnnnnnnnnnnnnnnnnnnnnnnnnnnnnnnnnnnnnnnnnnnnnnnnnnnnnnnnnnnnnnnnnnnnnnnnnnnnnnnnnnnnnnnnnnnnnnnnnnnnnnnnnnnnnnnnnnnnnnnnnnnnnnnnnnnnnnnnnnnnnnnnnnnnnnnnnnnnnnnnnnnnnnnnnnnnnnnnnnnnnnnnnnnnnnnnnnnnnnnnnnnnnnnnnnnnnnnnnnnnnnnnnnnnnnnnnnnnnnnnnnnnnnnnnnnnnnnnnnnnnnnnnnnnnnnnnnnnnnnnnnnnnnnnnnnnnnnnnnnnnnnnnnnnnnnnnnnnnnnnnnnnnnnnnnnnnnnnnnnnnnnnnnnnnnnnnnnnnnnnnnnnnnnnnnnnnnnnnnnnnnnnnnnnnnnnnnnnnnnnnnnnnnnnnnnnnnnnnnnnnnnnnnnnnnnnnnnnnnnnnnnnnnnnnnnnnnnnnnnnnnnnnnnnnnnnnnnnnnnnnnnnnnnnnnnnnnnnnnnnnnnnnnnnnnnnnnnnnnnnnnnnnnnnnnnnnnnnnnnnnnnnnnnnnnnnnnnnnnnnnnnnnnnnnnnnnnnnnnnnnnnnnnnnnnnnnnnnnnnnnnnnnnnnnnnnnnnnnnnnnnnnnnnnnnnnnnnnnnnnnnnnnnnnnnnnnnnnnnnnnnnnnnnnnnnnnnnnnnnnnnnnnnnnnnnnnnnnnnnnnnnnnnnnnnnnnnnnnnnnnnnnnnnnnnnnnnnnnnnnnnnnnnnnnnnnnnnnnnnnnnnnnnnnnnnnnnnnnnnnnnnnnnnnnnnnnnnnnnnnnnnnnnnnnnnnnnnnnnnnnnnnnnnnnnnnnnnnnnnnnnnnnnnnnnnnnnnnnnnnnnnnnnnnnnnnnnnnnnnnnnnnnnnnnnnnnnnnnnnnnnnnnnnnnnnnnnnnnnnnnnnnnnnnnnnnnnnnnnnnnnnnnnnnnnnnnnnnnnnnnnnnnnnnnnnnnnnnnnnnnnnnnnnnnnnnnnnnnnnnnnnnnnnnnnnnnnnnnnnnnnnnnnnnnnnnnnnnnnnnnnnnnnnnnnnnnnnnnnnnnnnnnnnnnnnnnnnnnnnnnnnnnnnnnnnnnnnnnnnnnnnnnnnnnnnnnnnnnnnnnnnnnnnnnnnnnnnnnnnnnnnnnnnnnnnnnnnnnnnnnnnnnnnnnnnnnnnnnnnnnnnnnnnnnnnnnnnnnnnnnnnnnnnnnnnnnnnnnnnnnnnnnnnnnnnnnnnnnnnnnnnnnnnnnnnnnnnnnnnnnnnnnnnnnnnnnnnnnnnnnnnnnnnnnnnnnnnnnnnnnnnnnnnnnnnnnnnnnnnnnnnnnnnnnnnnnnnnnnnnnnnnnnnnnnnnnnnnnnnnnnnnnnnnnnnnnnnnnnnnnnnnnnnnnnnnnnnnnnnnnnnnnnnnnnnnnnnnnnnnnnnnnnnnnnnnnnnnnnnnnnnnnnnnnnnnnnnnnnnnnnnnnnnnnnnnnnnnnnnnnnnnnnnnnnnnnnnnnnnnnnnnnnnnnnnnnnnnnnnnnnnnnnnnnnnnnnnnnnnnnnnnnnnnnnnnnnnnnnnnnnnnnnnnnnnnnnnnnnnnnnnnnnnnnnnnnnnnnnnnnnnnnnnnnnnnnnnnnnnnnnnnnnnnnnnnnnnnnnnnnnnnnnnnnnnnnnnnnnnnnnnnnnnnnnnnnnnnnnnnnnnnnnnnnnnnnnnnnnnnnnnnnnnnnnnnnnnnnnnnnnnnnnnnnnnnnnnnnnnnnnnnnnnnnnnnnnnnnnnnnnnnnnnnnnnnnnnnnnnnnnnnnnnnnnnnnnnnnnnnnnnnnnnnnnnnnnnnnnnnnnnnnnnnnnnnnnnnnnnnnnnnnnnnnnnnnnnnnnnnnnnnnnnnnnnnnnnnnnnnnnnnnnnnnnnnnnnnnnnnnnnnnnnnnnnnnnnnnnnnnnnnnnnnnnnnnnnnnnnnnnnnnnnnnnnnnnnnnnnnnnnnnnnnnnnnnnnnnnnnnnnnnnnnnnnnnnnnnnnnnnnnnnnnnnnnnnnnnnnnnnnnnnnnnnnnnnnnnnnnnnnnnnnnnnnnnnnnnnnnnnnnnnnnnnnnnnnnnnnnnnnnnnnnnnnnnnnnnnnnnnnnnnnnnnnnnnnnnnnnnnnnnnnnnnnnnnnnnnnnnnnnnnnnnnnnnnnnnnnnnnnnnnnnnnnnnnnnnnnnnnnnnnnnnnnnnnnnnnnnnnnnnnnnnnnnnnnnnnnnnnnnnnnnnnnnnnnnnnnnnnnnnnnnnnnnnnnnnnnnnnnnnnnnnnnnnnnnnnnnnnnnnnnnnnnnnnnnnnnnnnnnnnnnnnnnnnnnnnnnnnnnnnnnnnnnnnnnnnnnnnnnnnnnnnnnnnnnnnnnnnnnnnnnnnnnnnnnnnnnnnnnnnnnnnnnnnnnnnnnnnnnnnnnnnnnnnnnnnnnnnnnnnnnnnnnnnnnnnnnnnnnnnnnnnnnnnnnnnnnnnnnnnnnnnnnnnnnnnnnnnnnnnnnnnnnnnnnnnnnnnnnnnnnnnnnnnnnnnnnnnnnnnnnnnnnnnnnnnnnnnnnnnnnnnnnnnnnnnnnnnnnnnnnnnnnnnnnnnnnnnnnnnnnnnnnnnnnnnnnnnnnnnnnnnnnnnnnnnnnnnnnnnnnnnnnnnnnnnnnnnnnnnnnnnnnnnnnnnnnnnnnnnnnnnnnnnnnnnnnnnnnnnnnnnnnnnnnnnnnnnnnnnnnnnnnnnnnnnnnnnnnnnnnnnnnnnnnnnnnnnnnnnnnnnnnnnnnnnnnnnnnnnnnnnnnnnnnnnnnnnnnnnnnnnnnnnnnnnnnnnnnnnnnnnnnnnnnnnnnnnnnnnnnnnnnnnnnnnnnnnnnnnnnnnnnnnnnnnnnnnnnnnnnnnnnnnnnnnnnnnnnnnnnnnnnnnnnnnnnnnnnnnnnnnnnnnnnnnnnnnnnnnnnnnnnnnnnnnnnnnnnnnnnnnnnnnnnnnnnnnnnnnnnnnnnnnnnnnnnnnnnnnnnnnnnnnnnnnnnnnnnnnnnnnnnnnnnnnnnnnnnnnnnnnnnnnnnnnnnnnnnnnnnnnnnnnnnnnnnnnnnnnnnnnnnnnnnnnnnnnnnnnnnnnnnnnnnnnnnnnnnnnnnnnnnnnnnnnnnnnnnnnnnnnnnnnnnnnnnnnnnnnnnnnnnnnnnnnnnnnnnnnnnnnnnnnnnnnnnnnnnnnnnnnnnnnnnnnnnnnnnnnnnnnnnnnnnnnnnnnnnnnnnnnnnnnnnnnnnnnnnnnnnnnnnnnnnnnnnnnnnnnnnnnnnnnnnnnnnnnnnnnnnnnnnnnnnnnnnnnnnnnnnnnnnnnnnnnnnnnnnnnnnnnnnnnnnnnnnnnnnnnnnnnnnnnnnnnnnnnnnnnnnnnnnnnnnnnnnnnnnnnnnnnnnnnnnnnnnnnnnnnnnnnnnnnnnnnnnnnnnnnnnnnnnnnnnnnnnnnnnnnnnnnnnnnnnnnnnnnnnnnnnnnnnnnnnnnnnnnnnnnnnnnnnnnnnnnnnnnnnnnnnnnnnnnnnnnnnnnnnnnnnnnnnnnnnnnnnnnnnnnnnnnnnnnnnnnnnnnnnnnnnnnnnnnnnnnnnnnnnnnnnnnnnnnnnnnnnnnnnnnnnnnnnnnnnnnnnnnnnnnnnnnnnnnnnnnnnnnnnnnnnnnnnnnnnnnnnnnnnnnnnnnnnnnnnnnnnnnnnnnnnnnnnnnnnnnnnnnnnnnnnnnnnnnnnnnnnnnnnnnnnnnnnnnnnnnnnnnnnnnnnnnnnnnnnnnnnnnnnnnnnnnnnnnnnnnnnnnnnnnnnnnnnnnnnnnnnnnnnnnnnnnnnnnnnnnnnnnnnnnnnnnnnnnnnnnnnnnnnnnnnnnnnnnnnnnnnnnnnnnnnnnnnnnnnnnnnnnnnnnnnnnnnnnnnnnnnnnnnnnnnnnnnnnnnnnnnnnnnnnnnnnnnnnnnnnnnnnnnnnnnnnnnnnnnnnnnnnnnnnnnnnnnnnnnnnnnnnnnnnnnnnnnnnnnnnnnnnnnnnnnnnnnnnnnnnnnnnnnnnnnnnnnnnnnnnnnnnnnnnnnnnnnnnnnnnnnnnnnnnnnnnnnnnnnnnnnnnnnnnnnnnnnnnnnnnnnnnnnnnnnnnnnnnnnnnnnnnnnnnnnnnnnnnnnnnnnnnnnnnnnnnnnnnnnnnnnnnnnnnnnnnnnnnnnnnnnnnnnnnnnnnnnnnnnnnnnnnnnnnnnnnnnnnnnnnnnnnnnnnnnnnnnnnnnnnnnnnnnnnnnnnnnnnnnnnnnnnnnnnnnnnnnnnnnnnnnnnnnnnnnnnnnnnnnnnnnnnnnnnnnnnnnnnnnnnnnnnnnnnnnnnnnnnnnnnnnnnnnnnnnnnnnnnnnnnnnnnnnnnnnnnnnnnnnnnnnnnnnnnnnnnnnnnnnnnnnnnnnnnnnnnnnnnnnnnnnnnnnnnnnnnnnnnnnnnnnnnnnnnnnnnnnnnnnnnnnnnnnnnnnnnnnnnnnnnnnnnnnnnnnnnnnnnnnnnnnnnnnnnnnnnnnnnnnnnnnnnnnnnnnnnnnnnnnnnnnnnnnnnnnnnnnnnnnnnnnnnnnnnnnnnnnnnnnnnnnnnnnnnnnnnnnnnnnnnnnnnnnnnnnnnnnnnnnnnnnnnnnnnnnnnnnnnnnnnnnnnnnnnnnnnnnnnnnnnnnnnnnnnnnnnnnnnnnnnnnnnnnnnnnnnnnnnnnnnnnnnnnnnnnnnnnnnnnnnnnnnnnnnnnnnnnnnnnnnnnnnnnnnnnnnnnnnnnnnnnnnnnnnnnnnnnnnnnnnnnnnnnnnnnnnnnnnnnnnnnnnnnnnnnnnnnnnnnnnnnnnnnnnnnnnnnnnnnnnnnnnnnnnnnnnnnnnnnnnnnnnnnnnnnnnnnnnnnnnnnnnnnnnnnnnnnnnnnnnnnnnnnnnnnnnnnnnnnnnnnnnnnnnnnnnnnnnnnnnnnnnnnnnnnnnnnnnnnnnnnnnnnnnnnnnnnnnnnnnnnnnnnnnnnnnnnnnnnnnnnnnnnnnnnnnnnnnnnnnnnnnnnnnnnnnnnnnnnnnnnnnnnnnnnnnnnnnnnnnnnnnnnnnnnnnnnnnnnnnnnnnnnnnnnnnnnnnnnnnnnnnnnnnnnnnnnnnnnnnnnnnnnnnnnnnnnnnnnnnnnnnnnnnnnnnnnnnnnnnnnnnnnnnnnnnnnnnnnnnnnnnnnnnnnnnnnnnnnnnnnnnnnnnnnnnnnnnnnnnnnnnnnnnnnnnnnnnnnnnnnnnnnnnnnnnnnnnnnnnnnnnnnnnnnnnnnnnnnnnnnnnnnnnnnnnnnnnnnnnnnnnnnnnnnnnnnnnnnnnnnnnnnnnnnnnnnnnnnnnnnnnnnnnnnnnnnnnnnnnnnnnnnnnnnnnnnnnnnnnnnnnnnnnnnnnnnnnnnnnnnnnnnnnnnnnnnnnnnnnnnnnnnnnnnnnnnnnnnnnnnnnnnnnnnnnnnnnnnnnnnnnnnnnnnnnnnnnnnnnnnnnnnnnnnnnnnnnnnnnnnnnnnnnnnnnnnnnnnnnnnnnnnnnnnnnnnnnnnnnnnnnnnnnnnnnnnnnnnnnnnnnnnnnnnnnnnnnnnnnnnnnnnnnnnnnnnnnnnnnnnnnnnnnnnnnnnnnnnnnnnnnnnnnnnnnnnnnnnnnnnnnnnnnnnnnnnnnnnnnnnnnnnnnnnnnnnnnnnnnnnnnnnnnnnnnnnnnnnnnnnnnnnnnnnnnnnnnnnnnnnnnnnnnnnnnnnnnnnnnnnnnnnnnnnnnnnnnnnnnnnnnnnnnnnnnnnnnnnnnnnnnnnnnnnnnnnnnnnnnnnnnnnnnnnnnnnnnnnnnnnnnnnnnnnnnnnnnnnnnnnnnnnnnnnnnnnnnnnnnnnnnnnnnnnnnnnnnnnnnnnnnnnnnnnnnnnnnnnnnnnnnnnnnnnnnnnnnnnnnnnnnnnnnnnnnnnnnnnnnnnnnnnnnnnnnnnnnnnnnnnnnnnnnnnnnnnnnnnnnnnnnnnnnnnnnnnnnnnnnnnnnnnnnnnnnnnnnnnnnnnnnnnnnnnnnnnnnnnnnnnnnnnnnnnnnnnnnnnnnnnnnnnnnnnnnnnnnnnnnnnnnnnnnnnnnnnnnnnnnnnnnnnnnnnnnnnnnnnnnnnnnnnnnnnnnnnnnnnnnnnnnnnnnnnnnnnnnnnnnnnnnnnnnnnnnnnnnnnnnnnnnnnnnnnnnnnnnnnnnnnnnnnnnnnnnnnnnnnnnnnnnnnnnnnnnnnnnnnnnnnnnnnnnnnnnnnnnnnnnnnnnnnnnnnnnnnnnnnnnnnnnnnnnnnnnnnnnnnnnnnnnnnnnnnnnnnnnnnnnnnnnnnnnnnnnnnnnnnnnnnnnnnnnnnnnnnnnnnnnnnnnnnnnnnnnnnnnnnnnnnnnnnnnnnnnnnnnnnnnnnnnnnnnnnnnnnnnnnnnnnnnnnnnnnnnnnnnnnnnnnnnnnnnnnnnnnnnnnnnnnnnnnnnnnnnnnnnnnnnnnnnnnnnnnnnnnnnnnnnnnnnnnnnnnnnnnnnnnnnnnnnnnnnnnnnnnnnnnnnnnnnnnnnnnnnnnnnnnnnnnnnnnnnnnnnnnnnnnnnnnnnnnnnnnnnnnnnnnnnnnnnnnnnnnnnnnnnnnnnnnnnnnnnnnnnnnnnnnnnnnnnnnnnnnnnnnnnnnnnnnnnnnnnnnnnnnnnnnnnnnnnnnnnnnnnnnnnnnnnnnnnnnnnnnnnnnnnnnnnnnnnnnnnnnnnnnnnnnnnnnnnnnnnnnnnnnnnnnnnnnnnnnnnnnnnnnnnnnnnnnnnnnnnnnnnnnnnnnnnnnnnnnnnnnnnnnnnnnnnnnnnnnnnnnnnnnnnnnnnnnnnnnnnnnnnnnnnnnnnnnnnnnnnnnnnnnnnnnnnnnnnnnnnnnnnnnnnnnnnnnnnnnnnnnnnnnnnnnnnnnnnnnnnnnnnnnnnnnnnnnnnnnnnnnnnnnnnnnnnnnnnnnnnnnnnnnnnnnnnnnnnnnnnnnnnnnnnnnnnnnnnnnnnnnnnnnnnnnnnnnnnnnnnnnnnnnnnnnnnnnnnnnnnnnnnnnnnnnnnnnnnnnnnnnnnnnnnnnnnnnnnnnnnnnnnnnnnnnnnnnnnnnnnnnnnnnnnnnnnnnnnnnnnnnnnnnnnnnnnnnnnnnnnnnnnnnnnnnnnnnnnnnnnnnnnnnnnnnnnnnnnnnnnnnnnnnnnnnnnnnnnnnnnnnnnnnnnnnnnnnnnnnnnnnnnnnnnnnnnnnnnnnnnnnnnnnnnnnnnnnnnnnnnnnnnnnnnnnnnnnnnnnnnnnnnnnnnnnnnnnnnnnnnnnnnnnnnnnnnnnnnnnnnnnnnnnnnnnnnnnnnnnnnnnnnnnnnnnnnnnnnnnnnnnnnnnnnnnnnnnnnnnnnnnnnnnnnnnnnnnnnnnnnnnnnnnnnnnnnnnnnnnnnnnnnnnnnnnnnnnnnnnnnnnnnnnnnnnnnnnnnnnnnnnnnnnnnnnnnnnnnnnnnnnnnnnnnnnnnnnnnnnnnnnnnnnnnnnnnnnnnnnnnnnnnnnnnnnnnnnnnnnnnnnnnnnnnnnnnnnnnnnnnnnnnnnnnnnnnnnnnnnnnnnnnnnnnnnnnnnnnnnnnnnnnnnnnnnnnnnnnnnnnnnnnnnnnnnnnnnnnnnnnnnnnnnnnnnnnnnnnnnnnnnnnnnnnnnnnnnnnnnnnnnnnnnnnnnnnnnnnnnnnnnnnnnnnnnnnnnnnnnnnnnnnnnnnnnnnnnnnnnnnnnnnnnnnnnnnnnnnnnnnnnnnnnnnnnnnnnnnnnnnnnnnnnnnnnnnnnnnnnnnnnnnnnnnnnnnnnnnnnnnnnnnnnnnnnnnnnnnnnnnnnnnnnnnnnnnnnnnnnnnnnnnnnnnnnnnnnnnnnnnnnnnnnnnnnnnnnnnnnnnnnnnnnnnnnnnnnnnnnnnnnnnnnnnnnnnnnnnnnnnnnnnnnnnnnnnnnnnnnnnnnnnnnnnnnnnnnnnnnnnnnnnnnnnnnnnnnnnnnnnnnnnnnnnnnnnnnnnnnnnnnnnnnnnnnnnnnnnnnnnnnnnnnnnnnnnnnnnnnnnnnnnnnnnnnnnnnnnnnnnnnnnnnnnnnnnnnnnnnnnnnnnnnnnnnnnnnnnnnnnnnnnnnnnnnnnnnnnnnnnnnnnnnnnnnnnnnnnnnnnnnnnnnnnnnnnnnnnnnnnnnnnnnnnnnnnnnnnnnnnnnnnnnnnnnnnnnnnnnnnnnnnnnnnnnnnnnnnnnnnnnnnnnnnnnnnnnnnnnnnnnnnnnnnnnnnnnnnnnnnnnnnnnnnnnnnnnnnnnnnnnnnnnnnnnnnnnnnnnnnnnnnnnnnnnnnnnnnnnnnnnnnnnnnnnnnnnnnnnnnnnnnnnnnnnnnnnnnnnnnnnnnnnnnnnnnnnnnnnnnnnnnnnnnnnnnnnnnnnnnnnnnnnnnnnnnnnnnnnnnnnnnnnnnnnnnnnnnnnnnnnnnnnnnnnnnnnnnnnnnnnnnnnnnnnnnnnnnnnnnnnnnnnnnnnnnnnnnnnnnnnnnnnnnnnnnnnnnnnnnnnnnnnnnnnnnnnnnnnnnnnnnnnnnnnnnnnnnnnnnnnnnnnnnnnnnnnnnnnnnnnnnnnnnnnnnnnnnnnnnnnnnnnnnnnnnnnnnnnnnnnnnnnnnnnnnnnnnnnnnnnnnnnnnnnnnnnnnnnnnnnnnnnnnnnnnnnnnnnnnnnnnnnnnnnnnnnnnnnnnnnnnnnnnnnnnnnnnnnnnnnnnnnnnnnnnnnnnnnnnnnnnnnnnnnnnnnnnnnnnnnnnnnnnnnnnnnnnnnnnnnnnnnnnnnnnnnnnnnnnnnnnnnnnnnnnnnnnnnnnnnnnnnnnnnnnnnnnnnnnnnnnnnnnnnnnnnnnnnnnnnnnnnnnnnnnnnnnnnnnnnnnnnnnnnnnnnnnnnnnnnnnnnnnnnnnnnnnnnnnnnnnnnnnnnnnnnnnnnnnnnnnnnnnnnnnnnnnnnnnnnnnnnnnnnnnnnnnnnnnnnnnnnnnnnnnnnnnnnnnnnnnnnnnnnnnnnnnnnnnnnnnnnnnnnnnnnnnnnnnnnnnnnnnnnnnnnnnnnnnnnnnnnnnnnnnnnnnnnnnnnnnnnnnnnnnnnnnnnnnnnnnnnnnnnnnnnnnnnnnnnnnnnnnnnnnnnnnnnnnnnnnnnnnnnnnnnnnnnnnnnnnnnnnnnnnnnnnnnnnnnnnnnnnnnnnnnnnnnnnnnnnnnnnnnnnnnnnnnnnnnnnnnnnnnnnnnnnnnnnnnnnnnnnnnnnnnnnnnnnnnnnnnnnnnnnnnnnnnnnnnnnnnnnnnnnnnnnnnnnnnnnnnnnnnnnnnnnnnnnnnnnnnnnnnnnnnnnnnnnnnnnnnnnnnnnnnnnnnnnnnnnnnnnnnnnnnnnnnnnnnnnnnnnnnnnnnnnnnnnnnnnnnnnnnnnnnnnnnnnnnnnnnnnnnnnnnnnnnnnnnnnnnnnnnnnnnnnnnnnnnnnnnnnnnnnnnnnnnnnnnnnnnnnnnnnnnnnnnnnnnnnnnnnnnnnnnnnnnnnnnnnnnnnnnnnnnnnnnnnnnnnnnnnnnnnnnnnnnnnnnnnnnnnnnnnnnnnnnnnnnnnnnnnnnnnnnnnnnnnnnnnnnnnnnnnnnnnnnnnnnnnnnnnnnnnnnnnnnnnnnnnnnnnnnnnnnnnnnnnnnnnnnnnnnnnnnnnnnnnnnnnnnnnnnnnnnnnnnnnnnnnnnnnnnnnnnnnnnnnnnnnnnnnnnnnnnnnnnnnnnnnnnnnnnnnnnnnnnnnnnnnnnnnnnnnnnnnnnnnnnnnnnnnnnnnnnnnnnnnnnnnnnnnnnnnnnnnnnnnnnnnnnnnnnnnnnnnnnnnnnnnnnnnnnnnnnnnnnnnnnnnnnnnnnnnnnnnnnnnnnnnnnnnnnnnnnnnnnnnnnnnnnnnnnnnnnnnnnnnnnnnnnnnnnnnnnnnnnnnnnnnnnnnnnnnnnnnnnnnnnnnnnnnnnnnnnnnnnnnnnnnnnnnnnnnnnnnnnnnnnnnnnnnnnnnnnnnnnnnnnnnnnnnnnnnnnnnnnnnnnnnnnnnnnnnnnnnnnnnnnnnnnnnnnnnnnnnnnnnnnnnnnnnnnnnnnnnnnnnnnnnnnnnnnnnnnnnnnnnnnnnnnnnnnnnnnnnnnnnnnnnnnnnnnnnnnnnnnnnnnnnnnnnnnnnnnnnnnnnnnnnnnnnnnnnnnnnnnnnnnnnnnnnnnnnnnnnnnnnnnnnnnnnnnnnnnnnnnnnnnnnnnnnnnnnnnnnnnnnnnnnnnnnnnnnnnnnnnnnnnnnnnnnnnnnnnnnnnnnnnnnnnnnnnnnnnnnnnnnnnnnnnnnnnnnnnnnnnnnnnnnnnnnnnnnnnnnnnnnnnnnnnnnnnnnnnnnnnnnnnnnnnnnnnnnnnnnnnnnnnnnnnnnnnnnnnnnnnnnnnnnnnnnnnnnnnnnnnnnnnnnnnnnnnnnnnnnnnnnnnnnnnnnnnnnnnnnnnnnnnnnnnnnnnnnnnnnnnnnnnnnnnnnnnnnnnnnnnnnnnnnnnnnnnnnnnnnnnnnnnnnnnnnnnnnnnnnnnnnnnnnnnnnnnnnnnnnnnnnnnnnnnnnnnnnnnnnnnnnnnnnnnnnnnnnnnnnnnnnnnnnnnnnnnnnnnnnnnnnnnnnnnnnnnnnnnnnnnnnnnnnnnnnnnnnnnnnnnnnnnnnnnnnnnnnnnnnnnnnnnnnnnnnnnnnnnnnnnnnnnnnnnnnnnnnnnnnnnnnnnnnnnnnnnnnnnnnnnnnnnnnnnnnnnnnnnnnnnnnnnnnnnnnnnnnnnnnnnnnnnnnnnnnnnnnnnnnnnnnnnnnnnnnnnnnnnnnnnnnnnnnnnnnnnnnnnnnnnnnnnnnnnnnnnnnnnnnnnnnnnnnnnnnnnnnnnnnnnnnnnnnnnnnnnnnnnnnnnnnnnnnnnnnnnnnnnnnnnnnnnnnnnnnnnnnnnnnnnnnnnnnnnnnnnnnnnnnnnnnnnnnnnnnnnnnnnnnnnnnnnnnnnnnnnnnnnnnnnnnnnnnnnnnnnnnnnnnnnnnnnnnnnnnnnnnnnnnnnnnnnnnnnnnnnnnnnnnnnnnnnnnnnnnnnnnnnnnnnnnnnnnnnnnnnnnnnnnnnnnnnnnnnnnnnnnnnnnnnnnnnnnnnnnnnnnnnnnnnnnnnnnnnnnnnnnnnnnnnnnnnnnnnnnnnnnnnnnnnnnnnnnnnnnnnnnnnnnnnnnnnnnnnnnnnnnnnnnnnnnnnnnnnnnnnnnnnnnnnnnnnnnnnnnnnnnnnnnnnnnnnnnnnnnnnnnnnnnnnnnnnnnnnnnnnnnnnnnnnnnnnnnnnnnnnnnnnnnnnnnnnnnnnnnnnnnnnnnnnnnnnnnnnnnnnnnnnnnnnnnnnnnnnnnnnnnnnnnnnnnnnnnnnnnnnnnnnnnnnnnnnnnnnnnnnnnnnnnnnnnnnnnnnnnnnnnnnnnnnnnnnnnnnnnnnnnnnnnnnnnnnnnnnnnnnnnnnnnnnnnnnnnnnnnnnnnnnnnnnnnnnnnnnnnnnnnnnnnnnnnnnnnnnnnnnnnnnnnnnnnnnnnnnnnnnnnnnnnnnnnnnnnnnnnnnnnnnnnnnnnnnnnnnnnnnnnnnnnnnnnnnnnnnnnnnnnnnnnnnnnnnnnnnnnnnnnnnnnnnnnnnnnnnnnnnnnnnnnnnnnnnnnnnnnnnnnnnnnnnnnnnnnnnnnnnnnnnnnnnnnnnnnnnnnnnnnnnnnnnnnnnnnnnnnnnnnnnnnnnnnnnnnnnnnnnnnnnnnnnnnnnnnnnnnnnnnnnnnnnnnnnnnnnnnnnnnnnnnnnnnnnnnnnnnnnnnnnnnnnnnnnnnnnnnnnnnnnnnnnnnnnnnnnnnnnnnnnnnnnnnnnnnnnnnnnnnnnnnnnnnnnnnnnnnnnnnnnnnnnnnnnnnnnnnnnnnnnnnnnnnnnnnnnnnnnnnnnnnnnnnnnnnnnnnnnnnnnnnnnnnnnnnnnnnnnnnnnnnnnnnnnnnnnnnnnnnnnnnnnnnnnnnnnnnnnnnnnnnnnnnnnnnnnnnnnnnnnnnnnnnnnnnnnnnnnnnnnnnnnnnnnnnnnnnnnnnnnnnnnnnnnnnnnnnnnnnnnnnnnnnnnnnnnnnnnnnnnnnnnnnnnnnnnnnnnnnnnnnnnnnnnnnnnnnnnnnnnnnnnnnnnnnnnnnnnnnnnnnnnnnnnnnnnnnnnnnnnnnnnnnnnnnnnnnnnnnnnnnnnnnnnnnnnnnnnnnnnnnnnnnnnnnnnnnnnnnnnnnnnnnnnnnnnnnnnnnnnnnnnnnnnnnnnnnnnnnnnnnnnnnnnnnnnnnnnnnnnnnnnnnnnnnnnnnnnnnnnnnnnnnnnnnnnnnnnnnnnnnnnnnnnnnnnnnnnnnnnnnnnnnnnnnnnnnnnnnnnnnnnnnnnnnnnnnnnnnnnnnnnnnnnnnnnnnnnnnnnnnnnnnnnnnnnnnnnnnnnnnnnnnnnnnnnnnnnnnnnnnnnnnnnnnnnnnnnnnnnnnnnnnnnnnnnnnnnnnnnnnnnnnnnnnnnnnnnnnnnnnnnnnnnnnnnnnnnnnnnnnnnnnnnnnnnnnnnnnnnnnnnnnnnnnnnnnnnnnnnnnnnnnnnnnnnnnnnnnnnnnnnnnnnnnnnnnnnnnnnnnnnnnnnnnnnnnnnnnnnnnnnnnnnnnnnnnnnnnnnnnnnnnnnnnnnnnnnnnnnnnnnnnnnnnnnnnnnnnnnnnnnnnnnnnnnnnnnnnnnnnnnnnnnnnnnnnnnnnnnnnnnnnnnnnnnnnnnnnnnnnnnnnnnnnnnnnnnnnnnnnnnnnnnnnnnnnnnnnnnnnnnnnnnnnnnnnnnnnnnnnnnnnnnnnnnnnnnnnnnnnnnnnnnnnnnnnnnnnnnnnnnnnnnnnnnnnnnnnnnnnnnnnnnnnnnnnnnnnnnnnnnnnnnnnnnnnnnnnnnnnnnnnnnnnnnnnnnnnnnnnnnnnnnnnnnnnnnnnnnnnnnnnnnnnnnnnnnnnnnnnnnnnnnnnnnnnnnnnnnnnnnnnnnnnnnnnnnnnnnnnnnnnnnnnnnnnnnnnnnnnnnnnnnnnnnnnnnnnnnnnnnnnnnnnnnnnnnnnnnnnnnnnnnnnnnnnnnnnnnnnnnnnnnnnnnnnnnnnnnnnnnnnnnnnnnnnnnnnnnnnnnnnnnnnnnnnnnnnnnnnnnnnnnnnnnnnnnnnnnnnnnnnnnnnnnnnnnnnnnnnnnnnnnnnnnnnnnnnnnnnnnnnnnnnnnnnnnnnnnnnnnnnnnnnnnnnnnnnnnnnnnnnnnnnnnnnnnnnnnnnnnnnnnnnnnnnnnnnnnnnnnnnnnnnnnnnnnnnnnnnnnnnnnnnnnnnnnnnnnnnnnnnnnnnnnnnnnnnnnnnnnnnnnnnnnnnnnnnnnnnnnnnnnnnnnnnnnnnnnnnnnnnnnnnnnnnnnnnnnnnnnnnnnnnnnnnnnnnnnnnnnnnnnnnnnnnnnnnnnnnnnnnnnnnnnnnnnnnnnnnnnnnnnnnnnnnnnnnnnnnnnnnnnnnnnnnnnnnnnnnnnnnnnnnnnnnnnnnnnnnnnnnnnnnnnnnnnnnnnnnnnnnnnnnnnnnnnnnnnnnnnnnnnnnnnnnnnnnnnnnnnnnnnnnnnnnnnnnnnnnnnnnnnnnnnnnnnnnnnnnnnnnnnnnnnnnnnnnnnnnnnnnnnnnnnnnnnnnnnnnnnnnnnnnnnnnnnnnnnnnnnnnnnnnnnnnnnnnnnnnnnnnnnnnnnnnnnnnnnnnnnnnnnnnnnnnnnnnnnnnnnnnnnnnnnnnnnnnnnnnnnnnnnnnnnnnnnnnnnnnnnnnnnnnnnnnnnnnnnnnnnnnnnnnnnnnnnnnnnnnnnnnnnnnnnnnnnnnnnnnnnnnnnnnnnnnnnnnnnnnnnnnnnnnnnnnnnnnnnnnnnnnnnnnnnnnnnnnnnnnnnnnnnnnnnnnnnnnnnnnnnnnnnnnnnnnnnnnnnnnnnnnnnnnnnnnnnnnnnnnnnnnnnnnnnnnnnnnnnnnnnnnnnnnnnnnnnnnnnnnnnnnnnnnnnnnnnnnnnnnnnnnnnnnnnnnnnnnnnnnnnnnnnnnnnnnnnnnnnnnnnnnnnnnnnnnnnnnnnnnnnnnnnnnnnnnnnnnnnnnnnnnnnnnnnnnnnnnnnnnnnnnnnnnnnnnnnnnnnnnnnnnnnnnnnnnnnnnnnnnnnnnnnnnnnnnnnnnnnnnnnnnnnnnnnnnnnnnnnnnnnnnnnnnnnnnnnnnnnnnnnnnnnnnnnnnnnnnnnnnnnnnnnnnnnnnnnnnnnnnnnnnnnnnnnnnnnnnnnnnnnnnnnnnnnnnnnnnnnnnnnnnnnnnnnnnnnnnnnnnnnnnnnnnnnnnnnnnnnnnnnnnnnnnnnnnnnnnnnnnnnnnnnnnnnnnnnnnnnnnnnnnnnnnnnnnnnnnnnnnnnnnnnnnnnnnnnnnnnnnnnnnnnnnnnnnnnnnnnnnnnnnnnnnnnnnnnnnnnnnnnnnnnnnnnnnnnnnnnnnnnnnnnnnnnnnnnnnnnnnnnnnnnnnnnnnnnnnnnnnnnnnnnnnnnnnnnnnnnnnnnnnnnnnnnnnnnnnnnnnnnnnnnnnnnnnnnnnnnnnnnnnnnnnnnnnnnnnnnnnnnnnnnnnnnnnnnnnnnnnnnnnnnnnnnnnnnnnnnnnnnnnnnnnnnnnnnnnnnnnnnnnnnnnnnnnnnnnnnnnnnnnnnnnnnnnnnnnnnnnnnnnnnnnnnnnnnnnnnnnnnnnnnnnnnnnnnnnnnnnnnnnnnnnnnnnnnnnnnnnnnnnnnnnnnnnnnnnnnnnnnnnnnnnnnnnnnnnnnnnnnnnnnnnnnnnnnnnnnnnnnnnnnnnnnnnnnnnnnnnnnnnnnnnnnnnnnnnnnnnnnnnnnnnnnnnnnnnnnnnnnnnnnnnnnnnnnnnnnnnnnnnnnnnnnnnnnnnnnnnnnnnnnnnnnnnnnnnnnnnnnnnnnnnnnnnnnnnnnnnnnnnnnnnnnnnnnnnnnnnnnnnnnnnnnnnnnnnnnnnnnnnnnnnnnnnnnnnnnnnnnnnnnnnnnnnnnnnnnnnnnnnnnnnnnnnnnnnnnnnnnnnnnnnnnnnnnnnnnnnnnnnnnnnnnnnnnnnnnnnnnnnnnnnnnnnnnnnnnnnnnnnnnnnnnnnnnnnnnnnnnnnnnnnnnnnnnnnnnnnnnnnnnnnnnnnnnnnnnnnnnnnnnnnnnnnnnnnnnnnnnnnnnnnnnnnnnnnnnnnnnnnnnnnnnnnnnnnnnnnnnnnnnnnnnnnnnnnnnnnnnnnnnnnnnnnnnnnnnnnnnnnnnnnnnnnnnnnnnnnnnnnnnnnnnnnnnnnnnnnnnnnnnnnnnnnnnnnnnnnnnnnnnnnnnnnnnnnnnnnnnnnnnnnnnnnnnnnnnnnnnnnnnnnnnnnnnnnnnnnnnnnnnnnnnnnnnnnnnnnnnnnnnnnnnnnnnnnnnnnnnnnnnnnnnnnnnnnnnnnnnnnnnnnnnnnnnnnnnnnnnnnnnnnnnnnnnnnnnnnnnnnnnnnnnnnnnnnnnnnnnnnnnnnnnnnnnnnnnnnnnnnnnnnnnnnnnnnnnnnnnnnnnnnnnnnnnnnnnnnnnnnnnnnnnnnnnnnnnnnnnnnnnnnnnnnnnnnnnnnnnnnnnnnnnnnnnnnnnnnnnnnnnnnnnnnnnnnnnnnnnnnnnnnnnnnnnnnnnnnnnnnnnnnnnnnnnnnnnnnnnnnnnnnnnnnnnnnnnnnnnnnnnnnnnnnnnnnnnnnnnnnnnnnnnnnnnnnnnnnnnnnnnnnnnnnnnnnnnnnnnnnnnnnnnnnnnnnnnnnnnnnnnnnnnnnnnnnnnnnnnnnnnnnnnnnnnnnnnnnnnnnnnnnnnnnnnnnnnnnnnnnnnnnnnnnnnnnnnnnnnnnnnnnnnnnnnnnnnnnnnnnnnnnnnnnnnnnnnnnnnnnnnnnnnnnnnnnnnnnnnnnnnnnnnnnnnnnnnnnnnnnnnnnnnnnnnnnnnnnnnnnnnnnnnnnnnnnnnnnnnnnnnnnnnnnnnnnnnnnnnnnnnnnnnnnnnnnnnnnnnnnnnnnnnnnnnnnnnnnnnnnnnnnnnnnnnnnnnnnnnnnnnnnnnnnnnnnnnnnnnnnnnnnnnnnnnnnnnnnnnnnnnnnnnnnnnnnnnnnnnnnnnnnnnnnnnnnnnnnnnnnnnnnnnnnnnnnnnnnnnnnnnnnnnnnnnnnnnnnnnnnnnnnnnnnnnnnnnnnnnnnnnnnnnnnnnnnnnnnnnnnnnnnnnnnnnnnnnnnnnnnnnnnnnnnnnnnnnnnnnnnnnnnnnnnnnnnnnnnnnnnnnnnnnnnnnnnnnnnnnnnnnnnnnnnnnnnnnnnnnnnnnnnnnnnnnnnnnnnnnnnnnnnnnnnnnnnnnnnnnnnnnnnnnnnnnnnnnnnnnnnnnnnnnnnnnnnnnnnnnnnnnnnnnnnnnnnnnnnnnnnnnnnnnnnnnnnnnnnnnnnnnnnnnnnnnnnnnnnnnnnnnnnnnnnnnnnnnnnnnnnnnnnnnnnnnnnnnnnnnnnnnnnnnnnnnnnnnnnnnnnnnnnnnnnnnnnnnnnnnnnnnnnnnnnnnnnnnnnnnnnnnnnnnnnnnnnnnnnnnnnnnnnnnnnnnnnnnnnnnnnnnnnnnnnnnnnnnnnnnnnnnnnnnnnnnnnnnnnnnnnnnnnnnnnnnnnnnnnnnnnnnnnnnnnnnnnnnnnnnnnnnnnnnnnnnnnnnnnnnnnnnnnnnnnnnnnnnnnnnnnnnnnnnnnnnnnnnnnnnnnnnnnnnnnnnnnnnnnnnnnnnnnnnnnnnnnnnnnnnnnnnnnnnnnnnnnnnnnnnnnnnnnnnnnnnnnnnnnnnnnnnnnnnnnnnnnnnnnnnnnnnnnnnnnnnnnnnnnnnnnnnnnnnnnnnnnnnnnnnnnnnnnnnnnnnnnnnnnnnnnnnnnnnnnnnnnnnnnnnnnnnnnnnnnnnnnnnnnnnnnnnnnnnnnnnnnnnnnnnnnnnnnnnnnnnnnnnnnnnnnnnnnnnnnnnnnnnnnnnnnnnnnnnnnnnnnnnnnnnnnnnnnnnnnnnnnnnnnnnnnnnnnnnnnnnnnnnnnnnnnnnnnnnnnnnnnnnnnnnnnnnnnnnnnnnnnnnnnnnnnnnnnnnnnnnnnnnnnnnnnnnnnnnnnnnnnnnnnnnnnnnnnnnnnnnnnnnnnnnnnnnnnnnnnnnnnnnnnnnnnnnnnnnnnnnnnnnnnnnnnnnnnnnnnnnnnnnnnnnnnnnnnnnnnnnnnnnnnnnnnnnnnnnnnnnnnnnnnnnnnnnnnnnnnnnnnnnnnnnnnnnnnnnnnnnnnnnnnnnnnnnnnnnnnnnnnnnnnnnnnnnnnnnnnnnnnnnnnnnnnnnnnnnnnnnnnnnnnnnnnnnnnnnnnnnnnnnnnnnnnnnnnnnnnnnnnnnnnnnnnnnnnnnnnnnnnnnnnnnnnnnnnnnnnnnnnnnnnnnnnnnnnnnnnnnnnnnnnnnnnnnnnnnnnnnnnnnnnnnnnnnnnnnnnnnnnnnnnnnnnnnnnnnnnnnnnnnnnnnnnnnnnnnnnnnnnnnnnnnnnnnnnnnnnnnnnnnnnnnnnnnnnnnnnnnnnnnnnnnnnnnnnnnnnnnnnnnnnnnnnnnnnnnnnnnnnnnnnnnnnnnnnnnnnnnnnnnnnnnnnnnnnnnnnnnnnnnnnnnnnnnnnnnnnnnnnnnnnnnnnnnnnnnnnnnnnnnnnnnnnnnnnnnnnnnnnnnnnnnnnnnnnnnnnnnnnnnnnnnnnnnnnnnnnnnnnnnnnnnnnnnnnnnnnnnnnnnnnnnnnnnnnnnnnnnnnnnnnnnnnnnnnnnnnnnnnnnnnnnnnnnnnnnnnnnnnnnnnnnnnnnnnnnnnnnnnnnnnnnnnnnnnnnnnnnnnnnnnnnnnnnnnnnnnnnnnnnnnnnnnnnnnnnnnnnnnnnnnnnnnnnnnnnnnnnnnnnnnnnnnnnnnnnnnnnnnnnnnnnnnnnnnnnnnnnnnnnnnnnnnnnnnnnnnnnnnnnnnnnnnnnnnnnnnnnnnnnnnnnnnnnnnnnnnnnnnnnnnnnnnnnnnnnnnnnnnnnnnnnnnnnnnnnnnnnnnnnnnnnnnnnnnnnnnnnnnnnnnnnnnnnnnnnnnnnnnnnnnnnnnnnnnnnnnnnnnnnnnnnnnnnnnnnnnnnnnnnnnnnnnnnnnnnnnnnnnnnnnnnnnnnnnnnnnnnnnnnnnnnnnnnnnnnnnnnnnnnnnnnnnnnnnnnnnnnnnnnnnnnnnnnnnnnnnnnnnnnnnnnnnnnnnnnnnnnnnnnnnnnnnnnnnnnnnnnnnnnnnnnnnnnnnnnnnnnnnnnnnnnnnnnnnnnnnnnnnnnnnnnnnnnnnnnnnnnnnnnnnnnnnnnnnnnnnnnnnnnnnnnnnnnnnnnnnnnnnnnnnnnnnnnnnnnnnnnnnnnnnnnnnnnnnnnnnnnnnnnnnnnnnnnnnnnnnnnnnnnnnnnnnnnnnnnnnnnnnnnnnnnnnnnnnnnnnnnnnnnnnnnnnnnnnnnnnnnnnnnnnnnnnnnnnnnnnnnnnnnnnnnnnnnnnnnnnnnnnnnnnnnnnnnnnnnnnnnnnnnnnnnnnnnnnnnnnnnnnnnnnnnnnnnnnnnnnnnnnnnnnnnnnnnnnnnnnnnnnnnnnnnnnnnnnnnnnnnnnnnnnnnnnnnnnnnnnnnnnnnnnnnnnnnnnnnnnnnnnnnnnnnnnnnnnnnnnnnnnnnnnnnnnnnnnnnnnnnnnnnnnnnnnnnnnnnnnnnnnnnnnnnnnnnnnnnnnnnnnnnnnnnnnnnnnnnnnnnnnnnnnnnnnnnnnnnnnnnnnnnnnnnnnnnnnnnnnnnnnnnnnnnnnnnnnnnnnnnnnnnnnnnnnnnnnnnnnnnnnnnnnnnnnnnnnnnnnnnnnnnnnnnnnnnnnnnnnnnnnnnnnnnnnnnnnnnnnnnnnnnnnnnnnnnnnnnnnnnnnnnnnnnnnnnnnnnnnnnnnnnnnnnnnnnnnnnnnnnnnnnnnnnnnnnnnnnnnnnnnnnnnnnnnnnnnnnnnnnnnnnnnnnnnnnnnnnnnnnnnnnnnnnnnnnnnnnnnnnnnnnnnnnnnnnnnnnnnnnnnnnnnnnnnnnnnnnnnnnnnnnnnnnnnnnnnnnnnnnnnnnnnnnnnnnnnnnnnnnnnnnnnnnnnnnnnnnnnnnnnnnnnnnnnnnnnnnnnnnnnnnnnnnnnnnnnnnnnnnnnnnnnnnnnnnnnnnnnnnnnnnnnnnnnnnnnnnnnnnnnnnnnnnnnnnnnnnnnnnnnnnnnnnnnnnnnnnnnnnnnnnnnnnnnnnnnnnnnnnnnnnnnnnnnnnnnnnnnnnnnnnnnnnnnnnnnnnnnnnnnnnnnnnnnnnnnnnnnnnnnnnnnnnnnnnnnnnnnnnnnnnnnnnnnnnnnnnnnnnnnnnnnnnnnnnnnnnnnnnnnnnnnnnnnnnnnnnnnnnnnnnnnnnnnnnnnnnnnnnnnnnnnnnnnnnnnnnnnnnnnnnnnnnnnnnnnnnnnnnnnnnnnnnnnnnnnnnnnnnnnnnnnnnnnnnnnnnnnnnnnnnnnnnnnnnnnnnnnnnnnnnnnnnnnnnnnnnnnnnnnnnnnnnnnnnnnnnnnnnnnnnnnnnnnnnnnnnnnnnnnnnnnnnnnnnnnnnnnnnnnnnnnnnnnnnnnnnnnnnnnnnnnnnnnnnnnnnnnnnnnnnnnnnnnnnnnnnnnnnnnnnnnnnnnnnnnnnnnnnnnnnnnnnnnnnnnnnnnnnnnnnnnnnnnnnnnnnnnnnnnnnnnnnnnnnnnnnnnnnnnnnnnnnnnnnnnnnnnnnnnnnnnnnnnnnnnnnnnnnnnnnnnnnnnnnnnnnnnnnnnnnnnnnnnnnnnnnnnnnnnnnnnnnnnnnnnnnnnnnnnnnnnnnnnnnnnnnnnnnnnnnnnnnnnnnnnnnnnnnnnnnnnnnnnnnnnnnnnnnnnnnnnnnnnnnnnnnnnnnnnnnnnnnnnnnnnnnnnnnnnnnnnnnnnnnnnnnnnnnnnnnnnnnnnnnnnnnnnnnnnnnnnnnnnnnnnnnnnnnnnnnnnnnnnnnnnnnnnnnnnnnnnnnnnnnnnnnnnnnnnnnnnnnnnnnnnnnnnnnnnnnnnnnnnnnnnnnnnnnnnnnnnnnnnnnnnnnnnnnnnnnnnnnnnnnnnnnnnnnnnnnnnnnnnnnnnnnnnnnnnnnnnnnnnnnnnnnnnnnnnnnnnnnnnnnnnnnnnnnnnnnnnnnnnnnnnnnnnnnnnnnnnnnnnnnnnnnnnnnnnnnnnnnnnnnnnnnnnnnnnnnnnnnnnnnnnnnnnnnnnnnnnnnnnnnnnnnnnnnnnnnnnnnnnnnnnnnnnnnnnnnnnnnnnnnnnnnnnnnnnnnnnnnnnnnnnnnnnnnnnnnnnnnnnnnnnnnnnnnnnnnnnnnnnnnnnnnnnnnnnnnnnnnnnnnnnnnnnnnnnnnnnnnnnnnnnnnnnnnnnnnnnnnnnnnnnnnnnnnnnnnnnnnnnnnnnnnnnnnnnnnnnnnnnnnnnnnnnnnnnnnnnnnnnnnnnnnnnnnnnnnnnnnnnnnnnnnnnnnnnnnnnnnnnnnnnnnnnnnnnnnnnnnnnnnnnnnnnnnnnnnnnnnnnnnnnnnnnnnnnnnnnnnnnnnnnnnnnnnnnnnnnnnnnnnnnnnnnnnnnnnnnnnnnnnnnnnnnnnnnnnnnnnnnnnnnnnnnnnnnnnnnnnnnnnnnnnnnnnnnnnnnnnnnnnnnnnnnnnnnnnnnnnnnnnnnnnnnnnnnnnnnnnnnnnnnnnnnnnnnnnnnnnnnnnnnnnnnnnnnnnnnnnnnnnnnnnnnnnnnnnnnnnnnnnnnnnnnnnnnnnnnnnnnnnnnnnnnnnnnnnnnnnnnnnnnnnnnnnnnnnnnnnnnnnnnnnnnnnnnnnnnnnnnnnnnnnnnnnnnnnnnnnnnnnnnnnnnnnnnnnnnnnnnnnnnnnnnnnnnnnnnnnnnnnnnnnnnnnnnnnnnnnnnnnnnnnnnnnnnnnnnnnnnnnnnnnnnnnnnnnnnnnnnnnnnnnnnnnnnnnnnnnnnnnnnnnnnnnnnnnnnnnnnnnnnnnnnnnnnnnnnnnnnnnnnnnnnnnnnnnnnnnnnnnnnnnnnnnnnnnnnnnnnnnnnnnnnnnnnnnnnnnnnnnnnnnnnnnnnnnnnnnnnnnnnnnnnnnnnnnnnnnnnnnnnnnnnnnnnnnnnnnnnnnnnnnnnnnnnnnnnnnnnnnnnnnnnnnnnnnnnnnnnnnnnnnnnnnnnnnnnnnnnnnnnnnnnnnnnnnnnnnnnnnnnnnnnnnnnnnnnnnnnnnnnnnnnnnnnnnnnnnnnnnnnnnnnnnnnnnnnnnnnnnnnnnnnnnnnnnnnnnnnnnnnnnnnnnnnnnnnnnnnnnnnnnnnnnnnnnnnnnnnnnnnnnnnnnnnnnnnnnnnnnnnnnnnnnnnnnnnnnnnnnnnnnnnnnnnnnnnnnnnnnnnnnnnnnnnnnnnnnnnnnnnnnnnnnnnnnnnnnnnnnnnnnnnnnnnnnnnnnnnnnnnnnnnnnnnnnnnnnnnnnnnnnnnnnnnnnnnnnnnnnnnnnnnnnnnnnnnnnnnnnnnnnnnnnnnnnnnnnnnnnnnnnnnnnnnnnnnnnnnnnnnnnnnnnnnnnnnnnnnnnnnnnnnnnnnnnnnnnnnnnnnnnnnnnnnnnnnnnnnnnnnnnnnnnnnnnnnnnnnnnnnnnnnnnnnnnnnnnnnnnnnnnnnnnnnnnnnnnnnnnnnnnnnnnnnnnnnnnnnnnnnnnnnnnnnnnnnnnnnnnnnnnnnnnnnnnnnnnnnnnnnnnnnnnnnnnnnnnnnnnnnnnnnnnnnnnnnnnnnnnnnnnnnnnnnnnnnnnnnnnnnnnnnnnnnnnnnnnnnnnnnnnnnnnnnnnnnnnnnnnnnnnnnnnnnnnnnnnnnnnnnnnnnnnnnnnnnnnnnnnnnnnnnnnnnnnnnnnnnnnnnnnnnnnnnnnnnnnnnnnnnnnnnnnnnnnnnnnnnnnnnnnnnnnnnnnnnnnnnnnnnnnnnnnnnnnnnnnnnnnnnnnnnnnnnnnnnnnnnnnnnnnnnnnnnnnnnnnnnnnnnnnnnnnnnnnnnnnnnnnnnnnnnnnnnnnnnnnnnnnnnnnnnnnnnnnnnnnnnnnnnnnnnnnnnnnnnnnnnnnnnnnnnnnnnnnnnnnnnnnnnnnnnnnnnnnnnnnnnnnnnnnnnnnnnnnnnnnnnnnnnnnnnnnnnnnnnnnnnnnnnnnnnnnnnnnnnnnnnnnnnnnnnnnnnnnnnnnnnnnnnnnnnnnnnnnnnnnnnnnnnnnnnnnnnnnnnnnnnnnnnnnnnnnnnnnnnnnnnnnnnnnnnnnnnnnnnnnnnnnnnnnnnnnnnnnnnnnnnnnnnnnnnnnnnnnnnnnnnnnnnnnnnnnnnnnnnnnnnnnnnnnnnnnnnnnnnnnnnnnnnnnnnnnnnnnnnnnnnnnnnnnnnnnnnnnnnnnnnnnnnnnnnnnnnnnnnnnnnnnnnnnnnnnnnnnnnnnnnnnnnnnnnnnnnnnnnnnnnnnnnnnnnnnnnnnnnnnnnnnnnnnnnnnnnnnnnnnnnnnnnnnnnnnnnnnnnnnnnnnnnnnnnnnnnnnnnnnnnnnnnnnnnnnnnnnnnnnnnnnnnnnnnnnnnnnnnnnnnnnnnnnnnnnnnnnnnnnnnnnnnnnnnnnnnnnnnnnnnnnnnnnnnnnnnnnnnnnnnnnnnnnnnnnnnnnnnnnnnnnnnnnnnnnnnnnnnnnnnnnnnnnnnnnnnnnnnnnnnnnnnnnnnnnnnnnnnnnnnnnnnnnnnnnnnnnnnnnnnnnnnnnnnnnnnnnnnnnnnnnnnnnnnnnnnnnnnnnnnnnnnnnnnnnnnnnnnnnnnnnnnnnnnnnnnnnnnnnnnnnnnnnnnnnnnnnnnnnnnnnnnnnnnnnnnnnnnnnnnnnnnnnnnnnnnnnnnnnnnnnnnnnnnnnnnnnnnnnnnnnnnnnnnnnnnnnnnnnnnnnnnnnnnnnnnnnnnnnnnnnnnnnnnnnnnnnnnnnnnnnnnnnnnnnnnnnnnnnnnnnnnnnnnnnnnnnnnnnnnnnnnnnnnnnnnnnnnnnnnnnnnnnnnnnnnnnnnnnnnnnnnnnnnnnnnnnnnnnnnnnnnnnnnnnnnnnnnnnnnnnnnnnnnnnnnnnnnnnnnnnnnnnnnnnnnnnnnnnnnnnnnnnnnnnnnnnnnnnnnnnnnnnnnnnnnnnnnnnnnnnnnnnnnnnnnnnnnnnnnnnnnnnnnnnnnnnnnnnnnnnnnnnnnnnnnnnnnnnnnnnnnnnnnnnnnnnnnnnnnnnnnnnnnnnnnnnnnnnnnnnnnnnnnnnnnnnnnnnnnnnnnnnnnnnnnnnnnnnnnnnnnnnnnnnnnnnnnnnnnnnnnnnnnnnnnnnnnnnnnnnnnnnnnnnnnnnnnnnnnnnnnnnnnnnnnnnnnnnnnnnnnnnnnnnnnnnnnnnnnnnnnnnnnnnnnnnnnnnnnnnnnnnnnnnnnnnnnnnnnnnnnnnnnnnnnnnnnnnnnnnnnnnnnnnnnnnnnnnnnnnnnnnnnnnnnnnnnnnnnnnnnnnnnnnnnnnnnnnnnnnnnnnnnnnnnnnnnnnnnnnnnnnnnnnnnnnnnnnnnnnnnnnnnnnnnnnnnnnnnnnnnnnnnnnnnnnnnnnnnnnnnnnnnnnnnnnnnnnnnnnnnnnnnnnnnnnnnnnnnnnnnnnnnnnnnnnnnnnnnnnnnnnnnnnnnnnnnnnnnnnnnnnnnnnnnnnnnnnnnnnnnnnnnnnnnnnnnnnnnnnnnnnnnnnnnnnnnnnnnnnnnnnnnnnnnnnnnnnnnnnnnnnnnnnnnnnnnnnnnnnnnnnnnnnnnnnnnnnnnnnnnnnnnnnnnnnnnnnnnnnnnnnnnnnnnnnnnnnnnnnnnnnnnnnnnnnnnnnnnnnnnnnnnnnnnnnnnnnnnnnnnnnnnnnnnnnnnnnnnnnnnnnnnnnnnnnnnnnnnnnnnnnnnnnnnnnnnnnnnnnnnnnnnnnnnnnnnnnnnnnnnnnnnnnnnnnnnnnnnnnnnnnnnnnnnnnnnnnnnnnnnnnnnnnnnnnnnnnnnnnnnnnnnnnnnnnnnnnnnnnnnnnnnnnnnnnnnnnnnnnnnnnnnnnnnnnnnnnnnnnnnnnnnnnnnnnnnnnnnnnnnnnnnnnnnnnnnnnnnnnnnnnnnnnnnnnnnnnnnnnnnnnnnnnnnnnnnnnnnnnnnnnnnnnnnnnnnnnnnnnnnnnnnnnnnnnnnnnnnnnnnnnnnnnnnnnnnnnnnnnnnnnnnnnnnnnnnnnnnnnnnnnnnnnnnnnnnnnnnnnnnnnnnnnnnnnnnnnnnnnnnnnnnnnnnnnnnnnnnnnnnnnnnnnnnnnnnnnnnnnnnnnnnnnnnnnnnnnnnnnnnnnnnnnnnnnnnnnnnnnnnnnnnnnnnnnnnnnnnnnnnnnnnnnnnnnnnnnnnnnnnnnnnnnnnnnnnnnnnnnnnnnnnnnnnnnnnnnnnnnnnnnnnnnnnnnnnnnnnnnnnnnnnnnnnnnnnnnnnnnnnnnnnnnnnnnnnnnnnnnnnnnnnnnnnnnnnnnnnnnnnnnnnnnnnnnnnnnnnnnnnnnnnnnnnnnnnnnnnnnnnnnnnnnnnnnnnnnnnnnnnnnnnnnnnnnnnnnnnnnnnnnnnnnnnnnnnnnnnnnnnnnnnnnnnnnnnnnnnnnnnnnnnnnnnnnnnnnnnnnnnnnnnnnnnnnnnnnnnnnnnnnnnnnnnnnnnnnnnnnnnnnnnnnnnnnnnnnnnnnnnnnnnnnnnnnnnnnnnnnnnnnnnnnnnnnnnnnnnnnnnnnnnnnnnnnnnnnnnnnnnnnnnnnnnnnnnnnnnnnnnnnnnnnnnnnnnnnnnnnnnnnnnnnnnnnnnnnnnnnnnnnnnnnnnnnnnnnnnnnnnnnnnnnnnnnnnnnnnnnnnnnnnnnnnnnnnnnnnnnnnnnnnnnnnnnnnnnnnnnnnnnnnnnnnnnnnnnnnnnnnnnnnnnnnnnnnnnnnnnnnnnnnnnnnnnnnnnnnnnnnnnnnnnnnnnnnnnnnnnnnnnnnnnnnnnnnnnnnnnnnnnnnnnnnnnnnnnnnnnnnnnnnnnnnnnnnnnnnnnnnnnnnnnnnnnnnnnnnnnnnnnnnnnnnnnnnnnnnnnnnnnnnnnnnnnnnnnnnnnnnnnnnnnnnnnnnnnnnnnnnnnnnnnnnnnnnnnnnnnnnnnnnnnnnnnnnnnnnnnnnnnnnnnnnnnnnnnnnnnnnnnnnnnnnnnnnnnnnnnnnnnnnnnnnnnnnnnnnnnnnnnnnnnnnnnnnnnnnnnnnnnnnnnnnnnnnnnnnnnnnnnnnnnnnnnnnnnnnnnnnnnnnnnnnnnnnnnnnnnnnnnnnnnnnnnnnnnnnnnnnnnnnnnnnnnnnnnnnnnnnnnnnnnnnnnnnnnnnnnnnnnnnnnnnnnnnnnnnnnnnnnnnnnnnnnnnnnnnnnnnnnnnnnnnnnnnnnnnnnnnnnnnnnnnnnnnnnnnnnnnnnnnnnnnnnnnnnnnnnnnnnnnnnnnnnnnnnnnnnnnnnnnnnnnnnnnnnnnnnnnnnnnnnnnnnnnnnnnnnnnnnnnnnnnnnnnnnnnnnnnnnnnnnnnnnnnnnnnnnnnnnnnnnnnnnnnnnnnnnnnnnnnnnnnnnnnnnnnnnnnnnnnnnnnnnnnnnnnnnnnnnnnnnnnnnnnnnnnnnnnnnnnnnnnnnnnnnnnnnnnnnnnnnnnnnnnnnnnnnnnnnnnnnnnnnnnnnnnnnnnnnnnnnnnnnnnnnnnnnnnnnnnnnnnnnnnnnnnnnnnnnnnnnnnnnnnnnnnnnnnnnnnnnnnnnnnnnnnnnnnnnnnnnnnnnnnnnnnnnnnnnnnnnnnnnnnnnnnnnnnnnnnnnnnnnnnnnnnnnnnnnnnnnnnnnnnnnnnnnnnnnnnnnnnnnnnnnnnnnnnnnnnnnnnnnnnnnnnnnnnnnnnnnnnnnnnnnnnnnnnnnnnnnnnnnnnnnnnnnnnnnnnnnnnnnnnnnnnnnnnnnnnnnnnnnnnnnnnnnnnnnnnnnnnnnnnnnnnnnnnnnnnnnnnnnnnnnnnnnnnnnnnnnnnnnnnnnnnnnnnnnnnnnnnnnnnnnnnnnnnnnnnnnnnnnnnnnnnnnnnnnnnnnnnnnnnnnnnnnnnnnnnnnnnnnnnnnnnnnnnnnnnnnnnnnnnnnnnnnnnnnnnnnnnnnnnnnnnnnnnnnnnnnnnnnnnnnnnnnnnnnnnnnnnnnnnnnnnnnnnnnnnnnnnnnnnnnnnnnnnnnnnnnnnnnnnnnnnnnnnnnnnnnnnnnnnnnnnnnnnnnnnnnnnnnnnnnnnnnnnnnnnnnnnnnnnnnnnnnnnnnnnnnnnnnnnnnnnnnnnnnnnnnnnnnnnnnnnnnnnnnnnnnnnnnnnnnnnnnnnnnnnnnnnnnnnnnnnnnnnnnnnnnnnnnnnnnnnnnnnnnnnnnnnnnnnnnnnnnnnnnnnnnnnnnnnnnnnnnnnnnnnnnnnnnnnnnnnnnnnnnnnnnnnnnnnnnnnnnnnnnnnnnnnnnnnnnnnnnnnnnnnnnnnnnnnnnnnnnnnnnnnnnnnnnnnnnnnnnnnnnnnnnnnnnnnnnnnnnnnnnnnnnnnnnnnnnnnnnnnnnnnnnnnnnnnnnnnnnnnnnnnnnnnnnnnnnnnnnnnnnnnnnnnnnnnnnnnnnnnnnnnnnnnnnnnnnnnnnnnnnnnnnnnnnnnnnnnnnnnnnnnnnnnnnnnnnnnnnnnnnnnnnnnnnnnnnnnnnnnnnnnnnnnnnnnnnnnnnnnnnnnnnnnnnnnnnnnnnnnnnnnnnnnnnnnnnnnnnnnnnnnnnnnnnnnnnnnnnnnnnnnnnnnnnnnnnnnnnnnnnnnnnnnnnnnnnnnnnnnnnnnnnnnnnnnnnnnnnnnnnnnnnnnnnnnnnnnnnnnnnnnnnnnnnnnnnnnnnnnnnnnnnnnnnnnnnnnnnnnnnnnnnnnnnnnnnnnnnnnnnnnnnnnnnnnnnnnnnnnnnnnnnnnnnnnnnnnnnnnnnnnnnnnnnnnnnnnnnnnnnnnnnnnnnnnnnnnnnnnnnnnnnnnnnnnnnnnnnnnnnnnnnnnnnnnnnnnnnnnnnnnnnnnnnnnnnnnnnnnnnnnnnnnnnnnnnnnnnnnnnnnnnnnnnnnnnnnnnnnnnnnnnnnnnnnnnnnnnnnnnnnnnnnnnnnnnnnnnnnnnnnnnnnnnnnnnnnnnnnnnnnnnnnnnnnnnnnnnnnnnnnnnnnnnnnnnnnnnnnnnnnnnnnnnnnnnnnnnnnnnnnnnnnnnnnnnnnnnnnnnnnnnnnnnnnnnnnnnnnnnnnnnnnnnnnnnnnnnnnnnnnnnnnnnnnnnnnnnnnnnnnnnnnnnnnnnnnnnnnnnnnnnnnnnnnnnnnnnnnnnnnnnnnnnnnnnnnnnnnnnnnnnnnnnnnnnnnnnnnnnnnnnnnnnnnnnnnnnnnnnnnnnnnnnnnnnnnnnnnnnnnnnnnnnnnnnnnnnnnnnnnnnnnnnnnnnnnnnnnnnnnnnnnnnnnnnnnnnnnnnnnnnnnnnnnnnnnnnnnnnnnnnnnnnnnnnnnnnnnnnnnnnnnnnnnnnnnnnnnnnnnnnnnnnnnnnnnnnnnnnnnnnnnnnnnnnnnnnnnnnnnnnnnnnnnnnnnnnnnnnnnnnnnnnnnnnnnnnnnnnnnnnnnnnnnnnnnnnnnnnnnnnnnnnnnnnnnnnnnnnnnnnnnnnnnnnnnnnnnnnnnnnnnnnnnnnnnnnnnnnnnnnnnnnnnnnnnnnnnnnnnnnnnnnnnnnnnnnnnnnnnnnnnnnnnnnnnnnnnnnnnnnnnnnnnnnnnnnnnnnnnnnnnnnnnnnnnnnnnnnnnnnnnnnnnnnnnnnnnnnnnnnnnnnnnnnnnnnnnnnnnnnnnnnnnnnnnnnnnnnnnnnnnnnnnnnnnnnnnnnnnnnnnnnnnnnnnnnnnnnnnnnnnnnnnnnnnnnnnnnnnnnnnnnnnnnnnnnnnnnnnnnnnnnnnnnnnnnnnnnnnnnnnnnnnnnnnnnnnnnnnnnnnnnnnnnnnnnnnnnnnnnnnnnnnnnnnnnnnnnnnnnnnnnnnnnnnnnnnnnnnnnnnnnnnnnnnnnnnnnnnnnnnnnnnnnnnnnnnnnnnnnnnnnnnnnnnnnnnnnnnnnnnnnnnnnnnnnnnnnnnnnnnnnnnnnnnnnnnnnnnnnnnnnnnnnnnnnnnnnnnnnnnnnnnnnnnnnnnnnnnnnnnnnnnnnnnnnnnnnnnnnnnnnnnnnnnnnnnnnnnnnnnnnnnnnnnnnnnnnnnnnnnnnnnnnnnnnnnnnnnnnnnnnnnnnnnnnnnnnnnnnnnnnnnnnnnnnnnnnnnnnnnnnnnnnnnnnnnnnnnnnnnnnnnnnnnnnnnnnnnnnnnnnnnnnnnnnnnnnnnnnnnnnnnnnnnnnnnnnnnnnnnnnnnnnnnnnnnnnnnnnnnnnnnnnnnnnnnnnnnnnnnnnnnnnnnnnnnnnnnnnnnnnnnnnnnnnnnnnnnnnnnnnnnnnnnnnnnnnnnnnnnnnnnnnnnnnnnnnnnnnnnnnnnnnnnnnnnnnnnnnnnnnnnnnnnnnnnnnnnnnnnnnnnnnnnnnnnnnnnnnnnnnnnnnnnnnnnnnnnnnnnnnnnnnnnnnnnnnnnnnnnnnnnnnnnnnnnnnnnnnnnnnnnnnnnnnnnnnnnnnnnnnnnnnnnnnnnnnnnnnnnnnnnnnnnnnnnnnnnnnnnnnnnnnnnnnnnnnnnnnnnnnnnnnnnnnnnnnnnnnnnnnnnnnnnnnnnnnnnnnnnnnnnnnnnnnnnnnnnnnnnnnnnnnnnnnnnnnnnnnnnnnnnnnnnnnnnnnnnnnnnnnnnnnnnnnnnnnnnnnnnnnnnnnnnnnnnnnnnnnnnnnnnnnnnnnnnnnnnnnnnnnnnnnnnnnnnnnnnnnnnnnnnnnnnnnnnnnnnnnnnnnnnnnnnnnnnnnnnnnnnnnnnnnnnnnnnnnnnnnnnnnnnnnnnnnnnnnnnnnnnnnnnnnnnnnnnnnnnnnnnnnnnnnnnnnnnnnnnnnnnnnnnnnnnnnnnnnnnnnnnnnnnnnnnnnnnnnnnnnnnnnnnnnnnnnnnnnnnnnnnnnnnnnnnnnnnnnnnnnnnnnnnnnnnnnnnnnnnnnnnnnnnnnnnnnnnnnnnnnnnnnnnnnnnnnnnnnnnnnnnnnnnnnnnnnnnnnnnnnnnnnnnnnnnnnnnnnnnnnnnnnnnnnnnnnnnnnnnnnnnnnnnnnnnnnnnnnnnnnnnnnnnnnnnnnnnnnnnnnnnnnnnnnnnnnnnnnnnnnnnnnnnnnnnnnnnnnnnnnnnnnnnnnnnnnnnnnnnnnnnnnnnnnnnnnnnnnnnnnnnnnnnnnnnnnnnnnnnnnnnnnnnnnnnnnnnnnnnnnnnnnnnnnnnnnnnnnnnnnnnnnnnnnnnnnnnnnnnnnnnnnnnnnnnnnnnnnnnnnnnnnnnnnnnnnnnnnnnnnnnnnnnnnnnnnnnnnnnnnnnnnnnnnnnnnnnnnnnnnnnnnnnnnnnnnnnnnnnnnnnnnnnnnnnnnnnnnnnnnnnnnnnnnnnnnnnnnnnnnnnnnnnnnnnnnnnnnnnnnnnnnnnnnnnnnnnnnnnnnnnnnnnnnnnnnnnnnnnnnnnnnnnnnnnnnnnnnnnnnnnnnnnnnnnnnnnnnnnnnnnnnnnnnnnnnnnnnnnnnnnnnnnnnnnnnnnnnnnnnnnnnnnnnnnnnnnnnnnnnnnnnnnnnnnnnnnnnnnnnnnnnnnnnnnnnnnnnnnnnnnnnnnnnnnnnnnnnnnnnnnnnnnnnnnnnnnnnnnnnnnnnnnnnnnnnnnnnnnnnnnnnnnnnnnnnnnnnnnnnnnnnnnnnnnnnnnnnnnnnnnnnnnnnnnnnnnnnnnnnnnnnnnnnnnnnnnnnnnnnnnnnnnnnnnnnnnnnnnnnnnnnnnnnnnnnnnnnnnnnnnnnnnnnnnnnnnnnnnnnnnnnnnnnnnnnnnnnnnnnnnnnnnnnnnnnnnnnnnnnnnnnnnnnnnnnnnnnnnnnnnnnnnnnnnnnnnnnnnnnnnnnnnnnnnnnnnnnnnnnnnnnnnnnnnnnnnnnnnnnnnnnnnnnnnnnnnnnnnnnnnnnnnnnnnnnnnnnnnnnnnnnnnnnnnnnnnnnnnnnnnnnnnnnnnnnnnnnnnnnnnnnnnnnnnnnnnnnnnnnnnnnnnnnnnnnnnnnnnnnnnnnnnnnnnnnnnnnnnnnnnnnnnnnnnnnnnnnnnnnnnnnnnnnnnnnnnnnnnnnnnnnnnnnnnnnnnnnnnnnnnnnnnnnnnnnnnnnnnnnnnnnnnnnnnnnnnnnnnnnnnnnnnnnnnnnnnnnnnnnnnnnnnnnnnnnnnnnnnnnnnnnnnnnnnnnnnnnnnnnnnnnnnnnnnnnnnnnnnnnnnnnnnnnnnnnnnnnnnnnnnnnnnnnnnnnnnnnnnnnnnnnnnnnnnnnnnnnnnnnnnnnnnnnnnnnnnnnnnnnnnnnnnnnnnnnnnnnnnnnnnnnnnnnnnnnnnnnnnnnnnnnnnnnnnnnnnnnnnnnnnnnnnnnnnnnnnnnnnnnnnnnnnnnnnnnnnnnnnnnnnnnnnnnnnnnnnnnnnnnnnnnnnnnnnnnnnnnnnnnnnnnnnnnnnnnnnnnnnnnnnnnnnnnnnnnnnnnnnnnnnnnnnnnnnnnnnnnnnnnnnnnnnnnnnnnnnnnnnnnnnnnnnnnnnnnnnnnnnnnnnnnnnnnnnnnncgtaagttacgctgaaggcgtaacacatattagcctggggcaacgccccaggaaatgaatacacaaccaaaaagcaccctgaaggggtgcaacaactccccccgcccctacagggccaagtgcgaagttcaccgtgcggcagcatatgacaactgatgaatgatgaatacgctgaaagcgcaagttacgccggagccgtaacacataatagcctgaggcaacgccccaggaaaggaatgcgtaaagatagtgcaccctgaaggggtgcaacaactcctgccgcttcactcttccaccccggaggggtgggtcaattgtcagcccagggttgcgaccggcccgtaccaatggccctgtacccgtcacctaccacgagcatccaacgaagaccccggcgaccactccacaccggtccagggccgggcgctaccctgggcacaagtcgcgccaacgaagtaccccggcaggggttcgacagcttgtccctccccacccgtatcatgcgttgttgcctttttctccaccgggtactaaactagcttcctcaagccactatgctaaacggggatgtttaggggccggcggccgatacccggcgccggaaaacggaacggagcggatttctgtggctacatattcaaccgccctaatcgtgaagcgggtcgccaaagccagaagaagcggctgggtaactctgagccttatggactgcggcgtgaaggacagcgacctccgcacgcttctcgacgcgccgggtgtcgaacagcttcaggggctgaacctcagcggaaatcagctttccacgcttcccccggagatcggccgcctcaccgcactcgataggctgtacctcgtcaacaatcagctttccgcgcagccgacttcgtcggccgccctgccagacagtcaacaatatcagcacataacgattctatacagcacgaccgaattttcccaccttcctgtaggtccggaataattccgggccctcgagtttctacattatcacgcggcagcggcggcagccagacccctttctgagcaacgtatgcctaagcgtaggtccggaataattccgggccctcgagtttctacattatcacgcggcagcggcggcagccagagccctttctgagcaatgtatgcctaagcgtaggtccggaataattccggacccacattcagcaaaaattatgtcgtcatatataaaggcagcgcggcccagctgtggtttgaggagaatctccgctcacgtatactcaccctggcccattcagcccttccggcttggcgagacaattcatcgagcctcccaataccgccgctgaccccaacttccacatcaaaatcgctcacttagataacccctcaatctacttgatttaaacagaacccccgcgtagactcactgcagggcgcgcaaaaaggggctgtctatgaactcgtacaacttgctttcccaaaactggattcccgttctctatcacaatggcgatttcaaacgcgtcggtatcctcaaagcattccaagacgcacacagaatccgccaagtcgccgcatccaatcccatggaccgcctcgccatactccgctttctcctcgccctgctctactggtgcaagggaaacccggcgaacggcccacaggccgcgccttacgaaccattccctccggattggttcttgaaactcgaacagaataaagaatgctttgacttgtttggagagacccggcgattttatcagtacaagaaacctgtgggcgaagataaacggctgaccgccaactaccttgtccatgaggtgccgaccggtacgaatgcgtggcattttaggcattcaacggacgaagtaaacggtttgtgtcgcgcatgttgtgcaatgggcttgctaaggcttccagcatttgcgacttccggtgggcgtggtaaaccgcctggaatcaactcaaagcctcccctttacgtcataccgctgcgcggttcacttgcggccactgtacggctttcctggcggccggtcggcccgttaggaacgcccgcatgggaaaaaccggacgtccaactgcctggcataggcgaggtgccactgctcacaggtttgacctggctgccgcggcgagtgtggttagactctcctgcggaacgggcagaaacctgcatctcatgcgggcgcagcgagaggctaatcctgcgtactgtatttgccccaattggcagcaccaagacggaagaaggagaaccggtcagggcgtggtgcgacccgcatgtcatctacgggatgtccgccaagggcgaaatcagcagcctgcatgcgcgggacgctcttggcgcaccagacgccgcggcggggcagtgggccaatatccttgccggcctgcttcgaaaggggcaaacaggaaacgcatctccttgctggatagtgggcttttctaccgtccagaacgacaagtatcttgaggctgtcgaatgccagatcccttgcgatatcgaccaggcgccacaagaacagcgggacgaatgcctcaacaacttggaacaatggcgcaagggaaaatggggtttcgccaaaaacctgggatcggacaacgaaaagggcgagcggcgtgagcatcgagagattacctctatgcttgcgtccattggaccgcacgttgaaaagcaggtgtcggagaaaagtggatcgttgatagcgggcggcgaaaccgcatggcaggaagcggccaaggcgttccgcccgatgatgcgcttagccgcacaatcgctgtccccagggtttacgatccaagcagccagaatacgcaagcgcattgccaatgccatgccaaacatgacacccaaggccgcgaagaaggggcggggaaaaggacgggataaatgaccgcgacggaagaattcattcgcgtattgagtggcctcaagtcaggggatcttggtctgctgcggacttattcccaacacggcttggatgaatccgtggatgggtttgacctcttttcggggctttggtggccgttacgggcgaagaaccagcgggcgccgcgccgggaagtggcgtggcttatagctaaactctacgctgcccacccaattccccaggcccgcgaggccacgcttgcgcgtcaactccgccggtgcctcccgaccgatgagaacggtagaaatcggtttgggcggaagctcgacaacatattgatgctgccgctcgacaagatcgaggcggaacttcgttgggcgatcgggcaggttgcctcgagaggactttcactcgattgggtaagactcacggatgaactctccgtgtgggaatacgaatccgtccacctgcgatgggcggaacaattccttcaaaccgaagattaaggatgaaaggggtccatcatgctgatcgagattcacgcaatacaaaaccatagtccgtcaaacctaaatcgggacgacctgggtgcgccgaagacgtgctattttggcggtgctctgcgctcgcgcatctcaagtcaatgcatcaaacgaagcatccggatgagcagggagttccaagcgctttgcgggggaattcgcacgcgccagttggccagactgatcgccgagaaggttcaagggaagccagacgtccagaagcgcgccgagaagatactcgaactatgcggtttcaagcccaagaaggcgaagaaggaagaaacggacgacgcagcagatagcgaaaaaagcaagatgctcgtttatacgagccgccaagccatcgaggaaatggccgcactactccaaaacggggacggaaggactgagaaacaactggccgcggacttctgcgcgttgatcagtaagcatgtggcagtccccgatatggcactatccggacggatgctggagccggacaaatcttcaaacgacctttggaaggagcttgacaagaccgtcgaggccgcccttcaggttgctcacgcgatttcaacgcacgaggcgctgcccgaggtggactattatgtggccgccgatgacattccaggcgaagatgcaggggcgggctacgtggatgaatccatgtttgcctcggcatgtttctacaagtacttctcgatcaattgggacaagcttgtggaaaacctcaatggccagaaagaacttgccgcacatacggtaggggcttttatccgtggagcagcgctggcaaatccttcgggcaaacagaatagttttgcggcgcacaatccgcccgatggcctgctgatccaattcgccgacaccccgacgagctatgcgaatgccttcgccgctcccgtgtcgggcaagggcaatcctgacgtcatttcacaaagtgtggcgcagttggcgcattatgttcgcgacttggacacggggtacggcaagccccagaagcgtttctggttctcgccgaatctgcgttatccgctttgcgtcatcgaagccaagaaaacgattccggtggccgaggtaaacctcaaatcgctcgatcaactgattccggccgtcatcggcggcttgggctttgattggaattcggttcagaagaaagtgacaagccaacaggtggcgccatgacggccaacacgctgtttcttcggtttgaaggaccgctgcaggcgtggggtaatcaggagtcgaagttcgttgtacggcgcacggctgaagggcccactaaatcgggcgtgatcggactgttgtgtgcggctttgggcgtgacgcgggcggaagcgcaggaatgccggttgcctcaactggccgaactgcgtatgggcgtccgggtggatgcgcccggataccggtggtgggactatcacacggtaggcgcggggatggacatgcgcatcgccgaagccgaggggaagacaaaacccggcgcaatgctcacgcggcgggagtatctttgcgacgccactttcctggtggtgcttcaggggaatccggccctgatcaaagaactccggcaggtgatcgaaaagccgcgctggacgctctatttgggcaggaaatgctgtccgccgtcgcggcgggtgctcgaggaggcgccggcggcgcatccggacctgatttcggcgcttgtgtcggttccgtggcagcggcgctttgaaagggataatcccccggaaacactcgagtatctgctggattggtttccgtcgcccgaccagccggaggcgccggatgacgccgaggtgtggtacgacgtgccgttgacgttcgagccgccgtcgcatggtgcgcgctttgttgtgcgcgggcagttccgcgtgggcgccggggggcaggtcccggtggcggaatcggcgttgcagcgccaggtgccctcgccacaacgcccgcgggcagattatggcaattccgagtaccggaagatgcgcgcgcagcggctcgagaaggactcgcatctttgcgtgttctgcagatcgcgtgcaacgaccgtgcagcacgtcacgtaccgccacgccggcggcgatgagcggatcggcgagctgcgttccctttgccgcttgtgccacgacgccgtcaccatgctcgagtatgggctgaacatggggctggaccgcatcgacccggaggatgctcgatggcgggagcggattatcgagaaacgcgacgagatcgtcaagttccggtcgctcgagacgcggcggcgtcggcttagccccgaggaggtcgagtgatgtatctatcgagtctgatgatcaacaccggcgacaatccggatcgggagcggccgggccggcggtggctgcgcgacatctaccacgtccaccagcggctgtcgatggcgtttccatcgaggtcgcacggaagcccgtccggttttctgttccgcatcgacaaccagatcgaggagaactcgccgcgcgcgatcgttcttgttcagtctcaattggccccggactgggatagcgcattttacaatgcgggcatgcttctggcggcgccgccggaggttcgcgaatatgccccgtctttcgcgcccggcgaccaccttcggtttcgcatcagaatgaatttaagcaagaagaccaagacggcgcgcgatggtacagatctgtgcacgccgcacgagggtgtcgacaccttcggccgccccaaatctcagtcgaaacgcgtggccgtgacctgggacggcgatcaaggcgaaaccccggaccgggcaatccgccaatggtttgccgcgaaggcccaacacgccgggtttgcactccagaacgaattcaacgtggttcacctcggctgggtggcgggacacaagccgggaacggccgagaaccggctgcggtttcgttccgcgctgctcgagggagacttgacggtggcggacgggccggctttcatgctatcggtcgagagcgggctgggctcggcgaaagggtttgggttcgggctgctgtctgtggttcgtgcaggcgggacgcccgcaccacaatcgaggcgtggcgaatgctgacgcgtgacttgcacgacctcgccaaggtgcgcgaccggctcagctacctttatgtcgagcacgcccggatcgatcaggaagacaaagccatcgccattcacgacgcccagggactcaccccggtgccgtgcgccacgctcgccctgttgatgctggggcccggcaccgccatcacacacgccgccgtcctcgccctcgccgacaacggctgcctcgtcgtgtggtgcggcgagcagggggtccggttctatgccgcggggcacggaaccacgcgaaactcccagaaccttctgctccaggcgcgcctctcgagccgccgctccacgcgcctcgccgtggttcgccgcctgtacgagatgcgctttccgggaaagctcgattcgagtctgacgctccaacagatccgcggcatggaaggcgtgcgcgtgcgcgaagcctactcgagcctgtcccgccaattcggcataccgtggacgggccgggcgtacgaccgccagaactggcgcgacgccgatcccgtcaaccgcgctctctccaccgccaattcctgcctctacggaatctgccacgccgccatagtcggcgcaggctattcgcccgcgctcgggttcatccacaccggcaaacagttgtcgtttgtctacgatatcgccgacctatacaaggccacgaccaccgcccccgccgcgttcgaaaccgccgcccgctcggcccgaaacatcgagcgagaggtccgaatcctgtgccgcgatgcttttgcggcgcagcgcctcctcgaacgcgttgtgaaggacctcgagtacgcgctggacgtgaagccggccgatgacgacgaagccgagaccgatttcgactcggatcccggcacgcccggaggcctgtgggaccctgacgccggcgaagtggccggcggcgtgtcctatgccgaacccgacgaacacacagaggatgaaccctaatggtcgtcatggtgctcgaacgcgtatcgccttcgctccgcggtgaactcactcgatggctgctcgaaccaaaatccggcgtgtttgtcggcaccgtctccgccatggtaagagaaaaactatgggaaaaggtttgccggaaaaccggcgaaggaggatctatcctcatttggaccgcaaataacgaacaggggttcaaaatcgacttctggggcgatccctcgagacacgtcctcagttgggatggacttcagctcattacaaagccaaaataaccaataaataccaagtgtaatccccacgcgcgtggggatgaaccgtcctggttgttatgcgctcgcccgcctccttcgtaatccccacgcgcgtggggatgaaccggcgatg

SEQ ID NO: 1099 - DNA, 104913 bp, Artificial Sequence
  Synthetic Oligonucleotide
  misc_feature (1)..(97234): n is a, c, g, or t
nnnnnnnnnnnnnnnnnnnnnnnnnnnnnnnnnnnnnnnnnnnnnnnnnnnnnnnnnnnnnnnnnnnnnnnnnnnnnnnnnnnnnnnnnnnnnnnnnnnnnnnnnnnnnnnnnnnnnnnnnnnnnnnnnnnnnnnnnnnnnnnnnnnnnnnnnnnnnnnnnnnnnnnnnnnnnnnnnnnnnnnnnnnnnnnnnnnnnnnnnnnnnnnnnnnnnnnnnnnnnnnnnnnnnnnnnnnnnnnnnnnnnnnnnnnnnnnnnnnnnnnnnnnnnnnnnnnnnnnnnnnnnnnnnnnnnnnnnnnnnnnnnnnnnnnnnnnnnnnnnnnnnnnnnnnnnnnnnnnnnnnnnnnnnnnnnnnnnnnnnnnnnnnnnnnnnnnnnnnnnnnnnnnnnnnnnnnnnnnnnnnnnnnnnnnnnnnnnnnnnnnnnnnnnnnnnnnnnnnnnnnnnnnnnnnnnnnnnnnnnnnnnnnnnnnnnnnnnnnnnnnnnnnnnnnnnnnnnnnnnnnnnnnnnnnnnnnnnnnnnnnnnnnnnnnnnnnnnnnnnnnnnnnnnnnnnnnnnnnnnnnnnnnnnnnnnnnnnnnnnnnnnnnnnnnnnnnnnnnnnnnnnnnnnnnnnnnnnnnnnnnnnnnnnnnnnnnnnnnnnnnnnnnnnnnnnnnnnnnnnnnnnnnnnnnnnnnnnnnnnnnnnnnnnnnnnnnnnnnnnnnnnnnnnnnnnnnnnnnnnnnnnnnnnnnnnnnnnnnnnnnnnnnnnnnnnnnnnnnnnnnnnnnnnnnnnnnnnnnnnnnnnnnnnnnnnnnnnnnnnnnnnnnnnnnnnnnnnnnnnnnnnnnnnnnnnnnnnnnnnnnnnnnnnnnnnnnnnnnnnnnnnnnnnnnnnnnnnnnnnnnnnnnnnnnnnnnnnnnnnnnnnnnnnnnnnnnnnnnnnnnnnnnnnnnnnnnnnnnnnnnnnnnnnnnnnnnnnnnnnnnnnnnnnnnnnnnnnnnnnnnnnnnnnnnnnnnnnnnnnnnnnnnnnnnnnnnnnnnnnnnnnnnnnnnnnnnnnnnnnnnnnnnnnnnnnnnnnnnnnnnnnnnnnnnnnnnnnnnnnnnnnnnnnnnnnnnnnnnnnnnnnnnnnnnnnnnnnnnnnnnnnnnnnnnnnnnnnnnnnnnnnnnnnnnnnnnnnnnnnnnnnnnnnnnnnnnnnnnnnnnnnnnnnnnnnnnnnnnnnnnnnnnnnnnnnnnnnnnnnnnnnnnnnnnnnnnnnnnnnnnnnnnnnnnnnnnnnnnnnnnnnnnnnnnnnnnnnnnnnnnnnnnnnnnnnnnnnnnnnnnnnnnnnnnnnnnnnnnnnnnnnnnnnnnnnnnnnnnnnnnnnnnnnnnnnnnnnnnnnnnnnnnnnnnnnnnnnnnnnnnnnnnnnnnnnnnnnnnnnnnnnnnnnnnnnnnnnnnnnnnnnnnnnnnnnnnnnnnnnnnnnnnnnnnnnnnnnnnnnnnnnnnnnnnnnnnnnnnnnnnnnnnnnnnnnnnnnnnnnnnnnnnnnnnnnnnnnnnnnnnnnnnnnnnnnnnnnnnnnnnnnnnnnnnnnnnnnnnnnnnnnnnnnnnnnnnnnnnnnnnnnnnnnnnnnnnnnnnnnnnnnnnnnnnnnnnnnnnnnnnnnnnnnnnnnnnnnnnnnnnnnnnnnnnnnnnnnnnnnnnnnnnnnnnnnnnnnnnnnnnnnnnnnnnnnnnnnnnnnnnnnnnnnnnnnnnnnnnnnnnnnnnnnnnnnnnnnnnnnnnnnnnnnnnnnnnnnnnnnnnnnnnnnnnnnnnnnnnnnnnnnnnnnnnnnnnnnnnnnnnnnnnnnnnnnnnnnnnnnnnnnnnnnnnnnnnnnnnnnnnnnnnnnnnnnnnnnnnnnnnnnnnnnnnnnnnnnnnnnnnnnnnnnnnnnnnnnnnnnnnnnnnnnnnnnnnnnnnnnnnnnnnnnnnnnnnnnnnnnnnnnnnnnnnnnnnnnnnnnnnnnnnnnnnnnnnnnnnnnnnnnnnnnnnnnnnnnnnnnnnnnnnnnnnnnnnnnnnnnnnnnnnnnnnnnnnnnnnnnnnnnnnnnnnnnnnnnnnnnnnnnnnnnnnnnnnnnnnnnnnnnnnnnnnnnnnnnnnnnnnnnnnnnnnnnnnnnnnnnnnnnnnnnnnnnnnnnnnnnnnnnnnnnnnnnnnnnnnnnnnnnnnnnnnnnnnnnnnnnnnnnnnnnnnnnnnnnnnnnnnnnnnnnnnnnnnnnnnnnnnnnnnnnnnnnnnnnnnnnnnnnnnnnnnnnnnnnnnnnnnnnnnnnnnnnnnnnnnnnnnnnnnnnnnnnnnnnnnnnnnnnnnnnnnnnnnnnnnnnnnnnnnnnnnnnnnnnnnnnnnnnnnnnnnnnnnnnnnnnnnnnnnnnnnnnnnnnnnnnnnnnnnnnnnnnnnnnnnnnnnnnnnnnnnnnnnnnnnnnnnnnnnnnnnnnnnnnnnnnnnnnnnnnnnnnnnnnnnnnnnnnnnnnnnnnnnnnnnnnnnnnnnnnnnnnnnnnnnnnnnnnnnnnnnnnnnnnnnnnnnnnnnnnnnnnnnnnnnnnnnnnnnnnnnnnnnnnnnnnnnnnnnnnnnnnnnnnnnnnnnnnnnnnnnnnnnnnnnnnnnnnnnnnnnnnnnnnnnnnnnnnnnnnnnnnnnnnnnnnnnnnnnnnnnnnnnnnnnnnnnnnnnnnnnnnnnnnnnnnnnnnnnnnnnnnnnnnnnnnnnnnnnnnnnnnnnnnnnnnnnnnnnnnnnnnnnnnnnnnnnnnnnnnnnnnnnnnnnnnnnnnnnnnnnnnnnnnnnnnnnnnnnnnnnnnnnnnnnnnnnnnnnnnnnnnnnnnnnnnnnnnnnnnnnnnnnnnnnnnnnnnnnnnnnnnnnnnnnnnnnnnnnnnnnnnnnnnnnnnnnnnnnnnnnnnnnnnnnnnnnnnnnnnnnnnnnnnnnnnnnnnnnnnnnnnnnnnnnnnnnnnnnnnnnnnnnnnnnnnnnnnnnnnnnnnnnnnnnnnnnnnnnnnnnnnnnnnnnnnnnnnnnnnnnnnnnnnnnnnnnnnnnnnnnnnnnnnnnnnnnnnnnnnnnnnnnnnnnnnnnnnnnnnnnnnnnnnnnnnnnnnnnnnnnnnnnnnnnnnnnnnnnnnnnnnnnnnnnnnnnnnnnnnnnnnnnnnnnnnnnnnnnnnnnnnnnnnnnnnnnnnnnnnnnnnnnnnnnnnnnnnnnnnnnnnnnnnnnnnnnnnnnnnnnnnnnnnnnnnnnnnnnnnnnnnnnnnnnnnnnnnnnnnnnnnnnnnnnnnnnnnnnnnnnnnnnnnnnnnnnnnnnnnnnnnnnnnnnnnnnnnnnnnnnnnnnnnnnnnnnnnnnnnnnnnnnnnnnnnnnnnnnnnnnnnnnnnnnnnnnnnnnnnnnnnnnnnnnnnnnnnnnnnnnnnnnnnnnnnnnnnnnnnnnnnnnnnnnnnnnnnnnnnnnnnnnnnnnnnnnnnnnnnnnnnnnnnnnnnnnnnnnnnnnnnnnnnnnnnnnnnnnnnnnnnnnnnnnnnnnnnnnnnnnnnnnnnnnnnnnnnnnnnnnnnnnnnnnnnnnnnnnnnnnnnnnnnnnnnnnnnnnnnnnnnnnnnnnnnnnnnnnnnnnnnnnnnnnnnnnnnnnnnnnnnnnnnnnnnnnnnnnnnnnnnnnnnnnnnnnnnnnnnnnnnnnnnnnnnnnnnnnnnnnnnnnnnnnnnnnnnnnnnnnnnnnnnnnnnnnnnnnnnnnnnnnnnnnnnnnnnnnnnnnnnnnnnnnnnnnnnnnnnnnnnnnnnnnnnnnnnnnnnnnnnnnnnnnnnnnnnnnnnnnnnnnnnnnnnnnnnnnnnnnnnnnnnnnnnnnnnnnnnnnnnnnnnnnnnnnnnnnnnnnnnnnnnnnnnnnnnnnnnnnnnnnnnnnnnnnnnnnnnnnnnnnnnnnnnnnnnnnnnnnnnnnnnnnnnnnnnnnnnnnnnnnnnnnnnnnnnnnnnnnnnnnnnnnnnnnnnnnnnnnnnnnnnnnnnnnnnnnnnnnnnnnnnnnnnnnnnnnnnnnnnnnnnnnnnnnnnnnnnnnnnnnnnnnnnnnnnnnnnnnnnnnnnnnnnnnnnnnnnnnnnnnnnnnnnnnnnnnnnnnnnnnnnnnnnnnnnnnnnnnnnnnnnnnnnnnnnnnnnnnnnnnnnnnnnnnnnnnnnnnnnnnnnnnnnnnnnnnnnnnnnnnnnnnnnnnnnnnnnnnnnnnnnnnnnnnnnnnnnnnnnnnnnnnnnnnnnnnnnnnnnnnnnnnnnnnnnnnnnnnnnnnnnnnnnnnnnnnnnnnnnnnnnnnnnnnnnnnnnnnnnnnnnnnnnnnnnnnnnnnnnnnnnnnnnnnnnnnnnnnnnnnnnnnnnnnnnnnnnnnnnnnnnnnnnnnnnnnnnnnnnnnnnnnnnnnnnnnnnnnnnnnnnnnnnnnnnnnnnnnnnnnnnnnnnnnnnnnnnnnnnnnnnnnnnnnnnnnnnnnnnnnnnnnnnnnnnnnnnnnnnnnnnnnnnnnnnnnnnnnnnnnnnnnnnnnnnnnnnnnnnnnnnnnnnnnnnnnnnnnnnnnnnnnnnnnnnnnnnnnnnnnnnnnnnnnnnnnnnnnnnnnnnnnnnnnnnnnnnnnnnnnnnnnnnnnnnnnnnnnnnnnnnnnnnnnnnnnnnnnnnnnnnnnnnnnnnnnnnnnnnnnnnnnnnnnnnnnnnnnnnnnnnnnnnnnnnnnnnnnnnnnnnnnnnnnnnnnnnnnnnnnnnnnnnnnnnnnnnnnnnnnnnnnnnnnnnnnnnnnnnnnnnnnnnnnnnnnnnnnnnnnnnnnnnnnnnnnnnnnnnnnnnnnnnnnnnnnnnnnnnnnnnnnnnnnnnnnnnnnnnnnnnnnnnnnnnnnnnnnnnnnnnnnnnnnnnnnnnnnnnnnnnnnnnnnnnnnnnnnnnnnnnnnnnnnnnnnnnnnnnnnnnnnnnnnnnnnnnnnnnnnnnnnnnnnnnnnnnnnnnnnnnnnnnnnnnnnnnnnnnnnnnnnnnnnnnnnnnnnnnnnnnnnnnnnnnnnnnnnnnnnnnnnnnnnnnnnnnnnnnnnnnnnnnnnnnnnnnnnnnnnnnnnnnnnnnnnnnnnnnnnnnnnnnnnnnnnnnnnnnnnnnnnnnnnnnnnnnnnnnnnnnnnnnnnnnnnnnnnnnnnnnnnnnnnnnnnnnnnnnnnnnnnnnnnnnnnnnnnnnnnnnnnnnnnnnnnnnnnnnnnnnnnnnnnnnnnnnnnnnnnnnnnnnnnnnnnnnnnnnnnnnnnnnnnnnnnnnnnnnnnnnnnnnnnnnnnnnnnnnnnnnnnnnnnnnnnnnnnnnnnnnnnnnnnnnnnnnnnnnnnnnnnnnnnnnnnnnnnnnnnnnnnnnnnnnnnnnnnnnnnnnnnnnnnnnnnnnnnnnnnnnnnnnnnnnnnnnnnnnnnnnnnnnnnnnnnnnnnnnnnnnnnnnnnnnnnnnnnnnnnnnnnnnnnnnnnnnnnnnnnnnnnnnnnnnnnnnnnnnnnnnnnnnnnnnnnnnnnnnnnnnnnnnnnnnnnnnnnnnnnnnnnnnnnnnnnnnnnnnnnnnnnnnnnnnnnnnnnnnnnnnnnnnnnnnnnnnnnnnnnnnnnnnnnnnnnnnnnnnnnnnnnnnnnnnnnnnnnnnnnnnnnnnnnnnnnnnnnnnnnnnnnnnnnnnnnnnnnnnnnnnnnnnnnnnnnnnnnnnnnnnnnnnnnnnnnnnnnnnnnnnnnnnnnnnnnnnnnnnnnnnnnnnnnnnnnnnnnnnnnnnnnnnnnnnnnnnnnnnnnnnnnnnnnnnnnnnnnnnnnnnnnnnnnnnnnnnnnnnnnnnnnnnnnnnnnnnnnnnnnnnnnnnnnnnnnnnnnnnnnnnnnnnnnnnnnnnnnnnnnnnnnnnnnnnnnnnnnnnnnnnnnnnnnnnnnnnnnnnnnnnnnnnnnnnnnnnnnnnnnnnnnnnnnnnnnnnnnnnnnnnnnnnnnnnnnnnnnnnnnnnnnnnnnnnnnnnnnnnnnnnnnnnnnnnnnnnnnnnnnnnnnnnnnnnnnnnnnnnnnnnnnnnnnnnnnnnnnnnnnnnnnnnnnnnnnnnnnnnnnnnnnnnnnnnnnnnnnnnnnnnnnnnnnnnnnnnnnnnnnnnnnnnnnnnnnnnnnnnnnnnnnnnnnnnnnnnnnnnnnnnnnnnnnnnnnnnnnnnnnnnnnnnnnnnnnnnnnnnnnnnnnnnnnnnnnnnnnnnnnnnnnnnnnnnnnnnnnnnnnnnnnnnnnnnnnnnnnnnnnnnnnnnnnnnnnnnnnnnnnnnnnnnnnnnnnnnnnnnnnnnnnnnnnnnnnnnnnnnnnnnnnnnnnnnnnnnnnnnnnnnnnnnnnnnnnnnnnnnnnnnnnnnnnnnnnnnnnnnnnnnnnnnnnnnnnnnnnnnnnnnnnnnnnnnnnnnnnnnnnnnnnnnnnnnnnnnnnnnnnnnnnnnnnnnnnnnnnnnnnnnnnnnnnnnnnnnnnnnnnnnnnnnnnnnnnnnnnnnnnnnnnnnnnnnnnnnnnnnnnnnnnnnnnnnnnnnnnnnnnnnnnnnnnnnnnnnnnnnnnnnnnnnnnnnnnnnnnnnnnnnnnnnnnnnnnnnnnnnnnnnnnnnnnnnnnnnnnnnnnnnnnnnnnnnnnnnnnnnnnnnnnnnnnnnnnnnnnnnnnnnnnnnnnnnnnnnnnnnnnnnnnnnnnnnnnnnnnnnnnnnnnnnnnnnnnnnnnnnnnnnnnnnnnnnnnnnnnnnnnnnnnnnnnnnnnnnnnnnnnnnnnnnnnnnnnnnnnnnnnnnnnnnnnnnnnnnnnnnnnnnnnnnnnnnnnnnnnnnnnnnnnnnnnnnnnnnnnnnnnnnnnnnnnnnnnnnnnnnnnnnnnnnnnnnnnnnnnnnnnnnnnnnnnnnnnnnnnnnnnnnnnnnnnnnnnnnnnnnnnnnnnnnnnnnnnnnnnnnnnnnnnnnnnnnnnnnnnnnnnnnnnnnnnnnnnnnnnnnnnnnnnnnnnnnnnnnnnnnnnnnnnnnnnnnnnnnnnnnnnnnnnnnnnnnnnnnnnnnnnnnnnnnnnnnnnnnnnnnnnnnnnnnnnnnnnnnnnnnnnnnnnnnnnnnnnnnnnnnnnnnnnnnnnnnnnnnnnnnnnnnnnnnnnnnnnnnnnnnnnnnnnnnnnnnnnnnnnnnnnnnnnnnnnnnnnnnnnnnnnnnnnnnnnnnnnnnnnnnnnnnnnnnnnnnnnnnnnnnnnnnnnnnnnnnnnnnnnnnnnnnnnnnnnnnnnnnnnnnnnnnnnnnnnnnnnnnnnnnnnnnnnnnnnnnnnnnnnnnnnnnnnnnnnnnnnnnnnnnnnnnnnnnnnnnnnnnnnnnnnnnnnnnnnnnnnnnnnnnnnnnnnnnnnnnnnnnnnnnnnnnnnnnnnnnnnnnnnnnnnnnnnnnnnnnnnnnnnnnnnnnnnnnnnnnnnnnnnnnnnnnnnnnnnnnnnnnnnnnnnnnnnnnnnnnnnnnnnnnnnnnnnnnnnnnnnnnnnnnnnnnnnnnnnnnnnnnnnnnnnnnnnnnnnnnnnnnnnnnnnnnnnnnnnnnnnnnnnnnnnnnnnnnnnnnnnnnnnnnnnnnnnnnnnnnnnnnnnnnnnnnnnnnnnnnnnnnnnnnnnnnnnnnnnnnnnnnnnnnnnnnnnnnnnnnnnnnnnnnnnnnnnnnnnnnnnnnnnnnnnnnnnnnnnnnnnnnnnnnnnnnnnnnnnnnnnnnnnnnnnnnnnnnnnnnnnnnnnnnnnnnnnnnnnnnnnnnnnnnnnnnnnnnnnnnnnnnnnnnnnnnnnnnnnnnnnnnnnnnnnnnnnnnnnnnnnnnnnnnnnnnnnnnnnnnnnnnnnnnnnnnnnnnnnnnnnnnnnnnnnnnnnnnnnnnnnnnnnnnnnnnnnnnnnnnnnnnnnnnnnnnnnnnnnnnnnnnnnnnnnnnnnnnnnnnnnnnnnnnnnnnnnnnnnnnnnnnnnnnnnnnnnnnnnnnnnnnnnnnnnnnnnnnnnnnnnnnnnnnnnnnnnnnnnnnnnnnnnnnnnnnnnnnnnnnnnnnnnnnnnnnnnnnnnnnnnnnnnnnnnnnnnnnnnnnnnnnnnnnnnnnnnnnnnnnnnnnnnnnnnnnnnnnnnnnnnnnnnnnnnnnnnnnnnnnnnnnnnnnnnnnnnnnnnnnnnnnnnnnnnnnnnnnnnnnnnnnnnnnnnnnnnnnnnnnnnnnnnnnnnnnnnnnnnnnnnnnnnnnnnnnnnnnnnnnnnnnnnnnnnnnnnnnnnnnnnnnnnnnnnnnnnnnnnnnnnnnnnnnnnnnnnnnnnnnnnnnnnnnnnnnnnnnnnnnnnnnnnnnnnnnnnnnnnnnnnnnnnnnnnnnnnnnnnnnnnnnnnnnnnnnnnnnnnnnnnnnnnnnnnnnnnnnnnnnnnnnnnnnnnnnnnnnnnnnnnnnnnnnnnnnnnnnnnnnnnnnnnnnnnnnnnnnnnnnnnnnnnnnnnnnnnnnnnnnnnnnnnnnnnnnnnnnnnnnnnnnnnnnnnnnnnnnnnnnnnnnnnnnnnnnnnnnnnnnnnnnnnnnnnnnnnnnnnnnnnnnnnnnnnnnnnnnnnnnnnnnnnnnnnnnnnnnnnnnnnnnnnnnnnnnnnnnnnnnnnnnnnnnnnnnnnnnnnnnnnnnnnnnnnnnnnnnnnnnnnnnnnnnnnnnnnnnnnnnnnnnnnnnnnnnnnnnnnnnnnnnnnnnnnnnnnnnnnnnnnnnnnnnnnnnnnnnnnnnnnnnnnnnnnnnnnnnnnnnnnnnnnnnnnnnnnnnnnnnnnnnnnnnnnnnnnnnnnnnnnnnnnnnnnnnnnnnnnnnnnnnnnnnnnnnnnnnnnnnnnnnnnnnnnnnnnnnnnnnnnnnnnnnnnnnnnnnnnnnnnnnnnnnnnnnnnnnnnnnnnnnnnnnnnnnnnnnnnnnnnnnnnnnnnnnnnnnnnnnnnnnnnnnnnnnnnnnnnnnnnnnnnnnnnnnnnnnnnnnnnnnnnnnnnnnnnnnnnnnnnnnnnnnnnnnnnnnnnnnnnnnnnnnnnnnnnnnnnnnnnnnnnnnnnnnnnnnnnnnnnnnnnnnnnnnnnnnnnnnnnnnnnnnnnnnnnnnnnnnnnnnnnnnnnnnnnnnnnnnnnnnnnnnnnnnnnnnnnnnnnnnnnnnnnnnnnnnnnnnnnnnnnnnnnnnnnnnnnnnnnnnnnnnnnnnnnnnnnnnnnnnnnnnnnnnnnnnnnnnnnnnnnnnnnnnnnnnnnnnnnnnnnnnnnnnnnnnnnnnnnnnnnnnnnnnnnnnnnnnnnnnnnnnnnnnnnnnnnnnnnnnnnnnnnnnnnnnnnnnnnnnnnnnnnnnnnnnnnnnnnnnnnnnnnnnnnnnnnnnnnnnnnnnnnnnnnnnnnnnnnnnnnnnnnnnnnnnnnnnnnnnnnnnnnnnnnnnnnnnnnnnnnnnnnnnnnnnnnnnnnnnnnnnnnnnnnnnnnnnnnnnnnnnnnnnnnnnnnnnnnnnnnnnnnnnnnnnnnnnnnnnnnnnnnnnnnnnnnnnnnnnnnnnnnnnnnnnnnnnnnnnnnnnnnnnnnnnnnnnnnnnnnnnnnnnnnnnnnnnnnnnnnnnnnnnnnnnnnnnnnnnnnnnnnnnnnnnnnnnnnnnnnnnnnnnnnnnnnnnnnnnnnnnnnnnnnnnnnnnnnnnnnnnnnnnnnnnnnnnnnnnnnnnnnnnnnnnnnnnnnnnnnnnnnnnnnnnnnnnnnnnnnnnnnnnnnnnnnnnnnnnnnnnnnnnnnnnnnnnnnnnnnnnnnnnnnnnnnnnnnnnnnnnnnnnnnnnnnnnnnnnnnnnnnnnnnnnnnnnnnnnnnnnnnnnnnnnnnnnnnnnnnnnnnnnnnnnnnnnnnnnnnnnnnnnnnnnnnnnnnnnnnnnnnnnnnnnnnnnnnnnnnnnnnnnnnnnnnnnnnnnnnnnnnnnnnnnnnnnnnnnnnnnnnnnnnnnnnnnnnnnnnnnnnnnnnnnnnnnnnnnnnnnnnnnnnnnnnnnnnnnnnnnnnnnnnnnnnnnnnnnnnnnnnnnnnnnnnnnnnnnnnnnnnnnnnnnnnnnnnnnnnnnnnnnnnnnnnnnnnnnnnnnnnnnnnnnnnnnnnnnnnnnnnnnnnnnnnnnnnnnnnnnnnnnnnnnnnnnnnnnnnnnnnnnnnnnnnnnnnnnnnnnnnnnnnnnnnnnnnnnnnnnnnnnnnnnnnnnnnnnnnnnnnnnnnnnnnnnnnnnnnnnnnnnnnnnnnnnnnnnnnnnnnnnnnnnnnnnnnnnnnnnnnnnnnnnnnnnnnnnnnnnnnnnnnnnnnnnnnnnnnnnnnnnnnnnnnnnnnnnnnnnnnnnnnnnnnnnnnnnnnnnnnnnnnnnnnnnnnnnnnnnnnnnnnnnnnnnnnnnnnnnnnnnnnnnnnnnnnnnnnnnnnnnnnnnnnnnnnnnnnnnnnnnnnnnnnnnnnnnnnnnnnnnnnnnnnnnnnnnnnnnnnnnnnnnnnnnnnnnnnnnnnnnnnnnnnnnnnnnnnnnnnnnnnnnnnnnnnnnnnnnnnnnnnnnnnnnnnnnnnnnnnnnnnnnnnnnnnnnnnnnnnnnnnnnnnnnnnnnnnnnnnnnnnnnnnnnnnnnnnnnnnnnnnnnnnnnnnnnnnnnnnnnnnnnnnnnnnnnnnnnnnnnnnnnnnnnnnnnnnnnnnnnnnnnnnnnnnnnnnnnnnnnnnnnnnnnnnnnnnnnnnnnnnnnnnnnnnnnnnnnnnnnnnnnnnnnnnnnnnnnnnnnnnnnnnnnnnnnnnnnnnnnnnnnnnnnnnnnnnnnnnnnnnnnnnnnnnnnnnnnnnnnnnnnnnnnnnnnnnnnnnnnnnnnnnnnnnnnnnnnnnnnnnnnnnnnnnnnnnnnnnnnnnnnnnnnnnnnnnnnnnnnnnnnnnnnnnnnnnnnnnnnnnnnnnnnnnnnnnnnnnnnnnnnnnnnnnnnnnnnnnnnnnnnnnnnnnnnnnnnnnnnnnnnnnnnnnnnnnnnnnnnnnnnnnnnnnnnnnnnnnnnnnnnnnnnnnnnnnnnnnnnnnnnnnnnnnnnnnnnnnnnnnnnnnnnnnnnnnnnnnnnnnnnnnnnnnnnnnnnnnnnnnnnnnnnnnnnnnnnnnnnnnnnnnnnnnnnnnnnnnnnnnnnnnnnnnnnnnnnnnnnnnnnnnnnnnnnnnnnnnnnnnnnnnnnnnnnnnnnnnnnnnnnnnnnnnnnnnnnnnnnnnnnnnnnnnnnnnnnnnnnnnnnnnnnnnnnnnnnnnnnnnnnnnnnnnnnnnnnnnnnnnnnnnnnnnnnnnnnnnnnnnnnnnnnnnnnnnnnnnnnnnnnnnnnnnnnnnnnnnnnnnnnnnnnnnnnnnnnnnnnnnnnnnnnnnnnnnnnnnnnnnnnnnnnnnnnnnnnnnnnnnnnnnnnnnnnnnnnnnnnnnnnnnnnnnnnnnnnnnnnnnnnnnnnnnnnnnnnnnnnnnnnnnnnnnnnnnnnnnnnnnnnnnnnnnnnnnnnnnnnnnnnnnnnnnnnnnnnnnnnnnnnnnnnnnnnnnnnnnnnnnnnnnnnnnnnnnnnnnnnnnnnnnnnnnnnnnnnnnnnnnnnnnnnnnnnnnnnnnnnnnnnnnnnnnnnnnnnnnnnnnnnnnnnnnnnnnnnnnnnnnnnnnnnnnnnnnnnnnnnnnnnnnnnnnnnnnnnnnnnnnnnnnnnnnnnnnnnnnnnnnnnnnnnnnnnnnnnnnnnnnnnnnnnnnnnnnnnnnnnnnnnnnnnnnnnnnnnnnnnnnnnnnnnnnnnnnnnnnnnnnnnnnnnnnnnnnnnnnnnnnnnnnnnnnnnnnnnnnnnnnnnnnnnnnnnnnnnnnnnnnnnnnnnnnnnnnnnnnnnnnnnnnnnnnnnnnnnnnnnnnnnnnnnnnnnnnnnnnnnnnnnnnnnnnnnnnnnnnnnnnnnnnnnnnnnnnnnnnnnnnnnnnnnnnnnnnnnnnnnnnnnnnnnnnnnnnnnnnnnnnnnnnnnnnnnnnnnnnnnnnnnnnnnnnnnnnnnnnnnnnnnnnnnnnnnnnnnnnnnnnnnnnnnnnnnnnnnnnnnnnnnnnnnnnnnnnnnnnnnnnnnnnnnnnnnnnnnnnnnnnnnnnnnnnnnnnnnnnnnnnnnnnnnnnnnnnnnnnnnnnnnnnnnnnnnnnnnnnnnnnnnnnnnnnnnnnnnnnnnnnnnnnnnnnnnnnnnnnnnnnnnnnnnnnnnnnnnnnnnnnnnnnnnnnnnnnnnnnnnnnnnnnnnnnnnnnnnnnnnnnnnnnnnnnnnnnnnnnnnnnnnnnnnnnnnnnnnnnnnnnnnnnnnnnnnnnnnnnnnnnnnnnnnnnnnnnnnnnnnnnnnnnnnnnnnnnnnnnnnnnnnnnnnnnnnnnnnnnnnnnnnnnnnnnnnnnnnnnnnnnnnnnnnnnnnnnnnnnnnnnnnnnnnnnnnnnnnnnnnnnnnnnnnnnnnnnnnnnnnnnnnnnnnnnnnnnnnnnnnnnnnnnnnnnnnnnnnnnnnnnnnnnnnnnnnnnnnnnnnnnnnnnnnnnnnnnnnnnnnnnnnnnnnnnnnnnnnnnnnnnnnnnnnnnnnnnnnnnnnnnnnnnnnnnnnnnnnnnnnnnnnnnnnnnnnnnnnnnnnnnnnnnnnnnnnnnnnnnnnnnnnnnnnnnnnnnnnnnnnnnnnnnnnnnnnnnnnnnnnnnnnnnnnnnnnnnnnnnnnnnnnnnnnnnnnnnnnnnnnnnnnnnnnnnnnnnnnnnnnnnnnnnnnnnnnnnnnnnnnnnnnnnnnnnnnnnnnnnnnnnnnnnnnnnnnnnnnnnnnnnnnnnnnnnnnnnnnnnnnnnnnnnnnnnnnnnnnnnnnnnnnnnnnnnnnnnnnnnnnnnnnnnnnnnnnnnnnnnnnnnnnnnnnnnnnnnnnnnnnnnnnnnnnnnnnnnnnnnnnnnnnnnnnnnnnnnnnnnnnnnnnnnnnnnnnnnnnnnnnnnnnnnnnnnnnnnnnnnnnnnnnnnnnnnnnnnnnnnnnnnnnnnnnnnnnnnnnnnnnnnnnnnnnnnnnnnnnnnnnnnnnnnnnnnnnnnnnnnnnnnnnnnnnnnnnnnnnnnnnnnnnnnnnnnnnnnnnnnnnnnnnnnnnnnnnnnnnnnnnnnnnnnnnnnnnnnnnnnnnnnnnnnnnnnnnnnnnnnnnnnnnnnnnnnnnnnnnnnnnnnnnnnnnnnnnnnnnnnnnnnnnnnnnnnnnnnnnnnnnnnnnnnnnnnnnnnnnnnnnnnnnnnnnnnnnnnnnnnnnnnnnnnnnnnnnnnnnnnnnnnnnnnnnnnnnnnnnnnnnnnnnnnnnnnnnnnnnnnnnnnnnnnnnnnnnnnnnnnnnnnnnnnnnnnnnnnnnnnnnnnnnnnnnnnnnnnnnnnnnnnnnnnnnnnnnnnnnnnnnnnnnnnnnnnnnnnnnnnnnnnnnnnnnnnnnnnnnnnnnnnnnnnnnnnnnnnnnnnnnnnnnnnnnnnnnnnnnnnnnnnnnnnnnnnnnnnnnnnnnnnnnnnnnnnnnnnnnnnnnnnnnnnnnnnnnnnnnnnnnnnnnnnnnnnnnnnnnnnnnnnnnnnnnnnnnnnnnnnnnnnnnnnnnnnnnnnnnnnnnnnnnnnnnnnnnnnnnnnnnnnnnnnnnnnnnnnnnnnnnnnnnnnnnnnnnnnnnnnnnnnnnnnnnnnnnnnnnnnnnnnnnnnnnnnnnnnnnnnnnnnnnnnnnnnnnnnnnnnnnnnnnnnnnnnnnnnnnnnnnnnnnnnnnnnnnnnnnnnnnnnnnnnnnnnnnnnnnnnnnnnnnnnnnnnnnnnnnnnnnnnnnnnnnnnnnnnnnnnnnnnnnnnnnnnnnnnnnnnnnnnnnnnnnnnnnnnnnnnnnnnnnnnnnnnnnnnnnnnnnnnnnnnnnnnnnnnnnnnnnnnnnnnnnnnnnnnnnnnnnnnnnnnnnnnnnnnnnnnnnnnnnnnnnnnnnnnnnnnnnnnnnnnnnnnnnnnnnnnnnnnnnnnnnnnnnnnnnnnnnnnnnnnnnnnnnnnnnnnnnnnnnnnnnnnnnnnnnnnnnnnnnnnnnnnnnnnnnnnnnnnnnnnnnnnnnnnnnnnnnnnnnnnnnnnnnnnnnnnnnnnnnnnnnnnnnnnnnnnnnnnnnnnnnnnnnnnnnnnnnnnnnnnnnnnnnnnnnnnnnnnnnnnnnnnnnnnnnnnnnnnnnnnnnnnnnnnnnnnnnnnnnnnnnnnnnnnnnnnnnnnnnnnnnnnnnnnnnnnnnnnnnnnnnnnnnnnnnnnnnnnnnnnnnnnnnnnnnnnnnnnnnnnnnnnnnnnnnnnnnnnnnnnnnnnnnnnnnnnnnnnnnnnnnnnnnnnnnnnnnnnnnnnnnnnnnnnnnnnnnnnnnnnnnnnnnnnnnnnnnnnnnnnnnnnnnnnnnnnnnnnnnnnnnnnnnnnnnnnnnnnnnnnnnnnnnnnnnnnnnnnnnnnnnnnnnnnnnnnnnnnnnnnnnnnnnnnnnnnnnnnnnnnnnnnnnnnnnnnnnnnnnnnnnnnnnnnnnnnnnnnnnnnnnnnnnnnnnnnnnnnnnnnnnnnnnnnnnnnnnnnnnnnnnnnnnnnnnnnnnnnnnnnnnnnnnnnnnnnnnnnnnnnnnnnnnnnnnnnnnnnnnnnnnnnnnnnnnnnnnnnnnnnnnnnnnnnnnnnnnnnnnnnnnnnnnnnnnnnnnnnnnnnnnnnnnnnnnnnnnnnnnnnnnnnnnnnnnnnnnnnnnnnnnnnnnnnnnnnnnnnnnnnnnnnnnnnnnnnnnnnnnnnnnnnnnnnnnnnnnnnnnnnnnnnnnnnnnnnnnnnnnnnnnnnnnnnnnnnnnnnnnnnnnnnnnnnnnnnnnnnnnnnnnnnnnnnnnnnnnnnnnnnnnnnnnnnnnnnnnnnnnnnnnnnnnnnnnnnnnnnnnnnnnnnnnnnnnnnnnnnnnnnnnnnnnnnnnnnnnnnnnnnnnnnnnnnnnnnnnnnnnnnnnnnnnnnnnnnnnnnnnnnnnnnnnnnnnnnnnnnnnnnnnnnnnnnnnnnnnnnnnnnnnnnnnnnnnnnnnnnnnnnnnnnnnnnnnnnnnnnnnnnnnnnnnnnnnnnnnnnnnnnnnnnnnnnnnnnnnnnnnnnnnnnnnnnnnnnnnnnnnnnnnnnnnnnnnnnnnnnnnnnnnnnnnnnnnnnnnnnnnnnnnnnnnnnnnnnnnnnnnnnnnnnnnnnnnnnnnnnnnnnnnnnnnnnnnnnnnnnnnnnnnnnnnnnnnnnnnnnnnnnnnnnnnnnnnnnnnnnnnnnnnnnnnnnnnnnnnnnnnnnnnnnnnnnnnnnnnnnnnnnnnnnnnnnnnnnnnnnnnnnnnnnnnnnnnnnnnnnnnnnnnnnnnnnnnnnnnnnnnnnnnnnnnnnnnnnnnnnnnnnnnnnnnnnnnnnnnnnnnnnnnnnnnnnnnnnnnnnnnnnnnnnnnnnnnnnnnnnnnnnnnnnnnnnnnnnnnnnnnnnnnnnnnnnnnnnnnnnnnnnnnnnnnnnnnnnnnnnnnnnnnnnnnnnnnnnnnnnnnnnnnnnnnnnnnnnnnnnnnnnnnnnnnnnnnnnnnnnnnnnnnnnnnnnnnnnnnnnnnnnnnnnnnnnnnnnnnnnnnnnnnnnnnnnnnnnnnnnnnnnnnnnnnnnnnnnnnnnnnnnnnnnnnnnnnnnnnnnnnnnnnnnnnnnnnnnnnnnnnnnnnnnnnnnnnnnnnnnnnnnnnnnnnnnnnnnnnnnnnnnnnnnnnnnnnnnnnnnnnnnnnnnnnnnnnnnnnnnnnnnnnnnnnnnnnnnnnnnnnnnnnnnnnnnnnnnnnnnnnnnnnnnnnnnnnnnnnnnnnnnnnnnnnnnnnnnnnnnnnnnnnnnnnnnnnnnnnnnnnnnnnnnnnnnnnnnnnnnnnnnnnnnnnnnnnnnnnnnnnnnnnnnnnnnnnnnnnnnnnnnnnnnnnnnnnnnnnnnnnnnnnnnnnnnnnnnnnnnnnnnnnnnnnnnnnnnnnnnnnnnnnnnnnnnnnnnnnnnnnnnnnnnnnnnnnnnnnnnnnnnnnnnnnnnnnnnnnnnnnnnnnnnnnnnnnnnnnnnnnnnnnnnnnnnnnnnnnnnnnnnnnnnnnnnnnnnnnnnnnnnnnnnnnnnnnnnnnnnnnnnnnnnnnnnnnnnnnnnnnnnnnnnnnnnnnnnnnnnnnnnnnnnnnnnnnnnnnnnnnnnnnnnnnnnnnnnnnnnnnnnnnnnnnnnnnnnnnnnnnnnnnnnnnnnnnnnnnnnnnnnnnnnnnnnnnnnnnnnnnnnnnnnnnnnnnnnnnnnnnnnnnnnnnnnnnnnnnnnnnnnnnnnnnnnnnnnnnnnnnnnnnnnnnnnnnnnnnnnnnnnnnnnnnnnnnnnnnnnnnnnnnnnnnnnnnnnnnnnnnnnnnnnnnnnnnnnnnnnnnnnnnnnnnnnnnnnnnnnnnnnnnnnnnnnnnnnnnnnnnnnnnnnnnnnnnnnnnnnnnnnnnnnnnnnnnnnnnnnnnnnnnnnnnnnnnnnnnnnnnnnnnnnnnnnnnnnnnnnnnnnnnnnnnnnnnnnnnnnnnnnnnnnnnnnnnnnnnnnnnnnnnnnnnnnnnnnnnnnnnnnnnnnnnnnnnnnnnnnnnnnnnnnnnnnnnnnnnnnnnnnnnnnnnnnnnnnnnnnnnnnnnnnnnnnnnnnnnnnnnnnnnnnnnnnnnnnnnnnnnnnnnnnnnnnnnnnnnnnnnnnnnnnnnnnnnnnnnnnnnnnnnnnnnnnnnnnnnnnnnnnnnnnnnnnnnnnnnnnnnnnnnnnnnnnnnnnnnnnnnnnnnnnnnnnnnnnnnnnnnnnnnnnnnnnnnnnnnnnnnnnnnnnnnnnnnnnnnnnnnnnnnnnnnnnnnnnnnnnnnnnnnnnnnnnnnnnnnnnnnnnnnnnnnnnnnnnnnnnnnnnnnnnnnnnnnnnnnnnnnnnnnnnnnnnnnnnnnnnnnnnnnnnnnnnnnnnnnnnnnnnnnnnnnnnnnnnnnnnnnnnnnnnnnnnnnnnnnnnnnnnnnnnnnnnnnnnnnnnnnnnnnnnnnnnnnnnnnnnnnnnnnnnnnnnnnnnnnnnnnnnnnnnnnnnnnnnnnnnnnnnnnnnnnnnnnnnnnnnnnnnnnnnnnnnnnnnnnnnnnnnnnnnnnnnnnnnnnnnnnnnnnnnnnnnnnnnnnnnnnnnnnnnnnnnnnnnnnnnnnnnnnnnnnnnnnnnnnnnnnnnnnnnnnnnnnnnnnnnnnnnnnnnnnnnnnnnnnnnnnnnnnnnnnnnnnnnnnnnnnnnnnnnnnnnnnnnnnnnnnnnnnnnnnnnnnnnnnnnnnnnnnnnnnnnnnnnnnnnnnnnnnnnnnnnnnnnnnnnnnnnnnnnnnnnnnnnnnnnnnnnnnnnnnnnnnnnnnnnnnnnnnnnnnnnnnnnnnnnnnnnnnnnnnnnnnnnnnnnnnnnnnnnnnnnnnnnnnnnnnnnnnnnnnnnnnnnnnnnnnnnnnnnnnnnnnnnnnnnnnnnnnnnnnnnnnnnnnnnnnnnnnnnnnnnnnnnnnnnnnnnnnnnnnnnnnnnnnnnnnnnnnnnnnnnnnnnnnnnnnnnnnnnnnnnnnnnnnnnnnnnnnnnnnnnnnnnnnnnnnnnnnnnnnnnnnnnnnnnnnnnnnnnnnnnnnnnnnnnnnnnnnnnnnnnnnnnnnnnnnnnnnnnnnnnnnnnnnnnnnnnnnnnnnnnnnnnnnnnnnnnnnnnnnnnnnnnnnnnnnnnnnnnnnnnnnnnnnnnnnnnnnnnnnnnnnnnnnnnnnnnnnnnnnnnnnnnnnnnnnnnnnnnnnnnnnnnnnnnnnnnnnnnnnnnnnnnnnnnnnnnnnnnnnnnnnnnnnnnnnnnnnnnnnnnnnnnnnnnnnnnnnnnnnnnnnnnnnnnnnnnnnnnnnnnnnnnnnnnnnnnnnnnnnnnnnnnnnnnnnnnnnnnnnnnnnnnnnnnnnnnnnnnnnnnnnnnnnnnnnnnnnnnnnnnnnnnnnnnnnnnnnnnnnnnnnnnnnnnnnnnnnnnnnnnnnnnnnnnnnnnnnnnnnnnnnnnnnnnnnnnnnnnnnnnnnnnnnnnnnnnnnnnnnnnnnnnnnnnnnnnnnnnnnnnnnnnnnnnnnnnnnnnnnnnnnnnnnnnnnnnnnnnnnnnnnnnnnnnnnnnnnnnnnnnnnnnnnnnnnnnnnnnnnnnnnnnnnnnnnnnnnnnnnnnnnnnnnnnnnnnnnnnnnnnnnnnnnnnnnnnnnnnnnnnnnnnnnnnnnnnnnnnnnnnnnnnnnnnnnnnnnnnnnnnnnnnnnnnnnnnnnnnnnnnnnnnnnnnnnnnnnnnnnnnnnnnnnnnnnnnnnnnnnnnnnnnnnnnnnnnnnnnnnnnnnnnnnnnnnnnnnnnnnnnnnnnnnnnnnnnnnnnnnnnnnnnnnnnnnnnnnnnnnnnnnnnnnnnnnnnnnnnnnnnnnnnnnnnnnnnnnnnnnnnnnnnnnnnnnnnnnnnnnnnnnnnnnnnnnnnnnnnnnnnnnnnnnnnnnnnnnnnnnnnnnnnnnnnnnnnnnnnnnnnnnnnnnnnnnnnnnnnnnnnnnnnnnnnnnnnnnnnnnnnnnnnnnnnnnnnnnnnnnnnnnnnnnnnnnnnnnnnnnnnnnnnnnnnnnnnnnnnnnnnnnnnnnnnnnnnnnnnnnnnnnnnnnnnnnnnnnnnnnnnnnnnnnnnnnnnnnnnnnnnnnnnnnnnnnnnnnnnnnnnnnnnnnnnnnnnnnnnnnnnnnnnnnnnnnnnnnnnnnnnnnnnnnnnnnnnnnnnnnnnnnnnnnnnnnnnnnnnnnnnnnnnnnnnnnnnnnnnnnnnnnnnnnnnnnnnnnnnnnnnnnnnnnnnnnnnnnnnnnnnnnnnnnnnnnnnnnnnnnnnnnnnnnnnnnnnnnnnnnnnnnnnnnnnnnnnnnnnnnnnnnnnnnnnnnnnnnnnnnnnnnnnnnnnnnnnnnnnnnnnnnnnnnnnnnnnnnnnnnnnnnnnnnnnnnnnnnnnnnnnnnnnnnnnnnnnnnnnnnnnnnnnnnnnnnnnnnnnnnnnnnnnnnnnnnnnnnnnnnnnnnnnnnnnnnnnnnnnnnnnnnnnnnnnnnnnnnnnnnnnnnnnnnnnnnnnnnnnnnnnnnnnnnnnnnnnnnnnnnnnnnnnnnnnnnnnnnnnnnnnnnnnnnnnnnnnnnnnnnnnnnnnnnnnnnnnnnnnnnnnnnnnnnnnnnnnnnnnnnnnnnnnnnnnnnnnnnnnnnnnnnnnnnnnnnnnnnnnnnnnnnnnnnnnnnnnnnnnnnnnnnnnnnnnnnnnnnnnnnnnnnnnnnnnnnnnnnnnnnnnnnnnnnnnnnnnnnnnnnnnnnnnnnnnnnnnnnnnnnnnnnnnnnnnnnnnnnnnnnnnnnnnnnnnnnnnnnnnnnnnnnnnnnnnnnnnnnnnnnnnnnnnnnnnnnnnnnnnnnnnnnnnnnnnnnnnnnnnnnnnnnnnnnnnnnnnnnnnnnnnnnnnnnnnnnnnnnnnnnnnnnnnnnnnnnnnnnnnnnnnnnnnnnnnnnnnnnnnnnnnnnnnnnnnnnnnnnnnnnnnnnnnnnnnnnnnnnnnnnnnnnnnnnnnnnnnnnnnnnnnnnnnnnnnnnnnnnnnnnnnnnnnnnnnnnnnnnnnnnnnnnnnnnnnnnnnnnnnnnnnnnnnnnnnnnnnnnnnnnnnnnnnnnnnnnnnnnnnnnnnnnnnnnnnnnnnnnnnnnnnnnnnnnnnnnnnnnnnnnnnnnnnnnnnnnnnnnnnnnnnnnnnnnnnnnnnnnnnnnnnnnnnnnnnnnnnnnnnnnnnnnnnnnnnnnnnnnnnnnnnnnnnnnnnnnnnnnnnnnnnnnnnnnnnnnnnnnnnnnnnnnnnnnnnnnnnnnnnnnnnnnnnnnnnnnnnnnnnnnnnnnnnnnnnnnnnnnnnnnnnnnnnnnnnnnnnnnnnnnnnnnnnnnnnnnnnnnnnnnnnnnnnnnnnnnnnnnnnnnnnnnnnnnnnnnnnnnnnnnnnnnnnnnnnnnnnnnnnnnnnnnnnnnnnnnnnnnnnnnnnnnnnnnnnnnnnnnnnnnnnnnnnnnnnnnnnnnnnnnnnnnnnnnnnnnnnnnnnnnnnnnnnnnnnnnnnnnnnnnnnnnnnnnnnnnnnnnnnnnnnnnnnnnnnnnnnnnnnnnnnnnnnnnnnnnnnnnnnnnnnnnnnnnnnnnnnnnnnnnnnnnnnnnnnnnnnnnnnnnnnnnnnnnnnnnnnnnnnnnnnnnnnnnnnnnnnnnnnnnnnnnnnnnnnnnnnnnnnnnnnnnnnnnnnnnnnnnnnnnnnnnnnnnnnnnnnnnnnnnnnnnnnnnnnnnnnnnnnnnnnnnnnnnnnnnnnnnnnnnnnnnnnnnnnnnnnnnnnnnnnnnnnnnnnnnnnnnnnnnnnnnnnnnnnnnnnnnnnnnnnnnnnnnnnnnnnnnnnnnnnnnnnnnnnnnnnnnnnnnnnnnnnnnnnnnnnnnnnnnnnnnnnnnnnnnnnnnnnnnnnnnnnnnnnnnnnnnnnnnnnnnnnnnnnnnnnnnnnnnnnnnnnnnnnnnnnnnnnnnnnnnnnnnnnnnnnnnnnnnnnnnnnnnnnnnnnnnnnnnnnnnnnnnnnnnnnnnnnnnnnnnnnnnnnnnnnnnnnnnnnnnnnnnnnnnnnnnnnnnnnnnnnnnnnnnnnnnnnnnnnnnnnnnnnnnnnnnnnnnnnnnnnnnnnnnnnnnnnnnnnnnnnnnnnnnnnnnnnnnnnnnnnnnnnnnnnnnnnnnnnnnnnnnnnnnnnnnnnnnnnnnnnnnnnnnnnnnnnnnnnnnnnnnnnnnnnnnnnnnnnnnnnnnnnnnnnnnnnnnnnnnnnnnnnnnnnnnnnnnnnnnnnnnnnnnnnnnnnnnnnnnnnnnnnnnnnnnnnnnnnnnnnnnnnnnnnnnnnnnnnnnnnnnnnnnnnnnnnnnnnnnnnnnnnnnnnnnnnnnnnnnnnnnnnnnnnnnnnnnnnnnnnnnnnnnnnnnnnnnnnnnnnnnnnnnnnnnnnnnnnnnnnnnnnnnnnnnnnnnnnnnnnnnnnnnnnnnnnnnnnnnnnnnnnnnnnnnnnnnnnnnnnnnnnnnnnnnnnnnnnnnnnnnnnnnnnnnnnnnnnnnnnnnnnnnnnnnnnnnnnnnnnnnnnnnnnnnnnnnnnnnnnnnnnnnnnnnnnnnnnnnnnnnnnnnnnnnnnnnnnnnnnnnnnnnnnnnnnnnnnnnnnnnnnnnnnnnnnnnnnnnnnnnnnnnnnnnnnnnnnnnnnnnnnnnnnnnnnnnnnnnnnnnnnnnnnnnnnnnnnnnnnnnnnnnnnnnnnnnnnnnnnnnnnnnnnnnnnnnnnnnnnnnnnnnnnnnnnnnnnnnnnnnnnnnnnnnnnnnnnnnnnnnnnnnnnnnnnnnnnnnnnnnnnnnnnnnnnnnnnnnnnnnnnnnnnnnnnnnnnnnnnnnnnnnnnnnnnnnnnnnnnnnnnnnnnnnnnnnnnnnnnnnnnnnnnnnnnnnnnnnnnnnnnnnnnnnnnnnnnnnnnnnnnnnnnnnnnnnnnnnnnnnnnnnnnnnnnnnnnnnnnnnnnnnnnnnnnnnnnnnnnnnnnnnnnnnnnnnnnnnnnnnnnnnnnnnnnnnnnnnnnnnnnnnnnnnnnnnnnnnnnnnnnnnnnnnnnnnnnnnnnnnnnnnnnnnnnnnnnnnnnnnnnnnnnnnnnnnnnnnnnnnnnnnnnnnnnnnnnnnnnnnnnnnnnnnnnnnnnnnnnnnnnnnnnnnnnnnnnnnnnnnnnnnnnnnnnnnnnnnnnnnnnnnnnnnnnnnnnnnnnnnnnnnnnnnnnnnnnnnnnnnnnnnnnnnnnnnnnnnnnnnnnnnnnnnnnnnnnnnnnnnnnnnnnnnnnnnnnnnnnnnnnnnnnnnnnnnnnnnnnnnnnnnnnnnnnnnnnnnnnnnnnnnnnnnnnnnnnnnnnnnnnnnnnnnnnnnnnnnnnnnnnnnnnnnnnnnnnnnnnnnnnnnnnnnnnnnnnnnnnnnnnnnnnnnnnnnnnnnnnnnnnnnnnnnnnnnnnnnnnnnnnnnnnnnnnnnnnnnnnnnnnnnnnnnnnnnnnnnnnnnnnnnnnnnnnnnnnnnnnnnnnnnnnnnnnnnnnnnnnnnnnnnnnnnnnnnnnnnnnnnnnnnnnnnnnnnnnnnnnnnnnnnnnnnnnnnnnnnnnnnnnnnnnnnnnnnnnnnnnnnnnnnnnnnnnnnnnnnnnnnnnnnnnnnnnnnnnnnnnnnnnnnnnnnnnnnnnnnnnnnnnnnnnnnnnnnnnnnnnnnnnnnnnnnnnnnnnnnnnnnnnnnnnnnnnnnnnnnnnnnnnnnnnnnnnnnnnnnnnnnnnnnnnnnnnnnnnnnnnnnnnnnnnnnnnnnnnnnnnnnnnnnnnnnnnnnnnnnnnnnnnnnnnnnnnnnnnnnnnnnnnnnnnnnnnnnnnnnnnnnnnnnnnnnnnnnnnnnnnnnnnnnnnnnnnnnnnnnnnnnnnnnnnnnnnnnnnnnnnnnnnnnnnnnnnnnnnnnnnnnnnnnnnnnnnnnnnnnnnnnnnnnnnnnnnnnnnnnnnnnnnnnnnnnnnnnnnnnnnnnnnnnnnnnnnnnnnnnnnnnnnnnnnnnnnnnnnnnnnnnnnnnnnnnnnnnnnnnnnnnnnnnnnnnnnnnnnnnnnnnnnnnnnnnnnnnnnnnnnnnnnnnnnnnnnnnnnnnnnnnnnnnnnnnnnnnnnnnnnnnnnnnnnnnnnnnnnnnnnnnnnnnnnnnnnnnnnnnnnnnnnnnnnnnnnnnnnnnnnnnnnnnnnnnnnnnnnnnnnnnnnnnnnnnnnnnnnnnnnnnnnnnnnnnnnnnnnnnnnnnnnnnnnnnnnnnnnnnnnnnnnnnnnnnnnnnnnnnnnnnnnnnnnnnnnnnnnnnnnnnnnnnnnnnnnnnnnnnnnnnnnnnnnnnnnnnnnnnnnnnnnnnnnnnnnnnnnnnnnnnnnnnnnnnnnnnnnnnnnnnnnnnnnnnnnnnnnnnnnnnnnnnnnnnnnnnnnnnnnnnnnnnnnnnnnnnnnnnnnnnnnnnnnnnnnnnnnnnnnnnnnnnnnnnnnnnnnnnnnnnnnnnnnnnnnnnnnnnnnnnnnnnnnnnnnnnnnnnnnnnnnnnnnnnnnnnnnnnnnnnnnnnnnnnnnnnnnnnnnnnnnnnnnnnnnnnnnnnnnnnnnnnnnnnnnnnnnnnnnnnnnnnnnnnnnnnnnnnnnnnnnnnnnnnnnnnnnnnnnnnnnnnnnnnnnnnnnnnnnnnnnnnnnnnnnnnnnnnnnnnnnnnnnnnnnnnnnnnnnnnnnnnnnnnnnnnnnnnnnnnnnnnnnnnnnnnnnnnnnnnnnnnnnnnnnnnnnnnnnnnnnnnnnnnnnnnnnnnnnnnnnnnnnnnnnnnnnnnnnnnnnnnnnnnnnnnnnnnnnnnnnnnnnnnnnnnnnnnnnnnnnnnnnnnnnnnnnnnnnnnnnnnnnnnnnnnnnnnnnnnnnnnnnnnnnnnnnnnnnnnnnnnnnnnnnnnnnnnnnnnnnnnnnnnnnnnnnnnnnnnnnnnnnnnnnnnnnnnnnnnnnnnnnnnnnnnnnnnnnnnnnnnnnnnnnnnnnnnnnnnnnnnnnnnnnnnnnnnnnnnnnnnnnnnnnnnnnnnnnnnnnnnnnnnnnnnnnnnnnnnnnnnnnnnnnnnnnnnnnnnnnnnnnnnnnnnnnnnnnnnnnnnnnnnnnnnnnnnnnnnnnnnnnnnnnnnnnnnnnnnnnnnnnnnnnnnnnnnnnnnnnnnnnnnnnnnnnnnnnnnnnnnnnnnnnnnnnnnnnnnnnnnnnnnnnnnnnnnnnnnnnnnnnnnnnnnnnnnnnnnnnnnnnnnnnnnnnnnnnnnnnnnnnnnnnnnnnnnnnnnnnnnnnnnnnnnnnnnnnnnnnnnnnnnnnnnnnnnnnnnnnnnnnnnnnnnnnnnnnnnnnnnnnnnnnnnnnnnnnnnnnnnnnnnnnnnnnnnnnnnnnnnnnnnnnnnnnnnnnnnnnnnnnnnnnnnnnnnnnnnnnnnnnnnnnnnnnnnnnnnnnnnnnnnnnnnnnnnnnnnnnnnnnnnnnnnnnnnnnnnnnnnnnnnnnnnnnnnnnnnnnnnnnnnnnnnnnnnnnnnnnnnnnnnnnnnnnnnnnnnnnnnnnnnnnnnnnnnnnnnnnnnnnnnnnnnnnnnnnnnnnnnnnnnnnnnnnnnnnnnnnnnnnnnnnnnnnnnnnnnnnnnnnnnnnnnnnnnnnnnnnnnnnnnnnnnnnnnnnnnnnnnnnnnnnnnnnnnnnnnnnnnnnnnnnnnnnnnnnnnnnnnnnnnnnnnnnnnnnnnnnnnnnnnnnnnnnnnnnnnnnnnnnnnnnnnnnnnnnnnnnnnnnnnnnnnnnnnnnnnnnnnnnnnnnnnnnnnnnnnnnnnnnnnnnnnnnnnnnnnnnnnnnnnnnnnnnnnnnnnnnnnnnnnnnnnnnnnnnnnnnnnnnnnnnnnnnnnnnnnnnnnnnnnnnnnnnnnnnnnnnnnnnnnnnnnnnnnnnnnnnnnnnnnnnnnnnnnnnnnnnnnnnnnnnnnnnnnnnnnnnnnnnnnnnnnnnnnnnnnnnnnnnnnnnnnnnnnnnnnnnnnnnnnnnnnnnnnnnnnnnnnnnnnnnnnnnnnnnnnnnnnnnnnnnnnnnnnnnnnnnnnnnnnnnnnnnnnnnnnnnnnnnnnnnnnnnnnnnnnnnnnnnnnnnnnnnnnnnnnnnnnnnnnnnnnnnnnnnnnnnnnnnnnnnnnnnnnnnnnnnnnnnnnnnnnnnnnnnnnnnnnnnnnnnnnnnnnnnnnnnnnnnnnnnnnnnnnnnnnnnnnnnnnnnnnnnnnnnnnnnnnnnnnnnnnnnnnnnnnnnnnnnnnnnnnnnnnnnnnnnnnnnnnnnnnnnnnnnnnnnnnnnnnnnnnnnnnnnnnnnnnnnnnnnnnnnnnnnnnnnnnnnnnnnnnnnnnnnnnnnnnnnnnnnnnnnnnnnnnnnnnnnnnnnnnnnnnnnnnnnnnnnnnnnnnnnnnnnnnnnnnnnnnnnnnnnnnnnnnnnnnnnnnnnnnnnnnnnnnnnnnnnnnnnnnnnnnnnnnnnnnnnnnnnnnnnnnnnnnnnnnnnnnnnnnnnnnnnnnnnnnnnnnnnnnnnnnnnnnnnnnnnnnnnnnnnnnnnnnnnnnnnnnnnnnnnnnnnnnnnnnnnnnnnnnnnnnnnnnnnnnnnnnnnnnnnnnnnnnnnnnnnnnnnnnnnnnnnnnnnnnnnnnnnnnnnnnnnnnnnnnnnnnnnnnnnnnnnnnnnnnnnnnnnnnnnnnnnnnnnnnnnnnnnnnnnnnnnnnnnnnnnnnnnnnnnnnnnnnnnnnnnnnnnnnnnnnnnnnnnnnnnnnnnnnnnnnnnnnnnnnnnnnnnnnnnnnnnnnnnnnnnnnnnnnnnnnnnnnnnnnnnnnnnnnnnnnnnnnnnnnnnnnnnnnnnnnnnnnnnnnnnnnnnnnnnnnnnnnnnnnnnnnnnnnnnnnnnnnnnnnnnnnnnnnnnnnnnnnnnnnnnnnnnnnnnnnnnnnnnnnnnnnnnnnnnnnnnnnnnnnnnnnnnnnnnnnnnnnnnnnnnnnnnnnnnnnnnnnnnnnnnnnnnnnnnnnnnnnnnnnnnnnnnnnnnnnnnnnnnnnnnnnnnnnnnnnnnnnnnnnnnnnnnnnnnnnnnnnnnnnnnnnnnnnnnnnnnnnnnnnnnnnnnnnnnnnnnnnnnnnnnnnnnnnnnnnnnnnnnnnnnnnnnnnnnnnnnnnnnnnnnnnnnnnnnnnnnnnnnnnnnnnnnnnnnnnnnnnnnnnnnnnnnnnnnnnnnnnnnnnnnnnnnnnnnnnnnnnnnnnnnnnnnnnnnnnnnnnnnnnnnnnnnnnnnnnnnnnnnnnnnnnnnnnnnnnnnnnnnnnnnnnnnnnnnnnnnnnnnnnnnnnnnnnnnnnnnnnnnnnnnnnnnnnnnnnnnnnnnnnnnnnnnnnnnnnnnnnnnnnnnnnnnnnnnnnnnnnnnnnnnnnnnnnnnnnnnnnnnnnnnnnnnnnnnnnnnnnnnnnnnnnnnnnnnnnnnnnnnnnnnnnnnnnnnnnnnnnnnnnnnnnnnnnnnnnnnnnnnnnnnnnnnnnnnnnnnnnnnnnnnnnnnnnnnnnnnnnnnnnnnnnnnnnnnnnnnnnnnnnnnnnnnnnnnnnnnnnnnnnnnnnnnnnnnnnnnnnnnnnnnnnnnnnnnnnnnnnnnnnnnnnnnnnnnnnnnnnnnnnnnnnnnnnnnnnnnnnnnnnnnnnnnnnnnnnnnnnnnnnnnnnnnnnnnnnnnnnnnnnnnnnnnnnnnnnnnnnnnnnnnnnnnnnnnnnnnnnnnnnnnnnnnnnnnnnnnnnnnnnnnnnnnnnnnnnnnnnnnnnnnnnnnnnnnnnnnnnnnnnnnnnnnnnnnnnnnnnnnnnnnnnnnnnnnnnnnnnnnnnnnnnnnnnnnnnnnnnnnnnnnnnnnnnnnnnnnnnnnnnnnnnnnnnnnnnnnnnnnnnnnnnnnnnnnnnnnnnnnnnnnnnnnnnnnnnnnnnnnnnnnnnnnnnnnnnnnnnnnnnnnnnnnnnnnnnnnnnnnnnnnnnnnnnnnnnnnnnnnnnnnnnnnnnnnnnnnnnnnnnnnnnnnnnnnnnnnnnnnnnnnnnnnnnnnnnnnnnnnnnnnnnnnnnnnnnnnnnnnnnnnnnnnnnnnnnnnnnnnnnnnnnnnnnnnnnnnnnnnnnnnnnnnnnnnnnnnnnnnnnnnnnnnnnnnnnnnnnnnnnnnnnnnnnnnnnnnnnnnnnnnnnnnnnnnnnnnnnnnnnnnnnnnnnnnnnnnnnnnnnnnnnnnnnnnnnnnnnnnnnnnnnnnnnnnnnnnnnnnnnnnnnnnnnnnnnnnnnnnnnnnnnnnnnnnnnnnnnnnnnnnnnnnnnnnnnnnnnnnnnnnnnnnnnnnnnnnnnnnnnnnnnnnnnnnnnnnnnnnnnnnnnnnnnnnnnnnnnnnnnnnnnnnnnnnnnnnnnnnnnnnnnnnnnnnnnnnnnnnnnnnnnnnnnnnnnnnnnnnnnnnnnnnnnnnnnnnnnnnnnnnnnnnnnnnnnnnnnnnnnnnnnnnnnnnnnnnnnnnnnnnnnnnnnnnnnnnnnnnnnnnnnnnnnnnnnnnnnnnnnnnnnnnnnnnnnnnnnnnnnnnnnnnnnnnnnnnnnnnnnnnnnnnnnnnnnnnnnnnnnnnnnnnnnnnnnnnnnnnnnnnnnnnnnnnnnnnnnnnnnnnnnnnnnnnnnnnnnnnnnnnnnnnnnnnnnnnnnnnnnnnnnnnnnnnnnnnnnnnnnnnnnnnnnnnnnnnnnnnnnnnnnnnnnnnnnnnnnnnnnnnnnnnnnnnnnnnnnnnnnnnnnnnnnnnnnnnnnnnnnnnnnnnnnnnnnnnnnnnnnnnnnnnnnnnnnnnnnnnnnnnnnnnnnnnnnnnnnnnnnnnnnnnnnnnnnnnnnnnnnnnnnnnnnnnnnnnnnnnnnnnnnnnnnnnnnnnnnnnnnnnnnnnnnnnnnnnnnnnnnnnnnnnnnnnnnnnnnnnnnnnnnnnnnnnnnnnnnnnnnnnnnnnnnnnnnnnnnnnnnnnnnnnnnnnnnnnnnnnnnnnnnnnnnnnnnnnnnnnnnnnnnnnnnnnnnnnnnnnnnnnnnnnnnnnnnnnnnnnnnnnnnnnnnnnnnnnnnnnnnnnnnnnnnnnnnnnnnnnnnnnnnnnnnnnnnnnnnnnnnnnnnnnnnnnnnnnnnnnnnnnnnnnnnnnnnnnnnnnnnnnnnnnnnnnnnnnnnnnnnnnnnnnnnnnnnnnnnnnnnnnnnnnnnnnnnnnnnnnnnnnnnnnnnnnnnnnnnnnnnnnnnnnnnnnnnnnnnnnnnnnnnnnnnnnnnnnnnnnnnnnnnnnnnnnnnnnnnnnnnnnnnnnnnnnnnnnnnnnnnnnnnnnnnnnnnnnnnnnnnnnnnnnnnnnnnnnnnnnnnnnnnnnnnnnnnnnnnnnnnnnnnnnnnnnnnnnnnnnnnnnnnnnnnnnnnnnnnnnnnnnnnnnnnnnnnnnnnnnnnnnnnnnnnnnnnnnnnnnnnnnnnnnnnnnnnnnnnnnnnnnnnnnnnnnnnnnnnnnnnnnnnnnnnnnnnnnnnnnnnnnnnnnnnnnnnnnnnnnnnnnnnnnnnnnnnnnnnnnnnnnnnnnnnnnnnnnnnnnnnnnnnnnnnnnnnnnnnnnnnnnnnnnnnnnnnnnnnnnnnnnnnnnnnnnnnnnnnnnnnnnnnnnnnnnnnnnnnnnnnnnnnnnnnnnnnnnnnnnnnnnnnnnnnnnnnnnnnnnnnnnnnnnnnnnnnnnnnnnnnnnnnnnnnnnnnnnnnnnnnnnnnnnnnnnnnnnnnnnnnnnnnnnnnnnnnnnnnnnnnnnnnnnnnnnnnnnnnnnnnnnnnnnnnnnnnnnnnnnnnnnnnnnnnnnnnnnnnnnnnnnnnnnnnnnnnnnnnnnnnnnnnnnnnnnnnnnnnnnnnnnnnnnnnnnnnnnnnnnnnnnnnnnnnnnnnnnnnnnnnnnnnnnnnnnnnnnnnnnnnnnnnnnnnnnnnnnnnnnnnnnnnnnnnnnnnnnnnnnnnnnnnnnnnnnnnnnnnnnnnnnnnnnnnnnnnnnnnnnnnnnnnnnnnnnnnnnnnnnnnnnnnnnnnnnnnnnnnnnnnnnnnnnnnnnnnnnnnnnnnnnnnnnnnnnnnnnnnnnnnnnnnnnnnnnnnnnnnnnnnnnnnnnnnnnnnnnnnnnnnnnnnnnnnnnnnnnnnnnnnnnnnnnnnnnnnnnnnnnnnnnnnnnnnnnnnnnnnnnnnnnnnnnnnnnnnnnnnnnnnnnnnnnnnnnnnnnnnnnnnnnnnnnnnnnnnnnnnnnnnnnnnnnnnnnnnnnnnnnnnnnnnnnnnnnnnnnnnnnnnnnnnnnnnnnnnnnnnnnnnnnnnnnnnnnnnnnnnnnnnnnnnnnnnnnnnnnnnnnnnnnnnnnnnnnnnnnnnnnnnnnnnnnnnnnnnnnnnnnnnnnnnnnnnnnnnnnnnnnnnnnnnnnnnnnnnnnnnnnnnnnnnnnnnnnnnnnnnnnnnnnnnnnnnnnnnnnnnnnnnnnnnnnnnnnnnnnnnnnnnnnnnnnnnnnnnnnnnnnnnnnnnnnnnnnnnnnnnnnnnnnnnnnnnnnnnnnnnnnnnnnnnnnnnnnnnnnnnnnnnnnnnnnnnnnnnnnnnnnnnnnnnnnnnnnnnnnnnnnnnnnnnnnnnnnnnnnnnnnnnnnnnnnnnnnnnnnnnnnnnnnnnnnnnnnnnnnnnnnnnnnnnnnnnnnnnnnnnnnnnnnnnnnnnnnnnnnnnnnnnnnnnnnnnnnnnnnnnnnnnnnnnnnnnnnnnnnnnnnnnnnnnnnnnnnnnnnnnnnnnnnnnnnnnnnnnnnnnnnnnnnnnnnnnnnnnnnnnnnnnnnnnnnnnnnnnnnnnnnnnnnnnnnnnnnnnnnnnnnnnnnnnnnnnnnnnnnnnnnnnnnnnnnnnnnnnnnnnnnnnnnnnnnnnnnnnnnnnnnnnnnnnnnnnnnnnnnnnnnnnnnnnnnnnnnnnnnnnnnnnnnnnnnnnnnnnnnnnnnnnnnnnnnnnnnnnnnnnnnnnnnnnnnnnnnnnnnnnnnnnnnnnnnnnnnnnnnnnnnnnnnnnnnnnnnnnnnnnnnnnnnnnnnnnnnnnnnnnnnnnnnnnnnnnnnnnnnnnnnnnnnnnnnnnnnnnnnnnnnnnnnnnnnnnnnnnnnnnnnnnnnnnnnnnnnnnnnnnnnnnnnnnnnnnnnnnnnnnnnnnnnnnnnnnnnnnnnnnnnnnnnnnnnnnnnnnnnnnnnnnnnnnnnnnnnnnnnnnnnnnnnnnnnnnnnnnnnnnnnnnnnnnnnnnnnnnnnnnnnnnnnnnnnnnnnnnnnnnnnnnnnnnnnnnnnnnnnnnnnnnnnnnnnnnnnnnnnnnnnnnnnnnnnnnnnnnnnnnnnnnnnnnnnnnnnnnnnnnnnnnnnnnnnnnnnnnnnnnnnnnnnnnnnnnnnnnnnnnnnnnnnnnnnnnnnnnnnnnnnnnnnnnnnnnnnnnnnnnnnnnnnnnnnnnnnnnnnnnnnnnnnnnnnnnnnnnnnnnnnnnnnnnnnnnnnnnnnnnnnnnnnnnnnnnnnnnnnnnnnnnnnnnnnnnnnnnnnnnnnnnnnnnnnnnnnnnnnnnnnnnnnnnnnnnnnnnnnnnnnnnnnnnnnnnnnnnnnnnnnnnnnnnnnnnnnnnnnnnnnnnnnnnnnnnnnnnnnnnnnnnnnnnnnnnnnnnnnnnnnnnnnnnnnnnnnnnnnnnnnnnnnnnnnnnnnnnnnnnnnnnnnnnnnnnnnnnnnnnnnnnnnnnnnnnnnnnnnnnnnnnnnnnnnnnnnnnnnnnnnnnnnnnnnnnnnnnnnnnnnnnnnnnnnnnnnnnnnnnnnnnnnnnnnnnnnnnnnnnnnnnnnnnnnnnnnnnnnnnnnnnnnnnnnnnnnnnnnnnnnnnnnnnnnnnnnnnnnnnnnnnnnnnnnnnnnnnnnnnnnnnnnnnnnnnnnnnnnnnnnnnnnnnnnnnnnnnnnnnnnnnnnnnnnnnnnnnnnnnnnnnnnnnnnnnnnnnnnnnnnnnnnnnnnnnnnnnnnnnnnnnnnnnnnnnnnnnnnnnnnnnnnnnnnnnnnnnnnnnnnnnnnnnnnnnnnnnnnnnnnnnnnnnnnnnnnnnnnnnnnnnnnnnnnnnnnnnnnnnnnnnnnnnnnnnnnnnnnnnnnnnnnnnnnnnnnnnnnnnnnnnnnnnnnnnnnnnnnnnnnnnnnnnnnnnnnnnnnnnnnnnnnnnnnnnnnnnnnnnnnnnnnnnnnnnnnnnnnnnnnnnnnnnnnnnnnnnnnnnnnnnnnnnnnnnnnnnnnnnnnnnnnnnnnnnnnnnnnnnnnnnnnnnnnnnnnnnnnnnnnnnnnnnnnnnnnnnnnnnnnnnnnnnnnnnnnnnnnnnnnnnnnnnnnnnnnnnnnnnnnnnnnnnnnnnnnnnnnnnnnnnnnnnnnnnnnnnnnnnnnnnnnnnnnnnnnnnnnnnnnnnnnnnnnnnnnnnnnnnnnnnnnnnnnnnnnnnnnnnnnnnnnnnnnnnnnnnnnnnnnnnnnnnnnnnnnnnnnnnnnnnnnnnnnnnnnnnnnnnnnnnnnnnnnnnnnnnnnnnnnnnnnnnnnnnnnnnnnnnnnnnnnnnnnnnnnnnnnnnnnnnnnnnnnnnnnnnnnnnnnnnnnnnnnnnnnnnnnnnnnnnnnnnnnnnnnnnnnnnnnnnnnnnnnnnnnnnnnnnnnnnnnnnnnnnnnnnnnnnnnnnnnnnnnnnnnnnnnnnnnnnnnnnnnnnnnnnnnnnnnnnnnnnnnnnnnnnnnnnnnnnnnnnnnnnnnnnnnnnnnnnnnnnnnnnnnnnnnnnnnnnnnnnnnnnnnnnnnnnnnnnnnnnnnnnnnnnnnnnnnnnnnnnnnnnnnnnnnnnnnnnnnnnnnnnnnnnnnnnnnnnnnnnnnnnnnnnnnnnnnnnnnnnnnnnnnnnnnnnnnnnnnnnnnnnnnnnnnnnnnnnnnnnnnnnnnnnnnnnnnnnnnnnnnnnnnnnnnnnnnnnnnnnnnnnnnnnnnnnnnnnnnnnnnnnnnnnnnnnnnnnnnnnnnnnnnnnnnnnnnnnnnnnnnnnnnnnnnnnnnnnnnnnnnnnnnnnnnnnnnnnnnnnnnnnnnnnnnnnnnnnnnnnnnnnnnnnnnnnnnnnnnnnnnnnnnnnnnnnnnnnnnnnnnnnnnnnnnnnnnnnnnnnnnnnnnnnnnnnnnnnnnnnnnnnnnnnnnnnnnnnnnnnnnnnnnnnnnnnnnnnnnnnnnnnnnnnnnnnnnnnnnnnnnnnnnnnnnnnnnnnnnnnnnnnnnnnnnnnnnnnnnnnnnnnnnnnnnnnnnnnnnnnnnnnnnnnnnnnnnnnnnnnnnnnnnnnnnnnnnnnnnnnnnnnnnnnnnnnnnnnnnnnnnnnnnnnnnnnnnnnnnnnnnnnnnnnnnnnnnnnnnnnnnnnnnnnnnnnnnnnnnnnnnnnnnnnnnnnnnnnnnnnnnnnnnnnnnnnnnnnnnnnnnnnnnnnnnnnnnnnnnnnnnnnnnnnnnnnnnnnnnnnnnnnnnnnnnnnnnnnnnnnnnnnnnnnnnnnnnnnnnnnnnnnnnnnnnnnnnnnnnnnnnnnnnnnnnnnnnnnnnnnnnnnnnnnnnnnnnnnnnnnnnnnnnnnnnnnnnnnnnnnnnnnnnnnnnnnnnnnnnnnnnnnnnnnnnnnnnnnnnnnnnnnnnnnnnnnnnnnnnnnnnnnnnnnnnnnnnnnnnnnnnnnnnnnnnnnnnnnnnnnnnnnnnnnnnnnnnnnnnnnnnnnnnnnnnnnnnnnnnnnnnnnnnnnnnnnnnnnnnnnnnnnnnnnnnnnnnnnnnnnnnnnnnnnnnnnnnnnnnnnnnnnnnnnnnnnnnnnnnnnnnnnnnnnnnnnnnnnnnnnnnnnnnnnnnnnnnnnnnnnnnnnnnnnnnnnnnnnnnnnnnnnnnnnnnnnnnnnnnnnnnnnnnnnnnnnnnnnnnnnnnnnnnnnnnnnnnnnnnnnnnnnnnnnnnnnnnnnnnnnnnnnnnnnnnnnnnnnnnnnnnnnnnnnnnnnnnnnnnnnnnnnnnnnnnnnnnnnnnnnnnnnnnnnnnnnnnnnnnnnnnnnnnnnnnnnnnnnnnnnnnnnnnnnnnnnnnnnnnnnnnnnnnnnnnnnnnnnnnnnnnnnnnnnnnnnnnnnnnnnnnnnnnnnnnnnnnnnnnnnnnnnnnnnnnnnnnnnnnnnnnnnnnnnnnnnnnnnnnnnnnnnnnnnnnnnnnnnnnnnnnnnnnnnnnnnnnnnnnnnnnnnnnnnnnnnnnnnnnnnnnnnnnnnnnnnnnnnnnnnnnnnnnnnnnnnnnnnnnnnnnnnnnnnnnnnnnnnnnnnnnnnnnnnnnnnnnnnnnnnnnnnnnnnnnnnnnnnnnnnnnnnnnnnnnnnnnnnnnnnnnnnnnnnnnnnnnnnnnnnnnnnnnnnnnnnnnnnnnnnnnnnnnnnnnnnnnnnnnnnnnnnnnnnnnnnnnnnnnnnnnnnnnnnnnnnnnnnnnnnnnnnnnnnnnnnnnnnnnnnnnnnnnnnnnnnnnnnnnnnnnnnnnnnnnnnnnnnnnnnnnnnnnnnnnnnnnnnnnnnnnnnnnnnnnnnnnnnnnnnnnnnnnnnnnnnnnnnnnnnnnnnnnnnnnnnnnnnnnnnnnnnnnnnnnnnnnnnnnnnnnnnnnnnnnnnnnnnnnnnnnnnnnnnnnnnnnnnnnnnnnnnnnnnnnnnnnnnnnnnnnnnnnnnnnnnnnnnnnnnnnnnnnnnnnnnnnnnnnnnnnnnnnnnnnnnnnnnnnnnnnnnnnnnnnnnnnnnnnnnnnnnnnnnnnnnnnnnnnnnnnnnnnnnnnnnnnnnnnnnnnnnnnnnnnnnnnnnnnnnnnnnnnnnnnnnnnnnnnnnnnnnnnnnnnnnnnnnnnnnnnnnnnnnnnnnnnnnnnnnnnnnnnnnnnnnnnnnnnnnnnnnnnnnnnnnnnnnnnnnnnnnnnnnnnnnnnnnnnnnnnnnnnnnnnnnnnnnnnnnnnnnnnnnnnnnnnnnnnnnnnnnnnnnnnnnnnnnnnnnnnnnnnnnnnnnnnnnnnnnnnnnnnnnnnnnnnnnnnnnnnnnnnnnnnnnnnnnnnnnnnnnnnnnnnnnnnnnnnnnnnnnnnnnnnnnnnnnnnnnnnnnnnnnnnnnnnnnnnnnnnnnnnnnnnnnnnnnnnnnnnnnnnnnnnnnnnnnnnnnnnnnnnnnnnnnnnnnnnnnnnnnnnnnnnnnnnnnnnnnnnnnnnnnnnnnnnnnnnnnnnnnnnnnnnnnnnnnnnnnnnnnnnnnnnnnnnnnnnnnnnnnnnnnnnnnnnnnnnnnnnnnnnnnnnnnnnnnnnnnnnnnnnnnnnnnnnnnnnnnnnnnnnnnnnnnnnnnnnnnnnnnnnnnnnnnnnnnnnnnnnnnnnnnnnnnnnnnnnnnnnnnnnnnnnnnnnnnnnnnnnnnnnnnnnnnnnnnnnnnnnnnnnnnnnnnnnnnnnnnnnnnnnnnnnnnnnnnnnnnnnnnnnnnnnnnnnnnnnnnnnnnnnnnnnnnnnnnnnnnnnnnnnnnnnnnnnnnnnnnnnnnnnnnnnnnnnnnnnnnnnnnnnnnnnnnnnnnnnnnnnnnnnnnnnnnnnnnnnnnnnnnnnnnnnnnnnnnnnnnnnnnnnnnnnnnnnnnnnnnnnnnnnnnnnnnnnnnnnnnnnnnnnnnnnnnnnnnnnnnnnnnnnnnnnnnnnnnnnnnnnnnnnnnnnnnnnnnnnnnnnnnnnnnnnnnnnnnnnnnnnnnnnnnnnnnnnnnnnnnnnnnnnnnnnnnnnnnnnnnnnnnnnnnnnnnnnnnnnnnnnnnnnnnnnnnnnnnnnnnnnnnnnnnnnnnnnnnnnnnnnnnnnnnnnnnnnnnnnnnnnnnnnnnnnnnnnnnnnnnnnnnnnnnnnnnnnnnnnnnnnnnnnnnnnnnnnnnnnnnnnnnnnnnnnnnnnnnnnnnnnnnnnnnnnnnnnnnnnnnnnnnnnnnnnnnnnnnnnnnnnnnnnnnnnnnnnnnnnnnnnnnnnnnnnnnnnnnnnnnnnnnnnnnnnnnnnnnnnnnnnnnnnnnnnnnnnnnnnnnnnnnnnnnnnnnnnnnnnnnnnnnnnnnnnnnnnnnnnnnnnnnnnnnnnnnnnnnnnnnnnnnnnnnnnnnnnnnnnnnnnnnnnnnnnnnnnnnnnnnnnnnnnnnnnnnnnnnnnnnnnnnnnnnnnnnnnnnnnnnnnnnnnnnnnnnnnnnnnnnnnnnnnnnnnnnnnnnnnnnnnnnnnnnnnnnnnnnnnnnnnnnnnnnnnnnnnnnnnnnnnnnnnnnnnnnnnnnnnnnnnnnnnnnnnnnnnnnnnnnnnnnnnnnnnnnnnnnnnnnnnnnnnnnnnnnnnnnnnnnnnnnnnnnnnnnnnnnnnnnnnnnnnnnnnnnnnnnnnnnnnnnnnnnnnnnnnnnnnnnnnnnnnnnnnnnnnnnnnnnnnnnnnnnnnnnnnnnnnnnnnnnnnnnnnnnnnnnnnnnnnnnnnnnnnnnnnnnnnnnnnnnnnnnnnnnnnnnnnnnnnnnnnnnnnnnnnnnnnnnnnnnnnnnnnnnnnnnnnnnnnnnnnnnnnnnnnnnnnnnnnnnnnnnnnnnnnnnnnnnnnnnnnnnnnnnnnnnnnnnnnnnnnnnnnnnnnnnnnnnnnnnnnnnnnnnnnnnnnnnnnnnnnnnnnnnnnnnnnnnnnnnnnnnnnnnnnnnnnnnnnnnnnnnnnnnnnnnnnnnnnnnnnnnnnnnnnnnnnnnnnnnnnnnnnnnnnnnnnnnnnnnnnnnnnnnnnnnnnnnnnnnnnnnnnnnnnnnnnnnnnnnnnnnnnnnnnnnnnnnnnnnnnnnnnnnnnnnnnnnnnnnnnnnnnnnnnnnnnnnnnnnnnnnnnnnnnnnnnnnnnnnnnnnnnnnnnnnnnnnnnnnnnnnnnnnnnnnnnnnnnnnnnnnnnnnnnnnnnnnnnnnnnnnnnnnnnnnnnnnnnnnnnnnnnnnnnnnnnnnnnnnnnnnnnnnnnnnnnnnnnnnnnnnnnnnnnnnnnnnnnnnnnnnnnnnnnnnnnnnnnnnnnnnnnnnnnnnnnnnnnnnnnnnnnnnnnnnnnnnnnnnnnnnnnnnnnnnnnnnnnnnnnnnnnnnnnnnnnnnnnnnnnnnnnnnnnnnnnnnnnnnnnnnnnnnnnnnnnnnnnnnnnnnnnnnnnnnnnnnnnnnnnnnnnnnnnnnnnnnnnnnnnnnnnnnnnnnnnnnnnnnnnnnnnnnnnnnnnnnnnnnnnnnnnnnnnnnnnnnnnnnnnnnnnnnnnnnnnnnnnnnnnnnnnnnnnnnnnnnnnnnnnnnnnnnnnnnnnnnnnnnnnnnnnnnnnnnnnnnnnnnnnnnnnnnnnnnnnnnnnnnnnnnnnnnnnnnnnnnnnnnnnnnnnnnnnnnnnnnnnnnnnnnnnnnnnnnnnnnnnnnnnnnnnnnnnnnnnnnnnnnnnnnnnnnnnnnnnnnnnnnnnnnnnnnnnnnnnnnnnnnnnnnnnnnnnnnnnnnnnnnnnnnnnnnnnnnnnnnnnnnnnnnnnnnnnnnnnnnnnnnnnnnnnnnnnnnnnnnnnnnnnnnnnnnnnnnnnnnnnnnnnnnnnnnnnnnnnnnnnnnnnnnnnnnnnnnnnnnnnnnnnnnnnnnnnnnnnnnnnnnnnnnnnnnnnnnnnnnnnnnnnnnnnnnnnnnnnnnnnnnnnnnnnnnnnnnnnnnnnnnnnnnnnnnnnnnnnnnnnnnnnnnnnnnnnnnnnnnnnnnnnnnnnnnnnnnnnnnnnnnnnnnnnnnnnnnnnnnnnnnnnnnnnnnnnnnnnnnnnnnnnnnnnnnnnnnnnnnnnnnnnnnnnnnnnnnnnnnnnnnnnnnnnnnnnnnnnnnnnnnnnnnnnnnnnnnnnnnnnnnnnnnnnnnnnnnnnnnnnnnnnnnnnnnnnnnnnnnnnnnnnnnnnnnnnnnnnnnnnnnnnnnnnnnnnnnnnnnnnnnnnnnnnnnnnnnnnnnnnnnnnnnnnnnnnnnnnnnnnnnnnnnnnnnnnnnnnnnnnnnnnnnnnnnnnnnnnnnnnnnnnnnnnnnnnnnnnnnnnnnnnnnnnnnnnnnnnnnnnnnnnnnnnnnnnnnnnnnnnnnnnnnnnnnnnnnnnnnnnnnnnnnnnnnnnnnnnnnnnnnnnnnnnnnnnnnnnnnnnnnnnnnnnnnnnnnnnnnnnnnnnnnnnnnnnnnnnnnnnnnnnnnnnnnnnnnnnnnnnnnnnnnnnnnnnnnnnnnnnnnnnnnnnnnnnnnnnnnnnnnnnnnnnnnnnnnnnnnnnnnnnnnnnnnnnnnnnnnnnnnnnnnnnnnnnnnnnnnnnnnnnnnnnnnnnnnnnnnnnnnnnnnnnnnnnnnnnnnnnnnnnnnnnnnnnnnnnnnnnnnnnnnnnnnnnnnnnnnnnnnnnnnnnnnnnnnnnnnnnnnnnnnnnnnnnnnnnnnnnnnnnnnnnnnnnnnnnnnnnnnnnnnnnnnnnnnnnnnnnnnnnnnnnnnnnnnnnnnnnnnnnnnnnnnnnnnnnnnnnnnnnnnnnnnnnnnnnnnnnnnnnnnnnnnnnnnnnnnnnnnnnnnnnnnnnnnnnnnnnnnnnnnnnnnnnnnnnnnnnnnnnnnnnnnnnnnnnnnnnnnnnnnnnnnnnnnnnnnnnnnnnnnnnnnnnnnnnnnnnnnnnnnnnnnnnnnnnnnnnnnnnnnnnnnnnnnnnnnnnnnnnnnnnnnnnnnnnnnnnnnnnnnnnnnnnnnnnnnnnnnnnnnnnnnnnnnnnnnnnnnnnnnnnnnnnnnnnnnnnnnnnnnnnnnnnnnnnnnnnnnnnnnnnnnnnnnnnnnnnnnnnnnnnnnnnnnnnnnnnnnnnnnnnnnnnnnnnnnnnnnnnnnnnnnnnnnnnnnnnnnnnnnnnnnnnnnnnnnnnnnnnnnnnnnnnnnnnnnnnnnnnnnnnnnnnnnnnnnnnnnnnnnnnnnnnnnnnnnnnnnnnnnnnnnnnnnnnnnnnnnnnnnnnnnnnnnnnnnnnnnnnnnnnnnnnnnnnnnnnnnnnnnnnnnnnnnnnnnnnnnnnnnnnnnnnnnnnnnnnnnnnnnnnnnnnnnnnnnnnnnnnnnnnnnnnnnnnnnnnnnnnnnnnnnnnnnnnnnnnnnnnnnnnnnnnnnnnnnnnnnnnnnnnnnnnnnnnnnnnnnnnnnnnnnnnnnnnnnnnnnnnnnnnnnnnnnnnnnnnnnnnnnnnnnnnnnnnnnnnnnnnnnnnnnnnnnnnnnnnnnnnnnnnnnnnnnnnnnnnnnnnnnnnnnnnnnnnnnnnnnnnnnnnnnnnnnnnnnnnnnnnnnnnnnnnnnnnnnnnnnnnnnnnnnnnnnnnnnnnnnnnnnnnnnnnnnnnnnnnnnnnnnnnnnnnnnnnnnnnnnnnnnnnnnnnnnnnnnnnnnnnnnnnnnnnnnnnnnnnnnnnnnnnnnnnnnnnnnnnnnnnnnnnnnnnnnnnnnnnnnnnnnnnnnnnnnnnnnnnnnnnnnnnnnnnnnnnnnnnnnnnnnnnnnnnnnnnnnnnnnnnnnnnnnnnnnnnnnnnnnnnnnnnnnnnnnnnnnnnnnnnnnnnnnnnnnnnnnnnnnnnnnnnnnnnnnnnnnnnnnnnnnnnnnnnnnnnnnnnnnnnnnnnnnnnnnnnnnnnnnnnnnnnnnnnnnnnnnnnnnnnnnnnnnnnnnnnnnnnnnnnnnnnnnnnnnnnnnnnnnnnnnnnnnnnnnnnnnnnnnnnnnnnnnnnnnnnnnnnnnnnnnnnnnnnnnnnnnnnnnnnnnnnnnnnnnnnnnnnnnnnnnnnnnnnnnnnnnnnnnnnnnnnnnnnnnnnnnnnnnnnnnnnnnnnnnnnnnnnnnnnnnnnnnnnnnnnnnnnnnnnnnnnnnnnnnnnnnnnnnnnnnnnnnnnnnnnnnnnnnnnnnnnnnnnnnnnnnnnnnnnnnnnnnnnnnnnnnnnnnnnnnnnnnnnnnnnnnnnnnnnnnnnnnnnnnnnnnnnnnnnnnnnnnnnnnnnnnnnnnnnnnnnnnnnnnnnnnnnnnnnnnnnnnnnnnnnnnnnnnnnnnnnnnnnnnnnnnnnnnnnnnnnnnnnnnnnnnnnnnnnnnnnnnnnnnnnnnnnnnnnnnnnnnnnnnnnnnnnnnnnnnnnnnnnnnnnnnnnnnnnnnnnnnnnnnnnnnnnnnnnnnnnnnnnnnnnnnnnnnnnnnnnnnnnnnnnnnnnnnnnnnnnnnnnnnnnnnnnnnnnnnnnnnnnnnnnnnnnnnnnnnnnnnnnnnnnnnnnnnnnnnnnnnnnnnnnnnnnnnnnnnnnnnnnnnnnnnnnnnnnnnnnnnnnnnnnnnnnnnnnnnnnnnnnnnnnnnnnnnnnnnnnnnnnnnnnnnnnnnnnnnnnnnnnnnnnnnnnnnnnnnnnnnnnnnnnnnnnnnnnnnnnnnnnnnnnnnnnnnnnnnnnnnnnnnnnnnnnnnnnnnnnnnnnnnnnnnnnnnnnnnnnnnnnnnnnnnnnnnnnnnnnnnnnnnnnnnnnnnnnnnnnnnnnnnnnnnnnnnnnnnnnnnnnnnnnnnnnnnnnnnnnnnnnnnnnnnnnnnnnnnnnnnnnnnnnnnnnnnnnnnnnnnnnnnnnnnnnnnnnnnnnnnnnnnnnnnnnnnnnnnnnnnnnnnnnnnnnnnnnnnnnnnnnnnnnnnnnnnnnnnnnnnnnnnnnnnnnnnnnnnnnnnnnnnnnnnnnnnnnnnnnnnnnnnnnnnnnnnnnnnnnnnnnnnnnnnnnnnnnnnnnnnnnnnnnnnnnnnnnnnnnnnnnnnnnnnnnnnnnnnnnnnnnnnnnnnnnnnnnnnnnnnnnnnnnnnnnnnnnnnnnnnnnnnnnnnnnnnnnnnnnnnnnnnnnnnnnnnnnnnnnnnnnnnnnnnnnnnnnnnnnnnnnnnnnnnnnnnnnnnnnnnnnnnnnnnnnnnnnnnnnnnnnnnnnnnnnnnnnnnnnnnnnnnnnnnnnnnnnnnnnnnnnnnnnnnnnnnnnnnnnnnnnnnnnnnnnnnnnnnnnnnnnnnnnnnnnnnnnnnnnnnnnnnnnnnnnnnnnnnnnnnnnnnnnnnnnnnnnnnnnnnnnnnnnnnnnnnnnnnnnnnnnnnnnnnnnnnnnnnnnnnnnnnnnnnnnnnnnnnnnnnnnnnnnnnnnnnnnnnnnnnnnnnnnnnnnnnnnnnnnnnnnnnnnnnnnnnnnnnnnnnnnnnnnnnnnnnnnnnnnnnnnnnnnnnnnnnnnnnnnnnnnnnnnnnnnnnnnnnnnnnnnnnnnnnnnnnnnnnnnnnnnnnnnnnnnnnnnnnnnnnnnnnnnnnnnnnnnnnnnnnnnnnnnnnnnnnnnnnnnnnnnnnnnnnnnnnnnnnnnnnnnnnnnnnnnnnnnnnnnnnnnnnnnnnnnnnnnnnnnnnnnnnnnnnnnnnnnnnnnnnnnnnnnnnnnnnnnnnnnnnnnnnnnnnnnnnnnnnnnnnnnnnnnnnnnnnnnnnnnnnnnnnnnnnnnnnnnnnnnnnnnnnnnnnnnnnnnnnnnnnnnnnnnnnnnnnnnnnnnnnnnnnnnnnnnnnnnnnnnnnnnnnnnnnnnnnnnnnnnnnnnnnnnnnnnnnnnnnnnnnnnnnnnnnnnnnnnnnnnnnnnnnnnnnnnnnnnnnnnnnnnnnnnnnnnnnnnnnnnnnnnnnnnnnnnnnnnnnnnnnnnnnnnnnnnnnnnnnnnnnnnnnnnnnnnnnnnnnnnnnnnnnnnnnnnnnnnnnnnnnnnnnnnnnnnnnnnnnnnnnnnnnnnnnnnnnnnnnnnnnnnnnnnnnnnnnnnnnnnnnnnnnnnnnnnnnnnnnnnnnnnnnnnnnnnnnnnnnnnnnnnnnnnnnnnnnnnnnnnnnnnnnnnnnnnnnnnnnnnnnnnnnnnnnnnnnnnnnnnnnnnnnnnnnnnnnnnnnnnnnnnnnnnnnnnnnnnnnnnnnnnnnnnnnnnnnnnnnnnnnnnnnnnnnnnnnnnnnnnnnnnnnnnnnnnnnnnnnnnnnnnnnnnnnnnnnnnnnnnnnnnnnnnnnnnnnnnnnnnnnnnnnnnnnnnnnnnnnnnnnnnnnnnnnnnnnnnnnnnnnnnnnnnnnnnnnnnnnnnnnnnnnnnnnnnnnnnnnnnnnnnnnnnnnnnnnnnnnnnnnnnnnnnnnnnnnnnnnnnnnnnnnnnnnnnnnnnnnnnnnnnnnnnnnnnnnnnnnnnnnnnnnnnnnnnnnnnnnnnnnnnnnnnnnnnnnnnnnnnnnnnnnnnnnnnnnnnnnnnnnnnnnnnnnnnnnnnnnnnnnnnnnnnnnnnnnnnnnnnnnnnnnnnnnnnnnnnnnnnnnnnnnnnnnnnnnnnnnnnnnnnnnnnnnnnnnnnnnnnnnnnnnnnnnnnnnnnnnnnnnnnnnnnnnnnnnnnnnnnnnnnnnnnnnnnnnnnnnnnnnnnnnnnnnnnnnnnnnnnnnnnnnnnnnnnnnnnnnnnnnnnnnnnnnnnnnnnnnnnnnnnnnnnnnnnnnnnnnnnnnnnnnnnnnnnnnnnnnnnnnnnnnnnnnnnnnnnnnnnnnnnnnnnnnnnnnnnnnnnnnnnnnnnnnnnnnnnnnnnnnnnnnnnnnnnnnnnnnnnnnnnnnnnnnnnnnnnnnnnnnnnnnnnnnnnnnnnnnnnnnnnnnnnnnnnnnnnnnnnnnnnnnnnnnnnnnnnnnnnnnnnnnnnnnnnnnnnnnnnnnnnnnnnnnnnnnnnnnnnnnnnnnnnnnnnnnnnnnnnnnnnnnnnnnnnnnnnnnnnnnnnnnnnnnnnnnnnnnnnnnnnnnnnnnnnnnnnnnnnnnnnnnnnnnnnnnnnnnnnnnnnnnnnnnnnnnnnnnnnnnnnnnnnnnnnnnnnnnnnnnnnnnnnnnnnnnnnnnnnnnnnnnnnnnnnnnnnnnnnnnnnnnnnnnnnnnnnnnnnnnnnnnnnnnnnnnnnnnnnnnnnnnnnnnnnnnnnnnnnnnnnnnnnnnnnnnnnnnnnnnnnnnnnnnnnnnnnnnnnnnnnnnnnnnnnnnnnnnnnnnnnnnnnnnnnnnnnnnnnnnnnnnnnnnnnnnnnnnnnnnnnnnnnnnnnnnnnnnnnnnnnnnnnnnnnnnnnnnnnnnnnnnnnnnnnnnnnnnnnnnnnnnnnnnnnnnnnnnnnnnnnnnnnnnnnnnnnnnnnnnnnnnnnnnnnnnnnnnnnnnnnnnnnnnnnnnnnnnnnnnnnnnnnnnnnnnnnnnnnnnnnnnnnnnnnnnnnnnnnnnnnnnnnnnnnnnnnnnnnnnnnnnnnnnnnnnnnnnnnnnnnnnnnnnnnnnnnnnnnnnnnnnnnnnnnnnnnnnnnnnnnnnnnnnnnnnnnnnnnnnnnnnnnnnnnnnnnnnnnnnnnnnnnnnnnnnnnnnnnnnnnnnnnnnnnnnnnnnnnnnnnnnnnnnnnnnnnnnnnnnnnnnnnnnnnnnnnnnnnnnnnnnnnnnnnnnnnnnnnnnnnnnnnnnnnnnnnnnnnnnnnnnnnnnnnnnnnnnnnnnnnnnnnnnnnnnnnnnnnnnnnnnnnnnnnnnnnnnnnnnnnnnnnnnnnnnnnnnnnnnnnnnnnnnnnnnnnnnnnnnnnnnnnnnnnnnnnnnnnnnnnnnnnnnnnnnnnnnnnnnnnnnnnnnnnnnnnnnnnnnnnnnnnnnnnnnnnnnnnnnnnnnnnnnnnnnnnnnnnnnnnnnnnnnnnnnnnnnnnnnnnnnnnnnnnnnnnnnnnnnnnnnnnnnnnnnnnnnnnnnnnnnnnnnnnnnnnnnnnnnnnnnnnnnnnnnnnnnnnnnnnnnnnnnnnnnnnnnnnnnnnnnnnnnnnnnnnnnnnnnnnnnnnnnnnnnnnnnnnnnnnnnnnnnnnnnnnnnnnnnnnnnnnnnnnnnnnnnnnnnnnnnnnnnnnnnnnnnnnnnnnnnnnnnnnnnnnnnnnnnnnnnnnnnnnnnnnnnnnnnnnnnnnnnnnnnnnnnnnnnnnnnnnnnnnnnnnnnnnnnnnnnnnnnnnnnnnnnnnnnnnnnnnnnnnnnnnnnnnnnnnnnnnnnnnnnnnnnnnnnnnnnnnnnnnnnnnnnnnnnnnnnnnnnnnnnnnnnnnnnnnnnnnnnnnnnnnnnnnnnnnnnnnnnnnnnnnnnnnnnnnnnnnnnnnnnnnnnnnnnnnnnnnnnnnnnnnnnnnnnnnnnnnnnnnnnnnnnnnnnnnnnnnnnnnnnnnnnnnnnnnnnnnnnnnnnnnnnnnnnnnnnnnnnnnnnnnnnnnnnnnnnnnnnnnnnnnnnnnnnnnnnnnnnnnnnnnnnnnnnnnnnnnnnnnnnnnnnnnnnnnnnnnnnnnnnnnnnnnnnnnnnnnnnnnnnnnnnnnnnnnnnnnnnnnnnnnnnnnnnnnnnnnnnnnnnnnnnnnnnnnnnnnnnnnnnnnnnnnnnnnnnnnnnnnnnnnnnnnnnnnnnnnnnnnnnnnnnnnnnnnnnnnnnnnnnnnnnnnnnnnnnnnnnnnnnnnnnnnnnnnnnnnnnnnnnnnnnnnnnnnnnnnnnnnnnnnnnnnnnnnnnnnnnnnnnnnnnnnnnnnnnnnnnnnnnnnnnnnnnnnnnnnnnnnnnnnnnnnnnnnnnnnnnnnnnnnnnnnnnnnnnnnnnnnnnnnnnnnnnnnnnnnnnnnnnnnnnnnnnnnnnnnnnnnnnnnnnnnnnnnnnnnnnnnnnnnnnnnnnnnnnnnnnnnnnnnnnnnnnnnnnnnnnnnnnnnnnnnnnnnnnnnnnnnnnnnnnnnnnnnnnnnnnnnnnnnnnnnnnnnnnnnnnnnnnnnnnnnnnnnnnnnnnnnnnnnnnnnnnnnnnnnnnnnnnnnnnnnnnnnnnnnnnnnnnnnnnnnnnnnnnnnnnnnnnnnnnnnnnnnnnnnnnnnnnnnnnnnnnnnnnnnnnnnnnnnnnnnnnnnnnnnnnnnnnnnnnnnnnnnnnnnnnnnnnnnnnnnnnnnnnnnnnnnnnnnnnnnnnnnnnnnnnnnnnnnnnnnnnnnnnnnnnnnnnnnnnnnnnnnnnnnnnnnnnnnnnnnnnnnnnnnnnnnnnnnnnnnnnnnnnnnnnnnnnnnnnnnnnnnnnnnnnnnnnnnnnnnnnnnnnnnnnnnnnnnnnnnnnnnnnnnnnnnnnnnnnnnnnnnnnnnnnnnnnnnnnnnnnnnnnnnnnnnnnnnnnnnnnnnnnnnnnnnnnnnnnnnnnnnnnnnnnnnnnnnnnnnnnnnnnnnnnnnnnnnnnnnnnnnnnnnnnnnnnnnnnnnnnnnnnnnnnnnnnnnnnnnnnnnnnnnnnnnnnnnnnnnnnnnnnnnnnnnnnnnnnnnnnnnnnnnnnnnnnnnnnnnnnnnnnnnnnnnnnnnnnnnnnnnnnnnnnnnnnnnnnnnnnnnnnnnnnnnnnnnnnnnnnnnnnnnnnnnnnnnnnnnnnnnnnnnnnnnnnnnnnnnnnnnnnnnnnnnnnnnnnnnnnnnnnnnnnnnnnnnnnnnnnnnnnnnnnnnnnnnnnnnnnnnnnnnnnnnnnnnnnnnnnnnnnnnnnnnnnnnnnnnnnnnnnnnnnnnnnnnnnnnnnnnnnnnnnnnnnnnnnnnnnnnnnnnnnnnnnnnnnnnnnnnnnnnnnnnnnnnnnnnnnnnnnnnnnnnnnnnnnnnnnnnnnnnnnnnnnnnnnnnnnnnnnnnnnnnnnnnnnnnnnnnnnnnnnnnnnnnnnnnnnnnnnnnnnnnnnnnnnnnnnnnnnnnnnnnnnnnnnnnnnnnnnnnnnnnnnnnnnnnnnnnnnnnnnnnnnnnnnnnnnnnnnnnnnnnnnnnnnnnnnnnnnnnnnnnnnnnnnnnnnnnnnnnnnnnnnnnnnnnnnnnnnnnnnnnnnnnnnnnnnnnnnnnnnnnnnnnnnnnnnnnnnnnnnnnnnnnnnnnnnnnnnnnnnnnnnnnnnnnnnnnnnnnnnnnnnnnnnnnnnnnnnnnnnnnnnnnnnnnnnnnnnnnnnnnnnnnnnnnnnnnnnnnnnnnnnnnnnnnnnnnnnnnnnnnnnnnnnnnnnnnnnnnnnnnnnnnnnnnnnnnnnnnnnnnnnnnnnnnnnnnnnnnnnnnnnnnnnnnnnnnnnnnnnnnnnnnnnnnnnnnnnnnnnnnnnnnnnnnnnnnnnnnnnnnnnnnnnnnnnnnnnnnnnnnnnnnnnnnnnnnnnnnnnnnnnnnnnnnnnnnnnnnnnnnnnnnnnnnnnnnnnnnnnnnnnnnnnnnnnnnnnnnnnnnnnnnnnnnnnnnnnnnnnnnnnnnnnnnnnnnnnnnnnnnnnnnnnnnnnnnnnnnnnnnnnnnnnnnnnnnnnnnnnnnnnnnnnnnnnnnnnnnnnnnnnnnnnnnnnnnnnnnnnnnnnnnnnnnnnnnnnnnnnnnnnnnnnnnnnnnnnnnnnnnnnnnnnnnnnnnnnnnnnnnnnnnnnnnnnnnnnnnnnnnnnnnnnnnnnnnnnnnnnnnnnnnnnnnnnnnnnnnnnnnnnnnnnnnnnnnnnnnnnnnnnnnnnnnnnnnnnnnnnnnnnnnnnnnnnnnnnnnnnnnnnnnnnnnnnnnnnnnnnnnnnnnnnnnnnnnnnnnnnnnnnnnnnnnnnnnnnnnnnnnnnnnnnnnnnnnnnnnnnnnnnnnnnnnnnnnnnnnnnnnnnnnnnnnnnnnnnnnnnnnnnnnnnnnnnnnnnnnnnnnnnnnnnnnnnnnnnnnnnnnnnnnnnnnnnnnnnnnnnnnnnnnnnnnnnnnnnnnnnnnnnnnnnnnnnnnnnnnnnnnnnnnnnnnnnnnnnnnnnnnnnnnnnnnnnnnnnnnnnnnnnnnnnnnnnnnnnnnnnnnnnnnnnnnnnnnnnnnnnnnnnnnnnnnnnnnnnnnnnnnnnnnnnnnnnnnnnnnnnnnnnnnnnnnnnnnnnnnnnnnnnnnnnnnnnnnnnnnnnnnnnnnnnnnnnnnnnnnnnnnnnnnnnnnnnnnnnnnnnnnnnnnnnnnnnnnnnnnnnnnnnnnnnnnnnnnnnnnnnnnnnnnnnnnnnnnnnnnnnnnnnnnnnnnnnnnnnnnnnnnnnnnnnnnnnnnnnnnnnnnnnnnnnnnnnnnnnnnnnnnnnnnnnnnnnnnnnnnnnnnnnnnnnnnnnnnnnnnnnnnnnnnnnnnnnnnnnnnnnnnnnnnnnnnnnnnnnnnnnnnnnnnnnnnnnnnnnnnnnnnnnnnnnnnnnnnnnnnnnnnnnnnnnnnnnnnnnnnnnnnnnnnnnnnnnnnnnnnnnnnnnnnnnnnnnnnnnnnnnnnnnnnnnnnnnnnnnnnnnnnnnnnnnnnnnnnnnnnnnnnnnnnnnnnnnnnnnnnnnnnnnnnnnnnnnnnnnnnnnnnnnnnnnnnnnnnnnnnnnnnnnnnnnnnnnnnnnnnnnnnnnnnnnnnnnnnnnnnnnnnnnnnnnnnnnnnnnnnnnnnnnnnnnnnnnnnnnnnnnnnnnnnnnnnnnnnnnnnnnnnnnnnnnnnnnnnnnnnnnnnnnnnnnnnnnnnnnnnnnnnnnnnnnnnnnnnnnnnnnnnnnnnnnnnnnnnnnnnnnnnnnnnnnnnnnnnnnnnnnnnnnnnnnnnnnnnnnnnnnnnnnnnnnnnnnnnnnnnnnnnnnnnnnnnnnnnnnnnnnnnnnnnnnnnnnnnnnnnnnnnnnnnnnnnnnnnnnnnnnnnnnnnnnnnnnnnnnnnnnnnnnnnnnnnnnnnnnnnnnnnnnnnnnnnnnnnnnnnnnnnnnnnnnnnnnnnnnnnnnnnnnnnnnnnnnnnnnnnnnnnnnnnnnnnnnnnnnnnnnnnnnnnnnnnnnnnnnnnnnnnnnnnnnnnnnnnnnnnnnnnnnnnnnnnnnnnnnnnnnnnnnnnnnnnnnnnnnnnnnnnnnnnnnnnnnnnnnnnnnnnnnnnnnnnnnnnnnnnnnnnnnnnnnnnnnnnnnnnnnnnnnnnnnnnnnnnnnnnnnnnnnnnnnnnnnnnnnnnnnnnnnnnnnnnnnnnnnnnnnnnnnnnnnnnnnnnnnnnnnnnnnnnnnnnnnnnnnnnnnnnnnnnnnnnnnnnnnnnnnnnnnnnnnnnnnnnnnnnnnnnnnnnnnnnnnnnnnnnnnnnnnnnnnnnnnnnnnnnnnnnnnnnnnnnnnnnnnnnnnnnnnnnnnnnnnnnnnnnnnnnnnnnnnnnnnnnnnnnnnnnnnnnnnnnnnnnnnnnnnnnnnnnnnnnnnnnnnnnnnnnnnnnnnnnnnnnnnnnnnnnnnnnnnnnnnnnnnnnnnnnnnnnnnnnnnnnnnnnnnnnnnnnnnnnnnnnnnnnnnnnnnnnnnnnnnnnnnnnnnnnnnnnnnnnnnnnnnnnnnnnnnnnnnnnnnnnnnnnnnnnnnnnnnnnnnnnnnnnnnnnnnnnnnnnnnnnnnnnnnnnnnnnnnnnnnnnnnnnnnnnnnnnnnnnnnnnnnnnnnnnnnnnnnnnnnnnnnnnnnnnnnnnnnnnnnnnnnnnnnnnnnnnnnnnnnnnnnnnnnnnnnnnnnnnnnnnnnnnnnnnnnnnnnnnnnnnnnnnnnnnnnnnnnnnnnnnnnnnnnnnnnnnnnnnnnnnnnnnnnnnnnnnnnnnnnnnnnnnnnnnnnnnnnnnnnnnnnnnnnnnnnnnnnnnnnnnnnnnnnnnnnnnnnnnnnnnnnnnnnnnnnnnnnnnnnnnnnnnnnnnnnnnnnnnnnnnnnnnnnnnnnnnnnnnnnnnnnnnnnnnnnnnnnnnnnnnnnnnnnnnnnnnnnnnnnnnnnnnnnnnnnnnnnnnnnnnnnnnnnnnnnnnnnnnnnnnnnnnnnnnnnnnnnnnnnnnnnnnnnnnnnnnnnnnnnnnnnnnnnnnnnnnnnnnnnnnnnnnnnnnnnnnnnnnnnnnnnnnnnnnnnnnnnnnnnnnnnnnnnnnnnnnnnnnnnnnnnnnnnnnnnnnnnnnnnnnnnnnnnnnnnnnnnnnnnnnnnnnnnnnnnnnnnnnnnnnnnnnnnnnnnnnnnnnnnnnnnnnnnnnnnnnnnnnnnnnnnnnnnnnnnnnnnnnnnnnnnnnnnnnnnnnnnnnnnnnnnnnnnnnnnnnnnnnnnnnnnnnnnnnnnnnnnnnnnnnnnnnnnnnnnnnnnnnnnnnnnnnnnnnnnnnnnnnnnnnnnnnnnnnnnnnnnnnnnnnnnnnnnnnnnnnnnnnnnnnnnnnnnnnnnnnnnnnnnnnnnnnnnnnnnnnnnnnnnnnnnnnnnnnnnnnnnnnnnnnnnnnnnnnnnnnnnnnnnnnnnnnnnnnnnnnnnnnnnnnnnnnnnnnnnnnnnnnnnnnnnnnnnnnnnnnnnnnnnnnnnnnnnnnnnnnnnnnnnnnnnnnnnnnnnnnnnnnnnnnnnnnnnnnnnnnnnnnnnnnnnnnnnnnnnnnnnnnnnnnnnnnnnnnnnnnnnnnnnnnnnnnnnnnnnnnnnnnnnnnnnnnnnnnnnnnnnnnnnnnnnnnnnnnnnnnnnnnnnnnnnnnnnnnnnnnnnnnnnnnnnnnnnnnnnnnnnnnnnnnnnnnnnnnnnnnnnnnnnnnnnnnnnnnnnnnnnnnnnnnnnnnnnnnnnnnnnnnnnnnnnnnnnnnnnnnnnnnnnnnnnnnnnnnnnnnnnnnnnnnnnnnnnnnnnnnnnnnnnnnnnnnnnnnnnnnnnnnnnnnnnnnnnnnnnnnnnnnnnnnnnnnnnnnnnnnnnnnnnnnnnnnnnnnnnnnnnnnnnnnnnnnnnnnnnnnnnnnnnnnnnnnnnnnnnnnnnnnnnnnnnnnnnnnnnnnnnnnnnnnnnnnnnnnnnnnnnnnnnnnnnnnnnnnnnnnnnnnnnnnnnnnnnnnnnnnnnnnnnnnnnnnnnnnnnnnnnnnnnnnnnnnnnnnnnnnnnnnnnnnnnnnnnnnnnnnnnnnnnnnnnnnnnnnnnnnnnnnnnnnnnnnnnnnnnnnnnnnnnnnnnnnnnnnnnnnnnnnnnnnnnnnnnnnnnnnnnnnnnnnnnnnnnnnnnnnnnnnnnnnnnnnnnnnnnnnnnnnnnnnnnnnnnnnnnnnnnnnnnnnnnnnnnnnnnnnnnnnnnnnnnnnnnnnnnnnnnnnnnnnnnnnnnnnnnnnnnnnnnnnnnnnnnnnnnnnnnnnnnnnnnnnnnnnnnnnnnnnnnnnnnnnnnnnnnnnnnnnnnnnnnnnnnnnnnnnnnnnnnnnnnnnnnnnnnnnnnnnnnnnnnnnnnnnnnnnnnnnnnnnnnnnnnnnnnnnnnnnnnnnnnnnnnnnnnnnnnnnnnnnnnnnnnnnnnnnnnnnnnnnnnnnnnnnnnnnnnnnnnnnnnnnnnnnnnnnnnnnnnnnnnnnnnnnnnnnnnnnnnnnnnnnnnnnnnnnnnnnnnnnnnnnnnnnnnnnnnnnnnnnnnnnnnnnnnnnnnnnnnnnnnnnnnnnnnnnnnnnnnnnnnnnnnnnnnnnnnnnnnnnnnnnnnnnnnnnnnnnnnnnnnnnnnnnnnnnnnnnnnnnnnnnnnnnnnnnnnnnnnnnnnnnnnnnnnnnnnnnnnnnnnnnnnnnnnnnnnnnnnnnnnnnnnnnnnnnnnnnnnnnnnnnnnnnnnnnnnnnnnnnnnnnnnnnnnnnnnnnnnnnnnnnnnnnnnnnnnnnnnnnnnnnnnnnnnnnnnnnnnnnnnnnnnnnnnnnnnnnnnnnnnnnnnnnnnnnnnnnnnnnnnnnnnnnnnnnnnnnnnnnnnnnnnnnnnnnnnnnnnnnnnnnnnnnnnnnnnnnnnnnnnnnnnnnnnnnnnnnnnnnnnnnnnnnnnnnnnnnnnnnnnnnnnnnnnnnnnnnnnnnnnnnnnnnnnnnnnnnnnnnnnnnnnnnnnnnnnnnnnnnnnnnnnnnnnnnnnnnnnnnnnnnnnnnnnnnnnnnnnnnnnnnnnnnnnnnnnnnnnnnnnnnnnnnnnnnnnnnnnnnnnnnnnnnnnnnnnnnnnnnnnnnnnnnnnnnnnnnnnnnnnnnnnnnnnnnnnnnnnnnnnnnnnnnnnnnnnnnnnnnnnnnnnnnnnnnnnnnnnnnnnnnnnnnnnnnnnnnnnnnnnnnnnnnnnnnnnnnnnnnnnnnnnnnnnnnnnnnnnnnnnnnnnnnnnnnnnnnnnnnnnnnnnnnnnnnnnnnnnnnnnnnnnnnnnnnnnnnnnnnnnnnnnnnnnnnnnnnnnnnnnnnnnnnnnnnnnnnnnnnnnnnnnnnnnnnnnnnnnnnnnnnnnnnnnnnnnnnnnnnnnnnnnnnnnnnnnnnnnnnnnnnnnnnnnnnnnnnnnnnnnnnnnnnnnnnnnnnnnnnnnnnnnnnnnnnnnnnnnnnnnnnnnnnnnnnnnnnnnnnnnnnnnnnnnnnnnnnnnnnnnnnnnnnnnnnnnnnnnnnnnnnnnnnnnnnnnnnnnnnnnnnnnnnnnnnnnnnnnnnnnnnnnnnnnnnnnnnnnnnnnnnnnnnnnnnnnnnnnnnnnnnnnnnnnnnnnnnnnnnnnnnnnnnnnnnnnnnnnnnnnnnnnnnnnnnnnnnnnnnnnnnnnnnnnnnnnnnnnnnnnnnnnnnnnnnnnnnnnnnnnnnnnnnnnnnnnnnnnnnnnnnnnnnnnnnnnnnnnnnnnnnnnnnnnnnnnnnnnnnnnnnnnnnnnnnnnnnnnnnnnnnnnnnnnnnnnnnnnnnnnnnnnnnnnnnnnnnnnnnnnnnnnnnnnnnnnnnnnnnnnnnnnnnnnnnnnnnnnnnnnnnnnnnnnnnnnnnnnnnnnnnnnnnnnnnnnnnnnnnnnnnnnnnnnnnnnnnnnnnnnnnnnnnnnnnnnnnnnnnnnnnnnnnnnnnnnnnnnnnnnnnnnnnnnnnnnnnnnnnnnnnnnnnnnnnnnnnnnnnnnnnnnnnnnnnnnnnnnnnnnnnnnnnnnnnnnnnnnnnnnnnnnnnnnnnnnnnnnnnnnnnnnnnnnnnnnnnnnnnnnnnnnnnnnnnnnnnnnnnnnnnnnnnnnnnnnnnnnnnnnnnnnnnnnnnnnnnnnnnnnnnnnnnnnnnnnnnnnnnnnnnnnnnnnnnnnnnnnnnnnnnnnnnnnnnnnnnnnnnnnnnnnnnnnnnnnnnnnnnnnnnnnnnnnnnnnnnnnnnnnnnnnnnnnnnnnnnnnnnnnnnnnnnnnnnnnnnnnnnnnnnnnnnnnnnnnnnnnnnnnnnnnnnnnnnnnnnnnnnnnnnnnnnnnnnnnnnnnnnnnnnnnnnnnnnnnnnnnnnnnnnnnnnnnnnnnnnnnnnnnnnnnnnnnnnnnnnnnnnnnnnnnnnnnnnnnnnnnnnnnnnnnnnnnnnnnnnnnnnnnnnnnnnnnnnnnnnnnnnnnnnnnnnnnnnnnnnnnnnnnnnnnnnnnnnnnnnnnnnnnnnnnnnnnnnnnnnnnnnnnnnnnnnnnnnnnnnnnnnnnnnnnnnnnnnnnnnnnnnnnnnnnnnnnnnnnnnnnnnnnnnnnnnnnnnnnnnnnnnnnnnnnnnnnnnnnnnnnnnnnnnnnnnnnnnnnnnnnnnnnnnnnnnnnnnnnnnnnnnnnnnnnnnnnnnnnnnnnnnnnnnnnnnnnnnnnnnnnnnnnnnnnnnnnnnnnnnnnnnnnnnnnnnnnnnnnnnnnnnnnnnnnnnnnnnnnnnnnnnnnnnnnnnnnnnnnnnnnnnnnnnnnnnnnnnnnnnnnnnnnnnnnnnnnnnnnnnnnnnnnnnnnnnnnnnnnnnnnnnnnnnnnnnnnnnnnnnnnnnnnnnnnnnnnnnnnnnnnnnnnnnnnnnnnnnnnnnnnnnnnnnnnnnnnnnnnnnnnnnnnnnnnnnnnnnnnnnnnnnnnnnnnnnnnnnnnnnnnnnnnnnnnnnnnnnnnnnnnnnnnnnnnnnnnnnnnnnnnnnnnnnnnnnnnnnnnnnnnnnnnnnnnnnnnnnnnnnnnnnnnnnnnnnnnnnnnnnnnnnnnnnnnnnnnnnnnnnnnnnnnnnnnnnnnnnnnnnnnnnnnnnnnnnnnnnnnnnnnnnnnnnnnnnnnnnnnnnnnnnnnnnnnnnnnnnnnnnnnnnnnnnnnnnnnnnnnnnnnnnnnnnnnnnnnnnnnnnnnnnnnnnnnnnnnnnnnnnnnnnnnnnnnnnnnnnnnnnnnnnnnnnnnnnnnnnnnnnnnnnnnnnnnnnnnnnnnnnnnnnnnnnnnnnnnnnnnnnnnnnnnnnnnnnnnnnnnnnnnnnnnnnnnnnnnnnnnnnnnnnnnnnnnnnnnnnnnnnnnnnnnnnnnnnnnnnnnnnnnnnnnnnnnnnnnnnnnnnnnnnnnnnnnnnnnnnnnnnnnnnnnnnnnnnnnnnnnnnnnnnnnnnnnnnnnnnnnnnnnnnnnnnnnnnnnnnnnnnnnnnnnnnnnnnnnnnnnnnnnnnnnnnnnnnnnnnnnnnnnnnnnnnnnnnnnnnnnnnnnnnnnnnnnnnnnnnnnnnnnnnnnnnnnnnnnnnnnnnnnnnnnnnnnnnnnnnnnnnnnnnnnnnnnnnnnnnnnnnnnnnnnnnnnnnnnnnnnnnnnnnnnnnnnnnnnnnnnnnnnnnnnnnnnnnnnnnnnnnnnnnnnnnnnnnnnnnnnnnnnnnnnnnnnnnnnnnnnnnnnnnnnnnnnnnnnnnnnnnnnnnnnnnnnnnnnnnnnnnnnnnnnnnnnnnnnnnnnnnnnnnnnnnnnnnnnnnnnnnnnnnnnnnnnnnnnnnnnnnnnnnnnnnnnnnnnnnnnnnnnnnnnnnnnnnnnnnnnnnnnnnnnnnnnnnnnnnnnnnnnnnnnnnnnnnnnnnnnnnnnnnnnnnnnnnnnnnnnnnnnnnnnnnnnnnnnnnnnnnnnnnnnnnnnnnnnnnnnnnnnnnnnnnnnnnnnnnnnnnnnnnnnnnnnnnnnnnnnnnnnnnnnnnnnnnnnnnnnnnnnnnnnnnnnnnnnnnnnnnnnnnnnnnnnnnnnnnnnnnnnnnnnnnnnnnnnnnnnnnnnnnnnnnnnnnnnnnnnnnnnnnnnnnnnnnnnnnnnnnnnnnnnnnnnnnnnnnnnnnnnnnnnnnnnnnnnnnnnnnnnnnnnnnnnnnnnnnnnnnnnnnnnnnnnnnnnnnnnnnnnnnnnnnnnnnnnnnnnnnnnnnnnnnnnnnnnnnnnnnnnnnnnnnnnnnnnnnnnnnnnnnnnnnnnnnnnnnnnnnnnnnnnnnnnnnnnnnnnnnnnnnnnnnnnnnnnnnnnnnnnnnnnnnnnnnnnnnnnnnnnnnnnnnnnnnnnnnnnnnnnnnnnnnnnnnnnnnnnnnnnnnnnnnnnnnnnnnnnnnnnnnnnnnnnnnnnnnnnnnnnnnnnnnnnnnnnnnnnnnnnnnnnnnnnnnnnnnnnnnnnnnnnnnnnnnnnnnnnnnnnnnnnnnnnnnnnnnnnnnnnnnnnnnnnnnnnnnnnnnnnnnnnnnnnnnnnnnnnnnnnnnnnnnnnnnnnnnnnnnnnnnnnnnnnnnnnnnnnnnnnnnnnnnnnnnnnnnnnnnnnnnnnnnnnnnnnnnnnnnnnnnnnnnnnnnnnnnnnnnnnnnnnnnnnnnnnnnnnnnnnnnnnnnnnnnnnnnnnnnnnnnnnnnnnnnnnnnnnnnnnnnnnnnnnnnnnnnnnnnnnnnnnnnnnnnnnnnnnnnnnnnnnnnnnnnnnnnnnnnnnnnnnnnnnnnnnnnnnnnnnnnnnnnnnnnnnnnnnnnnnnnnnnnnnnnnnnnnnnnnnnnnnnnnnnnnnnnnnnnnnnnnnnnnnnnnnnnnnnnnnnnnnnnnnnnnnnnnnnnnnnnnnnnnnnnnnnnnnnnnnnnnnnnnnnnnnnnnnnnnnnnnnnnnnnnnnnnnnnnnnnnnnnnnnnnnnnnnnnnnnnnnnnnnnnnnnnnnnnnnnnnnnnnnnnnnnnnnnnnnnnnnnnnnnnnnnnnnnnnnnnnnnnnnnnnnnnnnnnnnnnnnnnnnnnnnnnnnnnnnnnnnnnnnnnnnnnnnnnnnnnnnnnnnnnnnnnnnnnnnnnnnnnnnnnnnnnnnnnnnnnnnnnnnnnnnnnnnnnnnnnnnnnnnnnnnnnnnnnnnnnnnnnnnnnnnnnnnnnnnnnnnnnnnnnnnnnnnnnnnnnnnnnnnnnnnnnnnnnnnnnnnnnnnnnnnnnnnnnnnnnnnnnnnnnnnnnnnnnnnnnnnnnnnnnnnnnnnnnnnnnnnnnnnnnnnnnnnnnnnnnnnnnnnnnnnnnnnnnnnnnnnnnnnnnnnnnnnnnnnnnnnnnnnnnnnnnnnnnnnnnnnnnnnnnnnnnnnnnnnnnnnnnnnnnnnnnnnnnnnnnnnnnnnnnnnnnnnnnnnnnnnnnnnnnnnnnnnnnnnnnnnnnnnnnnnnnnnnnnnnnnnnnnnnnnnnnnnnnnnnnnnnnnnnnnnnnnnnnnnnnnnnnnnnnnnnnnnnnnnnnnnnnnnnnnnnnnnnnnnnnnnnnnnnnnnnnnnnnnnnnnnnnnnnnnnnnnnnnnnnnnnnnnnnnnnnnnnnnnnnnnnnnnnnnnnnnnnnnnnnnnnnnnnnnnnnnnnnnnnnnnnnnnnnnnnnnnnnnnnnnnnnnnnnnnnnnnnnnnnnnnnnnnnnnnnnnnnnnnnnnnnnnnnnnnnnnnnnnnnnnnnnnnnnnnnnnnnnnnnnnnnnnnnnnnnnnnnnnnnnnnnnnnnnnnnnnnnnnnnnnnnnnnnnnnnnnnnnnnnnnnnnnnnnnnnnnnnnnnnnnnnnnnnnnnnnnnnnnnnnnnnnnnnnnnnnnnnnnnnnnnnnnnnnnnnnnnnnnnnnnnnnnnnnnnnnnnnnnnnnnnnnnnnnnnnnnnnnnnnnnnnnnnnnnnnnnnnnnnnnnnnnnnnnnnnnnnnnnnnnnnnnnnnnnnnnnnnnnnnnnnnnnnnnnnnnnnnnnnnnnnnnnnnnnnnnnnnnnnnnnnnnnnnnnnnnnnnnnnnnnnnnnnnnnnnnnnnnnnnnnnnnnnnnnnnnnnnnnnnnnnnnnnnnnnnnnnnnnnnnnnnnnnnnnnnnnnnnnnnnnnnnnnnnnnnnnnnnnnnnnnnnnnnnnnnnnnnnnnnnnnnnnnnnnnnnnnnnnnnnnnnnnnnnnnnnnnnnnnnnnnnnnnnnnnnnnnnnnnnnnnnnnnnnnnnnnnnnnnnnnnnnnnnnnnnnnnnnnnnnnnnnnnnnnnnnnnnnnnnnnnnnnnnnnnnnnnnnnnnnnnnnnnnnnnnnnnnnnnnnnnnnnnnnnnnnnnnnnnnnnnnnnnnnnnnnnnnnnnnnnnnnnnnnnnnnnnnnnnnnnnnnnnnnnnnnnnnnnnnnnnnnnnnnnnnnnnnnnnnnnnnnnnnnnnnnnnnnnnnnnnnnnnnnnnnnnnnnnnnnnnnnnnnnnnnnnnnnnnnnnnnnnnnnnnnnnnnnnnnnnnnnnnnnnnnnnnnnnnnnnnnnnnnnnnnnnnnnnnnnnnnnnnnnnnnnnnnnnnnnnnnnnnnnnnnnnnnnnnnnnnnnnnnnnnnnnnnnnnnnnnnnnnnnnnnnnnnnnnnnnnnnnnnnnnnnnnnnnnnnnnnnnnnnnnnnnnnnnnnnnnnnnnnnnnnnnnnnnnnnnnnnnnnnnnnnnnnnnnnnnnnnnnnnnnnnnnnnnnnnnnnnnnnnnnnnnnnnnnnnnnnnnnnnnnnnnnnnnnnnnnnnnnnnnnnnnnnnnnnnnnnnnnnnnnnnnnnnnnnnnnnnnnnnnnnnnnnnnnnnnnnnnnnnnnnnnnnnnnnnnnnnnnnnnnnnnnnnnnnnnnnnnnnnnnnnnnnnnnnnnnnnnnnnnnnnnnnnnnnnnnnnnnnnnnnnnnnnnnnnnnnnnnnnnnnnnnnnnnnnnnnnnnnnnnnnnnnnnnnnnnnnnnnnnnnnnnnnnnnnnnnnnnnnnnnnnnnnnnnnnnnnnnnnnnnnnnnnnnnnnnnnnnnnnnnnnnnnnnnnnnnnnnnnnnnnnnnnnnnnnnnnnnnnnnnnnnnnnnnnnnnnnnnnnnnnnnnnnnnnnnnnnnnnnnnnnnnnnnnnnnnnnnnnnnnnnnnnnnnnnnnnnnnnnnnnnnnnnnnnnnnnnnnnnnnnnnnnnnnnnnnnnnnnnnnnnnnnnnnnnnnnnnnnnnnnnnnnnnnnnnnnnnnnnnnnnnnnnnnnnnnnnnnnnnnnnnnnnnnnnnnnnnnnnnnnnnnnnnnnnnnnnnnnnnnnnnnnnnnnnnnnnnnnnnnnnnnnnnnnnnnnnnnnnnnnnnnnnnnnnnnnnnnnnnnnnnnnnnnnnnnnnnnnnnnnnnnnnnnnnnnnnnnnnnnnnnnnnnnnnnnnnnnnnnnnnnnnnnnnnnnnnnnnnnnnnnnnnnnnnnnnnnnnnnnnnnnnnnnnnnnnnnnnnnnnnnnnnnnnnnnnnnnnnnnnnnnnnnnnnnnnnnnnnnnnnnnnnnnnnnnnnnnnnnnnnnnnnnnnnnnnnnnnnnnnnnnnnnnnnnnnnnnnnnnnnnnnnnnnnnnnnnnnnnnnnnnnnnnnnnnnnnnnnnnnnnnnnnnnnnnnnnnnnnnnnnnnnnnnnnnnnnnnnnnnnnnnnnnnnnnnnnnnnnnnnnnnnnnnnnnnnnnnnnnnnnnnnnnnnnnnnnnnnnnnnnnnnnnnnnnnnnnnnnnnnnnnnnnnnnnnnnnnnnnnnnnnnnnnnnnnnnnnnnnnnnnnnnnnnnnnnnnnnnnnnnnnnnnnnnnnnnnnnnnnnnnnnnnnnnnnnnnnnnnnnnnnnnnnnnnnnnnnnnnnnnnnnnnnnnnnnnnnnnnnnnnnnnnnnnnnnnnnnnnnnnnnnnnnnnnnnnnnnnnnnnnnnnnnnnnnnnnnnnnnnnnnnnnnnnnnnnnnnnnnnnnnnnnnnnnnnnnnnnnnnnnnnnnnnnnnnnnnnnnnnnnnnnnnnnnnnnnnnnnnnnnnnnnnnnnnnnnnnnnnnnnnnnnnnnnnnnnnnnnnnnnnnnnnnnnnnnnnnnnnnnnnnnnnnnnnnnnnnnnnnnnnnnnnnnnnnnnnnnnnnnnnnnnnnnnnnnnnnnnnnnnnnnnnnnnnnnnnnnnnnnnnnnnnnnnnnnnnnnnnnnnnnnnnnnnnnnnnnnnnnnnnnnnnnnnnnnnnnnnnnnnnnnnnnnnnnnnnnnnnnnnnnnnnnnnnnnnnnnnnnnnnnnnnnnnnnnnnnnnnnnnnnnnnnnnnnnnnnnnnnnnnnnnnnnnnnnnnnnnnnnnnnnnnnnnnnnnnnnnnnnnnnnnnnnnnnnnnnnnnnnnnnnnnnnnnnnnnnnnnnnnnnnnnnnnnnnnnnnnnnnnnnnnnnnnnnnnnnnnnnnnnnnnnnnnnnnnnnnnnnnnnnnnnnnnnnnnnnnnnnnnnnnnnnnnnnnnnnnnnnnnnnnnnnnnnnnnnnnnnnnnnnnnnnnnnnnnnnnnnnnnnnnnnnnnnnnnnnnnnnnnnnnnnnnnnnnnnnnnnnnnnnnnnnnnnnnnnnnnnnnnnnnnnnnnnnnnnnnnnnnnnnnnnnnnnnnnnnnnnnnnnnnnnnnnnnnnnnnnnnnnnnnnnnnnnnnnnnnnnnnnnnnnnnnnnnnnnnnnnnnnnnnnnnnnnnnnnnnnnnnnnnnnnnnnnnnnnnnnnnnnnnnnnnnnnnnnnnnnnnnnnnnnnnnnnnnnnnnnnnnnnnnnnnnnnnnnnnnnnnnnnnnnnnnnnnnnnnnnnnnnnnnnnnnnnnnnnnnnnnnnnnnnnnnnnnnnnnnnnnnnnnnnnnnnnnnnnnnnnnnnnnnnnnnnnnnnnnnnnnnnnnnnnnnnnnnnnnnnnnnnnnnnnnnnnnnnnnnnnnnnnnnnnnnnnnnnnnnnnnnnnnnnnnnnnnnnnnnnnnnnnnnnnnnnnnnnnnnnnnnnnnnnnnnnnnnnnnnnnnnnnnnnnnnnnnnnnnnnnnnnnnnnnnnnnnnnnnnnnnnnnnnnnnnnnnnnnnnnnnnnnnnnnnnnnnnnnnnnnnnnnnnnnnnnnnnnnnnnnnnnnnnnnnnnnnnnnnnnnnnnnnnnnnnnnnnnnnnnnnnnnnnnnnnnnnnnnnnnnnnnnnnnnnnnnnnnnnnnnnnnnnnnnnnnnnnnnnnnnnnnnnnnnnnnnnnnnnnnnnnnnnnnnnnnnnnnnnnnnnnnnnnnnnnnnnnnnnnnnnnnnnnnnnnnnnnnnnnnnnnnnnnnnnnnnnnnnnnnnnnnnnnnnnnnnnnnnnnnnnnnnnnnnnnnnnnnnnnnnnnnnnnnnnnnnnnnnnnnnnnnnnnnnnnnnnnnnnnnnnnnnnnnnnnnnnnnnnnnnnnnnnnnnnnnnnnnnnnnnnnnnnnnnnnnnnnnnnnnnnnnnnnnnnnnnnnnnnnnnnnnnnnnnnnnnnnnnnnnnnnnnnnnnnnnnnnnnnnnnnnnnnnnnnnnnnnnnnnnnnnnnnnnnnnnnnnnnnnnnnnnnnnnnnnnnnnnnnnnnnnnnnnnnnnnnnnnnnnnnnnnnnnnnnnnnnnnnnnnnnnnnnnnnnnnnnnnnnnnnnnnnnnnnnnnnnnnnnnnnnnnnnnnnnnnnnnnnnnnnnnnnnnnnnnnnnnnnnnnnnnnnnnnnnnnnnnnnnnnnnnnnnnnnnnnnnnnnnnnnnnnnnnnnnnnnnnnnnnnnnnnnnnnnnnnnnnnnnnnnnnnnnnnnnnnnnnnnnnnnnnnnnnnnnnnnnnnnnnnnnnnnnnnnnnnnnnnnnnnnnnnnnnnnnnnnnnnnnnnnnnnnnnnnnnnnnnnnnnnnnnnnnnnnnnnnnnnnnnnnnnnnnnnnnnnnnnnnnnnnnnnnnnnnnnnnnnnnnnnnnnnnnnnnnnnnnnnnnnnnnnnnnnnnnnnnnnnnnnnnnnnnnnnnnnnnnnnnnnnnnnnnnnnnnnnnnnnnnnnnnnnnnnnnnnnnnnnnnnnnnnnnnnnnnnnnnnnnnnnnnnnnnnnnnnnnnnnnnnnnnnnnnnnnnnnnnnnnnnnnnnnnnnnnnnnnnnnnnnnnnnnnnnnnnnnnnnnnnnnnnnnnnnnnnnnnnnnnnnnnnnnnnnnnnnnnnnnnnnnnnnnnnnnnnnnnnnnnnnnnnnnnnnnnnnnnnnnnnnnnnnnnnnnnnnnnnnnnnnnnnnnnnnnnnnnnnnnnnnnnnnnnnnnnnnnnnnnnnnnnnnnnnnnnnnnnnnnnnnnnnnnnnnnnnnnnnnnnnnnnnnnnnnnnnnnnnnnnnnnnnnnnnnnnnnnnnnnnnnnnnnnnnnnnnnnnnnnnnnnnnnnnnnnnnnnnnnnnnnnnnnnnnnnnnnnnnnnnnnnnnnnnnnnnnnnnnnnnnnnnnnnnnnnnnnnnnnnnnnnnnnnnnnnnnnnnnnnnnnnnnnnnnnnnnnnnnnnnnnnnnnnnnnnnnnnnnnnnnnnnnnnnnnnnnnnnnnnnnnnnnnnnnnnnnnnnnnnnnnnnnnnnnnnnnnnnnnnnnnnnnnnnnnnnnnnnnnnnnnnnnnnnnnnnnnnnnnnnnnnnnnnnnnnnnnnnnnnnnnnnnnnnnnnnnnnnnnnnnnnnnnnnnnnnnnnnnnnnnnnnnnnnnnnnnnnnnnnnnnnnnnnnnnnnnnnnnnnnnnnnnnnnnnnnnnnnnnnnnnnnnnnnnnnnnnnnnnnnnnnnnnnnnnnnnnnnnnnnnnnnnnnnnnnnnnnnnnnnnnnnnnnnnnnnnnnnnnnnnnnnnnnnnnnnnnnnnnnnnnnnnnnnnnnnnnnnnnnnnnnnnnnnnnnnnnnnnnnnnnnnnnnnnnnnnnnnnnnnnnnnnnnnnnnnnnnnnnnnnnnnnnnnnnnnnnnnnnnnnnnnnnnnnnnnnnnnnnnnnnnnnnnnnnnnnnnnnnnnnnnnnnnnnnnnnnnnnnnnnnnnnnnnnnnnnnnnnnnnnnnnnnnnnnnnnnnnnnnnnnnnnnnnnnnnnnnnnnnnnnnnnnnnnnnnnnnnnnnnnnnnnnnnnnnnnnnnnnnnnnnnnnnnnnnnnnnnnnnnnnnnnnnnnnnnnnnnnnnnnnnnnnnnnnnnnnnnnnnnnnnnnnnnnnnnnnnnnnnnnnnnnnnnnnnnnnnnnnnnnnnnnnnnnnnnnnnnnnnnnnnnnnnnnnnnnnnnnnnnnnnnnnnnnnnnnnnnnnnnnnnnnnnnnnnnnnnnnnnnnnnnnnnnnnnnnnnnnnnnnnnnnnnnnnnnnnnnnnnnnnnnnnnnnnnnnnnnnnnnnnnnnnnnnnnnnnnnnnnnnnnnnnnnnnnnnnnnnnnnnnnnnnnnnnnnnnnnnnnnnnnnnnnnnnnnnnnnnnnnnnnnnnnnnnnnnnnnnnnnnnnnnnnnnnnnnnnnnnnnnnnnnnnnnnnnnnnnnnnnnnnnnnnnnnnnnnnnnnnnnnnnnnnnnnnnnnnnnnnnnnnnnnnnnnnnnnnnnnnnnnnnnnnnnnnnnnnnnnnnnnnnnnnnnnnnnnnnnnnnnnnnnnnnnnnnnnnnnnnnnnnnnnnnnnnnnnnnnnnnnnnnnnnnnnnnnnnnnnnnnnnnnnnnnnnnnnnnnnnnnnnnnnnnnnnnnnnnnnnnnnnnnnnnnnnnnnnnnnnnnnnnnnnnnnnnnnnnnnnnnnnnnnnnnnnnnnnnnnnnnnnnnnnnnnnnnnnnnnnnnnnnnnnnnnnnnnnnnnnnnnnnnnnnnnnnnnnnnnnnnnnnnnnnnnnnnnnnnnnnnnnnnnnnnnnnnnnnnnnnnnnnnnnnnnnnnnnnnnnnnnnnnnnnnnnnnnnnnnnnnnnnnnnnnnnnnnnnnnnnnnnnnnnnnnnnnnnnnnnnnnnnnnnnnnnnnnnnnnnnnnnnnnnnnnnnnnnnnnnnnnnnnnnnnnnnnnnnnnnnnnnnnnnnnnnnnnnnnnnnnnnnnnnnnnnnnnnnnnnnnnnnnnnnnnnnnnnnnnnnnnnnnnnnnnnnnnnnnnnnnnnnnnnnnnnnnnnnnnnnnnnnnnnnnnnnnnnnnnnnnnnnnnnnnnnnnnnnnnnnnnnnnnnnnnnnnnnnnnnnnnnnnnnnnnnnnnnnnnnnnnnnnnnnnnnnnnnnnnnnnnnnnnnnnnnnnnnnnnnnnnnnnnnnnnnnnnnnnnnnnnnnnnnnnnnnnnnnnnnnnnnnnnnnnnnnnnnnnnnnnnnnnnnnnnnnnnnnnnnnnnnnnnnnnnnnnnnnnnnnnnnnnnnnnnnnnnnnnnnnnnnnnnnnnnnnnnnnnnnnnnnnnnnnnnnnnnnnnnnnnnnnnnnnnnnnnnnnnnnnnnnnnnnnnnnnnnnnnnnnnnnnnnnnnnnnnnnnnnnnnnnnnnnnnnnnnnnnnnnnnnnnnnnnnnnnnnnnnnnnnnnnnnnnnnnnnnnnnnnnnnnnnnnnnnnnnnnnnnnnnnnnnnnnnnnnnnnnnnnnnnnnnnnnnnnnnnnnnnnnnnnnnnnnnnnnnnnnnnnnnnnnnnnnnnnnnnnnnnnnnnnnnnnnnnnnnnnnnnnnnnnnnnnnnnnnnnnnnnnnnnnnnnnnnnnnnnnnnnnnnnnnnnnnnnnnnnnnnnnnnnnnnnnnnnnnnnnnnnnnnnnnnnnnnnnnnnnnnnnnnnnnnnnnnnnnnnnnnnnnnnnnnnnnnnnnnnnnnnnnnnnnnnnnnnnnnnnnnnnnnnnnnnnnnnnnnnnnnnnnnnnnnnnnnnnnnnnnnnnnnnnnnnnnnnnnnnnnnnnnnnnnnnnnnnnnnnnnnnnnnnnnnnnnnnnnnnnnnnnnnnnnnnnnnnnnnnnnnnnnnnnnnnnnnnnnnnnnnnnnnnnnnnnnnnnnnnnnnnnnnnnnnnnnnnnnnnnnnnnnnnnnnnnnnnnnnnnnnnnnnnnnnnnnnnnnnnnnnnnnnnnnnnnnnnnnnnnnnnnnnnnnnnnnnnnnnnnnnnnnnnnnnnnnnnnnnnnnnnnnnnnnnnnnnnnnnnnnnnnnnnnnnnnnnnnnnnnnnnnnnnnnnnnnnnnnnnnnnnnnnnnnnnnnnnnnnnnnnnnnnnnnnnnnnnnnnnnnnnnnnnnnnnnnnnnnnnnnnnnnnnnnnnnnnnnnnnnnnnnnnnnnnnnnnnnnnnnnnnnnnnnnnnnnnnnnnnnnnnnnnnnnnnnnnnnnnnnnnnnnnnnnnnnnnnnnnnnnnnnnnnnnnnnnnnnnnnnnnnnnnnnnnnnnnnnnnnnnnnnnnnnnnnnnnnnnnnnnnnnnnnnnnnnnnnnnnnnnnnnnnnnnnnnnnnnnnnnnnnnnnnnnnnnnnnnnnnnnnnnnnnnnnnnnnnnnnnnnnnnnnnnnnnnnnnnnnnnnnnnnnnnnnnnnnnnnnnnnnnnnnnnnnnnnnnnnnnnnnnnnnnnnnnnnnnnnnnnnnnnnnnnnnnnnnnnnnnnnnnnnnnnnnnnnnnnnnnnnnnnnnnnnnnnnnnnnnnnnnnnnnnnnnnnnnnnnnnnnnnnnnnnnnnnnnnnnnnnnnnnnnnnnnnnnnnnnnnnnnnnnnnnnnnnnnnnnnnnnnnnnnnnnnnnnnnnnnnnnnnnnnnnnnnnnnnnnnnnnnnnnnnnnnnnnnnnnnnnnnnnnnnnnnnnnnnnnnnnnnnnnnnnnnnnnnnnnnnnnnnnnnnnnnnnnnnnnnnnnnnnnnnnnnnnnnnnnnnnnnnnnnnnnnnnnnnnnnnnnnnnnnnnnnnnnnnnnnnnnnnnnnnnnnnnnnnnnnnnnnnnnnnnnnnnnnnnnnnnnnnnnnnnnnnnnnnnnnnnnnnnnnnnnnnnnnnnnnnnnnnnnnnnnnnnnnnnnnnnnnnnnnnnnnnnnnnnnnnnnnnnnnnnnnnnnnnnnnnnnnnnnnnnnnnnnnnnnnnnnnnnnnnnnnnnnnnnnnnnnnnnnnnnnnnnnnnnnnnnnnnnnnnnnnnnnnnnnnnnnnnnnnnnnnnnnnnnnnnnnnnnnnnnnnnnnnnnnnnnnnnnnnnnnnnnnnnnnnnnnnnnnnnnnnnnnnnnnnnnnnnnnnnnnnnnnnnnnnnnnnnnnnnnnnnnnnnnnnnnnnnnnnnnnnnnnnnnnnnnnnnnnnnnnnnnnnnnnnnnnnnnnnnnnnnnnnnnnnnnnnnnnnnnnnnnnnnnnnnnnnnnnnnnnnnnnnnnnnnnnnnnnnnnnnnnnnnnnnnnnnnnnnnnnnnnnnnnnnnnnnnnnnnnnnnnnnnnnnnnnnnnnnnnnnnnnnnnnnnnnnnnnnnnnnnnnnnnnnnnnnnnnnnnnnnnnnnnnnnnnnnnnnnnnnnnnnnnnnnnnnnnnnnnnnnnnnnnnnnnnnnnnnnnnnnnnnnnnnnnnnnnnnnnnnnnnnnnnnnnnnnnnnnnnnnnnnnnnnnnnnnnnnnnnnnnnnnnnnnnnnnnnnnnnnnnnnnnnnnnnnnnnnnnnnnnnnnnnnnnnnnnnnnnnnnnnnnnnnnnnnnnnnnnnnnnnnnnnnnnnnnnnnnnnnnnnnnnnnnnnnnnnnnnnnnnnnnnnnnnnnnnnnnnnnnnnnnnnnnnnnnnnnnnnnnnnnnnnnnnnnnnnnnnnnnnnnnnnnnnnnnnnnnnnnnnnnnnnnnnnnnnnnnnnnnnnnnnnnnnnnnnnnnnnnnnnnnnnnnnnnnnnnnnnnnnnnnnnnnnnnnnnnnnnnnnnnnnnnnnnnnnnnnnnnnnnnnnnnnnnnnnnnnnnnnnnnnnnnnnnnnnnnnnnnnnnnnnnnnnnnnnnnnnnnnnnnnnnnnnnnnnnnnnnnnnnnnnnnnnnnnnnnnnnnnnnnnnnnnnnnnnnnnnnnnnnnnnnnnnnnnnnnnnnnnnnnnnnnnnnnnnnnnnnnnnnnnnnnnnnnnnnnnnnnnnnnnnnnnnnnnnnnnnnnnnnnnnnnnnnnnnnnnnnnnnnnnnnnnnnnnnnnnnnnnnnnnnnnnnnnnnnnnnnnnnnnnnnnnnnnnnnnnnnnnnnnnnnnnnnnnnnnnnnnnnnnnnnnnnnnnnnnnnnnnnnnnnnnnnnnnnnnnnnnnnnnnnnnnnnnnnnnnnnnnnnnnnnnnnnnnnnnnnnnnnnnnnnnnnnnnnnnnnnnnnnnnnnnnnnnnnnnnnnnnnnnnnnnnnnnnnnnnnnnnnnnnnnnnnnnnnnnnnnnnnnnnnnnnnnnnnnnnnnnnnnnnnnnnnnnnnnnnnnnnnnnnnnnnnnnnnnnnnnnnnnnnnnnnnnnnnnnnnnnnnnnnnnnnnnnnnnnnnnnnnnnnnnnnnnnnnnnnnnnnnnnnnnnnnnnnnnnnnnnnnnnnnnnnnnnnnnnnnnnnnnnnnnnnnnnnnnnnnnnnnnnnnnnnnnnnnnnnnnnnnnnnnnnnnnnnnnnnnnnnnnnnnnnnnnnnnnnnnnnnnnnnnnnnnnnnnnnnnnnnnnnnnnnnnnnnnnnnnnnnnnnnnnnnnnnnnnnnnnnnnnnnnnnnnnnnnnnnnnnnnnnnnnnnnnnnnnnnnnnnnnnnnnnnnnnnnnnnnnnnnnnnnnnnnnnnnnnnnnnnnnnnnnnnnnnnnnnnnnnnnnnnnnnnnnnnnnnnnnnnnnnnnnnnnnnnnnnnnnnnnnnnnnnnnnnnnnnnnnnnnnnnnnnnnnnnnnnnnnnnnnnnnnnnnnnnnnnnnnnnnnnnnnnnnnnnnnnnnnnnnnnnnnnnnnnnnnnnnnnnnnnnnnnnnnnnnnnnnnnnnnnnnnnnnnnnnnnnnnnnnnnnnnnnnnnnnnnnnnnnnnnnnnnnnnnnnnnnnnnnnnnnnnnnnnnnnnnnnnnnnnnnnnnnnnnnnnnnnnnnnnnnnnnnnnnnnnnnnnnnnnnnnnnnnnnnnnnnnnnnnnnnnnnnnnnnnnnnnnnnnnnnnnnnnnnnnnnnnnnnnnnnnnnnnnnnnnnnnnnnnnnnnnnnnnnnnnnnnnnnnnnnnnnnnnnnnnnnnnnnnnnnnnnnnnnnnnnnnnnnnnnnnnnnnnnnnnnnnnnnnnnnnnnnnnnnnnnnnnnnnnnnnnnnnnnnnnnnnnnnnnnnnnnnnnnnnnnnnnnnnnnnnnnnnnnnnnnnnnnnnnnnnnnnnnnnnnnnnnnnnnnnnnnnnnnnnnnnnnnnnnnnnnnnnnnnnnnnnnnnnnnnnnnnnnnnnnnnnnnnnnnnnnnnnnnnnnnnnnnnnnnnnnnnnnnnnnnnnnnnnnnnnnnnnnnnnnnnnnnnnnnnnnnnnnnnnnnnnnnnnnnnnnnnnnnnnnnnnnnnnnnnnnnnnnnnnnnnnnnnnnnnnnnnnnnnnnnnnnnnnnnnnnnnnnnnnnnnnnnnnnnnnnnnnnnnnnnnnnnnnnnnnnnnnnnnnnnnnnnnnnnnnnnnnnnnnnnnnnnnnnnnnnnnnnnnnnnnnnnnnnnnnnnnnnnnnnnnnnnnnnnnnnnnnnnnnnnnnnnnnnnnnnnnnnnnnnnnnnnnnnnnnnnnnnnnnnnnnnnnnnnnnnnnnnnnnnnnnnnnnnnnnnnnnnnnnnnnnnnnnnnnnnnnnnnnnnnnnnnnnnnnnnnnnnnnnnnnnnnnnnnnnnnnnnnnnnnnnnnnnnnnnnnnnnnnnnnnnnnnnnnnnnnnnnnnnnnnnnnnnnnnnnnnnnnnnnnnnnnnnnnnnnnnnnnnnnnnnnnnnnnnnnnnnnnnnnnnnnnnnnnnnnnnnnnnnnnnnnnnnnnnnnnnnnnnnnnnnnnnnnnnnnnnnnnnnnnnnnnnnnnnnnnnnnnnnnnnnnnnnnnnnnnnnnnnnnnnnnnnnnnnnnnnnnnnnnnnnnnnnnnnnnnnnnnnnnnnnnnnnnnnnnnnnnnnnnnnnnnnnnnnnnnnnnnnnnnnnnnnnnnnnnnnnnnnnnnnnnnnnnnnnnnnnnnnnnnnnnnnnnnnnnnnnnnnnnnnnnnnnnnnnnnnnnnnnnnnnnnnnnnnnnnnnnnnnnnnnnnnnnnnnnnnnnnnnnnnnnnnnnnnnnnnnnnnnnnnnnnnnnnnnnnnnnnnnnnnnnnnnnnnnnnnnnnnnnnnnnnnnnnnnnnnnnnnnnnnnnnnnnnnnnnnnnnnnnnnnnnnnnnnnnnnnnnnnnnnnnnnnnnnnnnnnnnnnnnnnnnnnnnnnnnnnnnnnnnnnnnnnnnnnnnnnnnnnnnnnnnnnnnnnnnnnnnnnnnnnnnnnnnnnnnnnnnnnnnnnnnnnnnnnnnnnnnnnnnnnnnnnnnnnnnnnnnnnnnnnnnnnnnnnnnnnnnnnnnnnnnnnnnnnnnnnnnnnnnnnnnnnnnnnnnnnnnnnnnnnnnnnnnnnnnnnnnnnnnnnnnnnnnnnnnnnnnnnnnnnnnnnnnnnnnnnnnnnnnnnnnnnnnnnnnnnnnnnnnnnnnnnnnnnnnnnnnnnnnnnnnnnnnnnnnnnnnnnnnnnnnnnnnnnnnnnnnnnnnnnnnnnnnnnnnnnnnnnnnnnnnnnnnnnnnnnnnnnnnnnnnnnnnnnnnnnnnnnnnnnnnnnnnnnnnnnnnnnnnnnnnnnnnnnnnnnnnnnnnnnnnnnnnnnnnnnnnnnnnnnnnnnnnnnnnnnnnnnnnnnnnnnnnnnnnnnnnnnnnnnnnnnnnnnnnnnnnnnnnnnnnnnnnnnnnnnnnnnnnnnnnnnnnnnnnnnnnnnnnnnnnnnnnnnnnnnnnnnnnnnnnnnnnnnnnnnnnnnnnnnnnnnnnnnnnnnnnnnnnnnnnnnnnnnnnnnnnnnnnnnnnnnnnnnnnnnnnnnnnnnnnnnnnnnnnnnnnnnnnnnnnnnnnnnnnnnnnnnnnnnnnnnnnnnnnnnnnnnnnnnnnnnnnnnnnnnnnnnnnnnnnnnnnnnnnnnnnnnnnnnnnnnnnnnnnnnnnnnnnnnnnnnnnnnnnnnnnnnnnnnnnnnnnnnnnnnnnnnnnnnnnnnnnnnnnnnnnnnnnnnnnnnnnnnnnnnnnnnnnnnnnnnnnnnnnnnnnnnnnnnnnnnnnnnnnnnnnnnnnnnnnnnnnnnnnnnnnnnnnnnnnnnnnnnnnnnnnnnnnnnnnnnnnnnnnnnnnnnnnnnnnnnnnnnnnnnnnnnnnnnnnnnnnnnnnnnnnnnnnnnnnnnnnnnnnnnnnnnnnnnnnnnnnnnnnnnnnnnnnnnnnnnnnnnnnnnnnnnnnnnnnnnnnnnnnnnnnnnnnnnnnnnnnnnnnnnnnnnnnnnnnnnnnnnnnnnnnnnnnnnnnnnnnnnnnnnnnnnnnnnnnnnnnnnnnnnnnnnnnnnnnnnnnnnnnnnnnnnnnnnnnnnnnnnnnnnnnnnnnnnnnnnnnnnnnnnnnnnnnnnnnnnnnnnnnnnnnnnnnnnnnnnnnnnnnnnnnnnnnnnnnnnnnnnnnnnnnnnnnnnnnnnnnnnnnnnnnnnnnnnnnnnnnnnnnnnnnnnnnnnnnnnnnnnnnnnnnnnnnnnnnnnnnnnnnnnnnnnnnnnnnnnnnnnnnnnnnnnnnnnnnnnnnnnnnnnnnnnnnnnnnnnnnnnnnnnnnnnnnnnnnnnnnnnnnnnnnnnnnnnnnnnnnnnnnnnnnnnnnnnnnnnnnnnnnnnnnnnnnnnnnnnnnnnnnnnnnnnnnnnnnnnnnnnnnnnnnnnnnnnnnnnnnnnnnnnnnnnnnnnnnnnnnnnnnnnnnnnnnnnnnnnnnnnnnnnnnnnnnnnnnnnnnnnnnnnnnnnnnnnnnnnnnnnnnnnnnnnnnnnnnnnnnnnnnnnnnnnnnnnnnnnnnnnnnnnnnnnnnnnnnnnnnnnnnnnnnnnnnnnnnnnnnnnnnnnnnnnnnnnnnnnnnnnnnnnnnnnnnnnnnnnnnnnnnnnnnnnnnnnnnnnnnnnnnnnnnnnnnnnnnnnnnnnnnnnnnnnnnnnnnnnnnnnnnnnnnnnnnnnnnnnnnnnnnnnnnnnnnnnnnnnnnnnnnnnnnnnnnnnnnnnnnnnnnnnnnnnnnnnnnnnnnnnnnnnnnnnnnnnnnnnnnnnnnnnnnnnnnnnnnnnnnnnnnnnnnnnnnnnnnnnnnnnnnnnnnnnnnnnnnnnnnnnnnnnnnnnnnnnnnnnnnnnnnnnnnnnnnnnnnnnnnnnnnnnnnnnnnnnnnnnnnnnnnnnnnnnnnnnnnnnnnnnnnnnnnnnnnnnnnnnnnnnnnnnnnnnnnnnnnnnnnnnnnnnnnnnnnnnnnnnnnnnnnnnnnnnnnnnnnnnnnnnnnnnnnnnnnnnnnnnnnnnnnnnnnnnnnnnnnnnnnnnnnnnnnnnnnnnnnnnnnnnnnnnnnnnnnnnnnnnnnnnnnnnnnnnnnnnnnnnnnnnnnnnnnnnnnnnnnnnnnnnnnnnnnnnnnnnnnnnnnnnnnnnnnnnnnnnnnnnnnnnnnnnnnnnnnnnnnnnnnnnnnnnnnnnnnnnnnnnnnnnnnnnnnnnnnnnnnnnnnnnnnnnnnnnnnnnnnnnnnnnnnnnnnnnnnnnnnnnnnnnnnnnnnnnnnnnnnnnnnnnnnnnnnnnnnnnnnnnnnnnnnnnnnnnnnnnnnnnnnnnnnnnnnnnnnnnnnnnnnnnnnnnnnnnnnnnnnnnnnnnnnnnnnnnnnnnnnnnnnnnnnnnnnnnnnnnnnnnnnnnnnnnnnnnnnnnnnnnnnnnnnnnnnnnnnnnnnnnnnnnnnnnnnnnnnnnnnnnnnnnnnnnnnnnnnnnnnnnnnnnnnnnnnnnnnnnnnnnnnnnnnnnnnnnnnnnnnnnnnnnnnnnnnnnnnnnnnnnnnnnnnnnnnnnnnnnnnnnnnnnnnnnnnnnnnnnnnnnnnnnnnnnnnnnnnnnnnnnnnnnnnnnnnnnnnnnnnnnnnnnnnnnnnnnnnnnnnnnnnnnnnnnnnnnnnnnnnnnnnnnnnnnnnnnnnnnnnnnnnnnnnnnnnnnnnnnnnnnnnnnnnnnnnnnnnnnnnnnnnnnnnnnnnnnnnnnnnnnnnnnnnnnnnnnnnnnnnnnnnnnnnnnnnnnnnnnnnnnnnnnnnnnnnnnnnnnnnnnnnnnnnnnnnnnnnnnnnnnnnnnnnnnnnnnnnnnnnnnnnnnnnnnnnnnnnnnnnnnnnnnnnnnnnnnnnnnnnnnnnnnnnnnnnnnnnnnnnnnnnnnnnnnnnnnnnnnnnnnnnnnnnnnnnnnnnnnnnnnnnnnnnnnnnnnnnnnnnnnnnnnnnnnnnnnnnnnnnnnnnnnnnnnnnnnnnnnnnnnnnnnnnnnnnnnnnnnnnnnnnnnnnnnnnnnnnnnnnnnnnnnnnnnnnnnnnnnnnnnnnnnnnnnnnnnnnnnnnnnnnnnnnnnnnnnnnnnnnnnnnnnnnnnnnnnnnnnnnnnnnnnnnnnnnnnnnnnnnnnnnnnnnnnnnnnnnnnnnnnnnnnnnnnnnnnnnnnnnnnnnnnnnnnnnnnnnnnnnnnnnnnnnnnnnnnnnnnnnnnnnnnnnnnnnnnnnnnnnnnnnnnnnnnnnnnnnnnnnnnnnnnnnnnnnnnnnnnnnnnnnnnnnnnnnnnnnnnnnnnnnnnnnnnnnnnnnnnnnnnnnnnnnnnnnnnnnnnnnnnnnnnnnnnnnnnnnnnnnnnnnnnnnnnnnnnnnnnnnnnnnnnnnnnnnnnnnnnnnnnnnnnnnnnnnnnnnnnnnnnnnnnnnnnnnnnnnnnnnnnnnnnnnnnnnnnnnnnnnnnnnnnnnnnnnnnnnnnnnnnnnnnnnnnnnnnnnnnnnnnnnnnnnnnnnnnnnnnnnnnnnnnnnnnnnnnnnnnnnnnnnnnnnnnnnnnnnnnnnnnnnnnnnnnnnnnnnnnnnnnnnnnnnnnnnnnnnnnnnnnnnnnnnnnnnnnnnnnnnnnnnnnnnnnnnnnnnnnnnnnnnnnnnnnnnnnnnnnnnnnnnnnnnnnnnnnnnnnnnnnnnnnnnnnnnnnnnnnnnnnnnnnnnnnnnnnnnnnnnnnnnnnnnnnnnnnnnnnnnnnnnnnnnnnnnnnnnnnnnnnnnnnnnnnnnnnnnnnnnnnnnnnnnnnnnnnnnnnnnnnnnnnnnnnnnnnnnnnnnnnnnnnnnnnnnnnnnnnnnnnnnnnnnnnnnnnnnnnnnnnnnnnnnnnnnnnnnnnnnnnnnnnnnnnnnnnnnnnnnnnnnnnnnnnnnnnnnnnnnnnnnnnnnnnnnnnnnnnnnnnnnnnnnnnnnnnnnnnnnnnnnnnnnnnnnnnnnnnnnnnnnnnnnnnnnnnnnnnnnnnnnnnnnnnnnnnnnnnnnnnnnnnnnnnnnnnnnnnnnnnnnnnnnnnnnnnnnnnnnnnnnnnnnnnnnnnnnnnnnnnnnnnnnnnnnnnnnnnnnnnnnnnnnnnnnnnnnnnnnnnnnnnnnnnnnnnnnnnnnnnnnnnnnnnnnnnnnnnnnnnnnnnnnnnnnnnnnnnnnnnnnnnnnnnnnnnnnnnnnnnnnnnnnnnnnnnnnnnnnnnnnnnnnnnnnnnnnnnnnnnnnnnnnnnnnnnnnnnnnnnnnnnnnnnnnnnnnnnnnnnnnnnnnnnnnnnnnnnnnnnnnnnnnnnnnnnnnnnnnnnnnnnnnnnnnnnnnnnnnnnnnnnnnnnnnnnnnnnnnnnnnnnnnnnnnnnnnnnnnnnnnnnnnnnnnnnnnnnnnnnnnnnnnnnnnnnnnnnnnnnnnnnnnnnnnnnnnnnnnnnnnnnnnnnnnnnnnnnnnnnnnnnnnnnnnnnnnnnnnnnnnnnnnnnnnnnnnnnnnnnnnnnnnnnnnnnnnnnnnnnnnnnnnnnnnnnnnnnnnnnnnnnnnnnnnnnnnnnnnnnnnnnnnnnnnnnnnnnnnnnnnnnnnnnnnnnnnnnnnnnnnnnnnnnnnnnnnnnnnnnnnnnnnnnnnnnnnnnnnnnnnnnnnnnnnnnnnnnnnnnnnnnnnnnnnnnnnnnnnnnnnnnnnnnnnnnnnnnnnnnnnnnnnnnnnnnnnnnnnnnnnnnnnnnnnnnnnnnnnnnnnnnnnnnnnnnnnnnnnnnnnnnnnnnnnnnnnnnnnnnnnnnnnnnnnnnnnnnnnnnnnnnnnnnnnnnnnnnnnnnnnnnnnnnnnnnnnnnnnnnnnnnnnnnnnnnnnnnnnnnnnnnnnnnnnnnnnnnnnnnnnnnnnnnnnnnnnnnnnnnnnnnnnnnnnnnnnnnnnnnnnnnnnnnnnnnnnnnnnnnnnnnnnnnnnnnnnnnnnnnnnnnnnnnnnnnnnnnnnnnnnnnnnnnnnnnnnnnnnnnnnnnnnnnnnnnnnnnnnnnnnnnnnnnnnnnnnnnnnnnnnnnnnnnnnnnnnnnnnnnnnnnnnnnnnnnnnnnnnnnnnnnnnnnnnnnnnnnnnnnnnnnnnnnnnnnnnnnnnnnnnnnnnnnnnnnnnnnnnnnnnnnnnnnnnnnnnnnnnnnnnnnnnnnnnnnnnnnnnnnnnnnnnnnnnnnnnnnnnnnnnnnnnnnnnnnnnnnnnnnnnnnnnnnnnnnnnnnnnnnnnnnnnnnnnnnnnnnnnnnnnnnnnnnnnnnnnnnnnnnnnnnnnnnnnnnnnnnnnnnnnnnnnnnnnnnnnnnnnnnnnnnnnnnnnnnnnnnnnnnnnnnnnnnnnnnnnnnnnnnnnnnnnnnnnnnnnnnnnnnnnnnnnnnnnnnnnnnnnnnnnnnnnnnnnnnnnnnnnnnnnnnnnnnnnnnnnnnnnnnnnnnnnnnnnnnnnnnnnnnnnnnnnnnnnnnnnnnnnnnnnnnnnnnnnnnnnnnnnnnnnnnnnnnnnnnnnnnnnnnnnnnnnnnnnnnnnnnnnnnnnnnnnnnnnnnnnnnnnnnnnnnnnnnnnnnnnnnnnnnnnnnnnnnnnnnnnnnnnnnnnnnnnnnnnnnnnnnnnnnnnnnnnnnnnnnnnnnnnnnnnnnnnnnnnnnnnnnnnnnnnnnnnnnnnnnnnnnnnnnnnnnnnnnnnnnnnnnnnnnnnnnnnnnnnnnnnnnnnnnnnnnnnnnnnnnnnnnnnnnnnnnnnnnnnnnnnnnnnnnnnnnnnnnnnnnnnnnnnnnnnnnnnnnnnnnnnnnnnnnnnnnnnnnnnnnnnnnnnnnnnnnnnnnnnnnnnnnnnnnnnnnnnnnnnnnnnnnnnnnnnnnnnnnnnnnnnnnnnnnnnnnnnnnnnnnnnnnnnnnnnnnnnnnnnnnnnnnnnnnnnnnnnnnnnnnnnnnnnnnnnnnnnnnnnnnnnnnnnnnnnnnnnnnnnnnnnnnnnnnnnnnnnnnnnnnnnnnnnnnnnnnnnnnnnnnnnnnnnnnnnnnnnnnnnnnnnnnnnnnnnnnnnnnnnnnnnnnnnnnnnnnnnnnnnnnnnnnnnnnnnnnnnnnnnnnnnnnnnnnnnnnnnnnnnnnnnnnnnnnnnnnnnnnnnnnnnnnnnnnnnnnnnnnnnnnnnnnnnnnnnnnnnnnnnnnnnnnnnnnnnnnnnnnnnnnnnnnnnnnnnnnnnnnnnnnnnnnnnnnnnnnnnnnnnnnnnnnnnnnnnnnnnnnnnnnnnnnnnnnnnnnnnnnnnnnnnnnnnnnnnnnnnnnnnnnnnnnnnnnnnnnnnnnnnnnnnnnnnnnnnnnnnnnnnnnnnnnnnnnnnnnnnnnnnnnnnnnnnnnnnnnnnnnnnnnnnnnnnnnnnnnnnnnnnnnnnnnnnnnnnnnnnnnnnnnnnnnnnnnnnnnnnnnnnnnnnnnnnnnnnnnnnnnnnnnnnnnnnnnnnnnnnnnnnnnnnnnnnnnnnnnnnnnnnnnnnnnnnnnnnnnnnnnnnnnnnnnnnnnnnnnnnnnnnnnnnnnnnnnnnnnnnnnnnnnnnnnnnnnnnnnnnnnnnnnnnnnnnnnnnnnnnnnnnnnnnnnnnnnnnnnnnnnnnnnnnnnnnnnnnnnnnnnnnnnnnnnnnnnnnnnnnnnnnnnnnnnnnnnnnnnnnnnnnnnnnnnnnnnnnnnnnnnnnnnnnnnnnnnnnnnnnnnnnnnnnnnnnnnnnnnnnnnnnnnnnnnnnnnnnnnnnnnnnnnnnnnnnnnnnnnnnnnnnnnnnnnnnnnnnnnnnnnnnnnnnnnnnnnnnnnnnnnnnnnnnnnnnnnnnnnnnnnnnnnnnnnnnnnnnnnnnnnnnnnnnnnnnnnnnnnnnnnnnnnnnnnnnnnnnnnnnnnnnnnnnnnnnnnnnnnnnnnnnnnnnnnnnnnnnnnnnnnnnnnnnnnnnnnnnnnnnnnnnnnnnnnnnnnnnnnnnnnnnnnnnnnnnnnnnnnnnnnnnnnnnnnnnnnnnnnnnnnnnnnnnnnnnnnnnnnnnnnnnnnnnnnnnnnnnnnnnnnnnnnnnnnnnnnnnnnnnnnnnnnnnnnnnnnnnnnnnnnnnnnnnnnnnnnnnnnnnnnnnnnnnnnnnnnnnnnnnnnnnnnnnnnnnnnnnnnnnnnnnnnnnnnnnnnnnnnnnnnnnnnnnnnnnnnnnnnnnnnnnnnnnnnnnnnnnnnnnnnnnnnnnnnnnnnnnnnnnnnnnnnnnnnnnnnnnnnnnnnnnnnnnnnnnnnnnnnnnnnnnnnnnnnnnnnnnnnnnnnnnnnnnnnnnnnnnnnnnnnnnnnnnnnnnnnnnnnnnnnnnnnnnnnnnnnnnnnnnnnnnnnnnnnnnnnnnnnnnnnnnnnnnnnnnnnnnnnnnnnnnnnnnnnnnnnnnnnnnnnnnnnnnnnnnnnnnnnnnnnnnnnnnnnnnnnnnnnnnnnnnnnnnnnnnnnnnnnnnnnnnnnnnnnnnnnnnnnnnnnnnnnnnnnnnnnnnnnnnnnnnnnnnnnnnnnnnnnnnnnnnnnnnnnnnnnnnnnnnnnnnnnnnnnnnnnnnnnnnnnnnnnnnnnnnnnnnnnnnnnnnnnnnnnnnnnnnnnnnnnnnnnnnnnnnnnnnnnnnnnnnnnnnnnnnnnnnnnnnnnnnnnnnnnnnnnnnnnnnnnnnnnnnnnnnnnnnnnnnnnnnnnnnnnnnnnnnnnnnnnnnnnnnnnnnnnnnnnnnnnnnnnnnnnnnnnnnnnnnnnnnnnnnnnnnnnnnnnnnnnnnnnnnnnnnnnnnnnnnnnnnnnnnnnnnnnnnnnnnnnnnnnnnnnnnnnnnnnnnnnnnnnnnnnnnnnnnnnnnnnnnnnnnnnnnnnnnnnnnnnnnnnnnnnnnnnnnnnnnnnnnnnnnnnnnnnnnnnnnnnnnnnnnnnnnnnnnnnnnnnnnnnnnnnnnnnnnnnnnnnnnnnnnnnnnnnnnnnnnnnnnnnnnnnnnnnnnnnnnnnnnnnnnnnnnnnnnnnnnnnnnnnnnnnnnnnnnnnnnnnnnnnnnnnnnnnnnnnnnnnnnnnnnnnnnnnnnnnnnnnnnnnnnnnnnnnnnnnnnnnnnnnnnnnnnnnnnnnnnnnnnnnnnnnnnnnnnnnnnnnnnnnnnnnnnnnnnnnnnnnnnnnnnnnnnnnnnnnnnnnnnnnnnnnnnnnnnnnnnnnnnnnnnnnnnnnnnnnnnnnnnnnnnnnnnnnnnnnnnnnnnnnnnnnnnnnnnnnnnnnnnnnnnnnnnnnnnnnnnnnnnnnnnnnnnnnnnnnnnnnnnnnnnnnnnnnnnnnnnnnnnnnnnnnnnnnnnnnnnnnnnnnnnnnnnnnnnnnnnnnnnnnnnnnnnnnnnnnnnnnnnnnnnnnnnnnnnnnnnnnnnnnnnnnnnnnnnnnnnnnnnnnnnnnnnnnnnnnnnnnnnnnnnnnnnnnnnnnnnnnnnnnnnnnnnnnnnnnnnnnnnnnnnnnnnnnnnnnnnnnnnnnnnnnnnnnnnnnnnnnnnnnnnnnnnnnnnnnnnnnnnnnnnnnnnnnnnnnnnnnnnnnnnnnnnnnnnnnnnnnnnnnnnnnnnnnnnnnnnnnnnnnnnnnnnnnnnnnnnnnnnnnnnnnnnnnnnnnnnnnnnnnnnnnnnnnnnnnnnnnnnnnnnnnnnnnnnnnnnnnnnnnnnnnnnnnnnnnnnnnnnnnnnnnnnnnnnnnnnnnnnnnnnnnnnnnnnnnnnnnnnnnnnnnnnnnnnnnnnnnnnnnnnnnnnnnnnnnnnnnnnnnnnnnnnnnnnnnnnnnnnnnnnnnnnnnnnnnnnnnnnnnnnnnnnnnnnnnnnnnnnnnnnnnnnnnnnnnnnnnnnnnnnnnnnnnnnnnnnnnnnnnnnnnnnnnnnnnnnnnnnnnnnnnnnnnnnnnnnnnnnnnnnnnnnnnnnnnnnnnnnnnnnnnnnnnnnnnnnnnnnnnnnnnnnnnnnnnnnnnnnnnnnnnnnnnnnnnnnnnnnnnnnnnnnnnnnnnnnnnnnnnnnnnnnnnnnnnnnnnnnnnnnnnnnnnnnnnnnnnnnnnnnnnnnnnnnnnnnnnnnnnnnnnnnnnnnnnnnnnnnnnnnnnnnnnnnnnnnnnnnnnnnnnnnnnnnnnnnnnnnnnnnnnnnnnnnnnnnnnnnnnnnnnnnnnnnnnnnnnnnnnnnnnnnnnnnnnnnnnnnnnnnnnnnnnnnnnnnnnnnnnnnnnnnnnnnnnnnnnnnnnnnnnnnnnnnnnnnnnnnnnnnnnnnnnnnnnnnnnnnnnnnnnnnnnnnnnnnnnnnnnnnnnnnnnnnnnnnnnnnnnnnnnnnnnnnnnnnnnnnnnnnnnnnnnnnnnnnnnnnnnnnnnnnnnnnnnnnnnnnnnnnnnnnnnnnnnnnnnnnnnnnnnnnnnnnnnnnnnnnnnnnnnnnnnnnnnnnnnnnnnnnnnnnnnnnnnnnnnnnnnnnnnnnnnnnnnnnnnnnnnnnnnnnnnnnnnnnnnnnnnnnnnnnnnnnnnnnnnnnnnnnnnnnnnnnnnnnnnnnnnnnnnnnnnnnnnnnnnnnnnnnnnnnnnnnnnnnnnnnnnnnnnnnnnnnnnnnnnnnnnnnnnnnnnnnnnnnnnnnnnnnnnnnnnnnnnnnnnnnnnnnnnnnnnnnnnnnnnnnnnnnnnnnnnnnnnnnnnnnnnnnnnnnnnnnnnnnnnnnnnnnnnnnnnnnnnnnnnnnnnnnnnnnnnnnnnnnnnnnnnnnnnnnnnnnnnnnnnnnnnnnnnnnnnnnnnnnnnnnnnnnnnnnnnnnnnnnnnnnnnnnnnnnnnnnnnnnnnnnnnnnnnnnnnnnnnnnnnnnnnnnnnnnnnnnnnnnnnnnnnnnnnnnnnnnnnnnnnnnnnnnnnnnnnnnnnnnnnnnnnnnnnnnnnnnnnnnnnnnnnnnnnnnnnnnnnnnnnnnnnnnnnnnnnnnnnnnnnnnnnnnnnnnnnnnnnnnnnnnnnnnnnnnnnnnnnnnnnnnnnnnnnnnnnnnnnnnnnnnnnnnnnnnnnnnnnnnnnnnnnnnnnnnnnnnnnnnnnnnnnnnnnnnnnnnnnnnnnnnnnnnnnnnnnnnnnnnnnnnnnnnnnnnnnnnnnnnnnnnnnnnnnnnnnnnnnnnnnnnnnnnnnnnnnnnnnnnnnnnnnnnnnnnnnnnnnnnnnnnnnnnnnnnnnnnnnnnnnnnnnnnnnnnnnnnnnnnnnnnnnnnnnnnnnnnnnnnnnnnnnnnnnnnnnnnnnnnnnnnnnnnnnnnnnnnnnnnnnnnnnnnnnnnnnnnnnnnnnnnnnnnnnnnnnnnnnnnnnnnnnnnnnnnnnnnnnnnnnnnnnnnnnnnnnnnnnnnnnnnnnnnnnnnnnnnnnnnnnnnnnnnnnnnnnnnnnnnnnnnnnnnnnnnnnnnnnnnnnnnnnnnnnnnnnnnnnnnnnnnnnnnnnnnnnnnnnnnnnnnnnnnnnnnnnnnnnnnnnnnnnnnnnnnnnnnnnnnnnnnnnnnnnnnnnnnnnnnnnnnnnnnnnnnnnnnnnnnnnnnnnnnnnnnnnnnnnnnnnnnnnnnnnnnnnnnnnnnnnnnnnnnnnnnnnnnnnnnnnnnnnnnnnnnnnnnnnnnnnnnnnnnnnnnnnnnnnnnnnnnnnnnnnnnnnnnnnnnnnnnnnnnnnnnnnnnnnnnnnnnnnnnnnnnnnnnnnnnnnnnnnnnnnnnnnnnnnnnnnnnnnnnnnnnnnnnnnnnnnnnnnnnnnnnnnnnnnnnnnnnnnnnnnnnnnnnnnnnnnnnnnnnnnnnnnnnnnnnnnnnnnnnnnnnnnnnnnnnnnnnnnnnnnnnnnnnnnnnnnnnnnnnnnnnnnnnnnnnnnnnnnnnnnnnnnnnnnnnnnnnnnnnnnnnnnnnnnnnnnnnnnnnnnnnnnnnnnnnnnnnnnnnnnnnnnnnnnnnnnnnnnnnnnnnnnnnnnnnnnnnnnnnnnnnnnnnnnnnnnnnnnnnnnnnnnnnnnnnnnnnnnnnnnnnnnnnnnnnnnnnnnnnnnnnnnnnnnnnnnnnnnnnnnnnnnnnnnnnnnnnnnnnnnnnnnnnnnnnnnnnnnnnnnnnnnnnnnnnnnnnnnnnnnnnnnnnnnnnnnnnnnnnnnnnnnnnnnnnnnnnnnnnnnnnnnnnnnnnnnnnnnnnnnnnnnnnnnnnnnnnnnnnnnnnnnnnnnnnnnnnnnnnnnnnnnnnnnnnnnnnnnnnnnnnnnnnnnnnnnnnnnnnnnnnnnnnnnnnnnnnnnnnnnnnnnnnnnnnnnnnnnnnnnnnnnnnnnnnnnnnnnnnnnnnnnnnnnnnnnnnnnnnnnnnnnnnnnnnnnnnnnnnnnnnnnnnnnnnnnnnnnnnnnnnnnnnnnnnnnnnnnnnnnnnnnnnnnnnnnnnnnnnnnnnnnnnnnnnnnnnnnnnnnnnnnnnnnnnnnnnnnnnnnnnnnnnnnnnnnnnnnnnnnnnnnnnnnnnnnnnnnnnnnnnnnnnnnnnnnnnnnnnnnnnnnnnnnnnnnnnnnnnnnnnnnnnnnnnnnnnnnnnnnnnnnnnnnnnnnnnnnnnnnnnnnnnnnnnnnnnnnnnnnnnnnnnnnnnnnnnnnnnnnnnnnnnnnnnnnnnnnnnnnnnnnnnnnnnnnnnnnnnnnnnnnnnnnnnnnnnnnnnnnnnnnnnnnnnnnnnnnnnnnnnnnnnnnnnnnnnnnnnnnnnnnnnnnnnnnnnnnnnnnnnnnnnnnnnnnnnnnnnnnnnnnnnnnnnnnnnnnnnnnnnnnnnnnnnnnnnnnnnnnnnnnnnnnnnnnnnnnnnnnnnnnnnnnnnnnnnnnnnnnnnnnnnnnnnnnnnnnnnnnnnnnnnnnnnnnnnnnnnnnnnnnnnnnnnnnnnnnnnnnnnnnnnnnnnnnnnnnnnnnnnnnnnnnnnnnnnnnnnnnnnnnnnnnnnnnnnnnnnnnnnnnnnnnnnnnnnnnnnnnnnnnnnnnnnnnnnnnnnnnnnnnnnnnnnnnnnnnnnnnnnnnnnnnnnnnnnnnnnnnnnnnnnnnnnnnnnnnnnnnnnnnnnnnnnnnnnnnnnnnnnnnnnnnnnnnnnnnnnnnnnnnnnnnnnnnnnnnnnnnnnnnnnnnnnnnnnnnnnnnnnnnnnnnnnnnnnnnnnnnnnnnnnnnnnnnnnnnnnnnnnnnnnnnnnnnnnnnnnnnnnnnnnnnnnnnnnnnnnnnnnnnnnnnnnnnnnnnnnnnnnnnnnnnnnnnnnnnnnnnnnnnnnnnnnnnnnnnnnnnnnnnnnnnnnnnnnnnnnnnnnnnnnnnnnnnnnnnnnnnnnnnnnnnnnnnnnnnnnnnnnnnnnnnnnnnnnnnnnnnnnnnnnnnnnnnnnnnnnnnnnnnnnnnnnnnnnnnnnnnnnnnnnnnnnnnnnnnnnnnnnnnnnnnnnnnnnnnnnnnnnnnnnnnnnnnnnnnnnnnnnnnnnnnnnnnnnnnnnnnnnnnnnnnnnnnnnnnnnnnnnnnnnnnnnnnnnnnnnnnnnnnnnnnnnnnnnnnnnnnnnnnnnnnnnnnnnnnnnnnnnnnnnnnnnnnnnnnnnnnnnnnnnnnnnnnnnnnnnnnnnnnnnnnnnnnnnnnnnnnnnnnnnnnnnnnnnnnnnnnnnnnnnnnnnnnnnnnnnnnnnnnnnnnnnnnnnnnnnnnnnnnnnnnnnnnnnnnnnnnnnnnnnnnnnnnnnnnnnnnnnnnnnnnnnnnnnnnnnnnnnnnnnnnnnnnnnnnnnnnnnnnnnnnnnnnnnnnnnnnnnnnnnnnnnnnnnnnnnnnnnnnnnnnnnnnnnnnnnnnnnnnnnnnnnnnnnnnnnnnnnnnnnnnnnnnnnnnnnnnnnnnnnnnnnnnnnnnnnnnnnnnnnnnnnnnnnnnnnnnnnnnnnnnnnnnnnnnnnnnnnnnnnnnnnnnnnnnnnnnnnnnnnnnnnnnnnnnnnnnnnnnnnnnnnnnnnnnnnnnnnnnnnnnnnnnnnnnnnnnnnnnnnnnnnnnnnnnnnnnnnnnnnnnnnnnnnnnnnnnnnnnnnnnnnnnnnnnnnnnnnnnnnnnnnnnnnnnnnnnnnnnnnnnnnnnnnnnnnnnnnnnnnnnnnnnnnnnnnnnnnnnnnnnnnnnnnnnnnnnnnnnnnnnnnnnnnnnnnnnnnnnnnnnnnnnnnnnnnnnnnnnnnnnnnnnnnnnnnnnnnnnnnnnnnnnnnnnnnnnnnnnnnnnnnnnnnnnnnnnnnnnnnnnnnnnnnnnnnnnnnnnnnnnnnnnnnnnnnnnnnnnnnnnnnnnnnnnnnnnnnnnnnnnnnnnnnnnnnnnnnnnnnnnnnnnnnnnnnnnnnnnnnnnnnnnnnnnnnnnnnnnnnnnnnnnnnnnnnnnnnnnnnnnnnnnnnnnnnnnnnnnnnnnnnnnnnnnnnnnnnnnnnnnnnnnnnnnnnnnnnnnnnnnnnnnnnnnnnnnnnnnnnnnnnnnnnnnnnnnnnnnnnnnnnnnnnnnnnnnnnnnnnnnnnnnnnnnnnnnnnnnnnnnnnnnnnnnnnnnnnnnnnnnnnnnnnnnnnnnnnnnnnnnnnnnnnnnnnnnnnnnnnnnnnnnnnnnnnnnnnnnnnnnnnnnnnnnnnnnnnnnnnnnnnnnnnnnnnnnnnnnnnnnnnnnnnnnnnnnnnnnnnnnnnnnnnnnnnnnnnnnnnnnnnnnnnnnnnnnnnnnnnnnnnnnnnnnnnnnnnnnnnnnnnnnnnnnnnnnnnnnnnnnnnnnnnnnnnnnnnnnnnnnnnnnnnnnnnnnnnnnnnnnnnnnnnnnnnnnnnnnnnnnnnnnnnnnnnnnnnnnnnnnnnnnnnnnnnnnnnnnnnnnnnnnnnnnnnnnnnnnnnnnnnnnnnnnnnnnnnnnnnnnnnnnnnnnnnnnnnnnnnnnnnnnnnnnnnnnnnnnnnnnnnnnnnnnnnnnnnnnnnnnnnnnnnnnnnnnnnnnnnnnnnnnnnnnnnnnnnnnnnnnnnnnnnnnnnnnnnnnnnnnnnnnnnnnnnnnnnnnnnnnnnnnnnnnnnnnnnnnnnnnnnnnnnnnnnnnnnnnnnnnnnnnnnnnnnnnnnnnnnnnnnnnnnnnnnnnnnnnnnnnnnnnnnnnnnnnnnnnnnnnnnnnnnnnnnnnnnnnnnnnnnnnnnnnnnnnnnnnnnnnnnnnnnnnnnnnnnnnnnnnnnnnnnnnnnnnnnnnnnnnnnnnnnnnnnnnnnnnnnnnnnnnnnnnnnnnnnnnnnnnnnnnnnnnnnnnnnnnnnnnnnnnnnnnnnnnnnnnnnnnnnnnnnnnnnnnnnnnnnnnnnnnnnnnnnnnnnnnnnnnnnnnnnnnnnnnnnnnnnnnnnnnnnnnnnnnnnnnnnnnnnnnnnnnnnnnnnnnnnnnnnnnnnnnnnnnnnnnnnnnnnnnnnnnnnnnnnnnnnnnnnnnnnnnnnnnnnnnnnnnnnnnnnnnnnnnnnnnnnnnnnnnnnnnnnnnnnnnnnnnnnnnnnnnnnnnnnnnnnnnnnnnnnnnnnnnnnnnnnnnnnnnnnnnnnnnnnnnnnnnnnnnnnnnnnnnnnnnnnnnnnnnnnnnnnnnnnnnnnnnnnnnnnnnnnnnnnnnnnnnnnnnnnnnnnnnnnnnnnnnnnnnnnnnnnnnnnnnnnnnnnnnnnnnnnnnnnnnnnnnnnnnnnnnnnnnnnnnnnnnnnnnnnnnnnnnnnnnnnnnnnnnnnnnnnnnnnnnnnnnnnnnnnnnnnnnnnnnnnnnnnnnnnnnnnnnnnnnnnnnnnnnnnnnnnnnnnnnnnnnnnnnnnnnnnnnnnnnnnnnnnnnnnnnnnnnnnnnnnnnnnnnnnnnnnnnnnnnnnnnnnnnnnnnnnnnnnnnnnnnnnnnnnnnnnnnnnnnnnnnnnnnnnnnnnnnnnnnnnnnnnnnnnnnnnnnnnnnnnnnnnnnnnnnnnnnnnnnnnnnnnnnnnnnnnnnnnnnnnnnnnnnnnnnnnnnnnnnnnnnnnnnnnnnnnnnnnnnnnnnnnnnnnnnnnnnnnnnnnnnnnnnnnnnnnnnnnnnnnnnnnnnnnnnnnnnnnnnnnnnnnnnnnnnnnnnnnnnnnnnnnnnnnnnnnnnnnnnnnnnnnnnnnnnnnnnnnnnnnnnnnnnnnnnnnnnnnnnnnnnnnnnnnnnnnnnnnnnnnnnnnnnnnnnnnnnnnnnnnnnnnnnnnnnnnnnnnnnnnnnnnnnnnnnnnnnnnnnnnnnnnnnnnnnnnnnnnnnnnnnnnnnnnnnnnnnnnnnnnnnnnnnnnnnnnnnnnnnnnnnnnnnnnnnnnnnnnnnnnnnnnnnnnnnnnnnnnnnnnnnnnnnnnnnnnnnnnnnnnnnnnnnnnnnnnnnnnnnnnnnnnnnnnnnnnnnnnnnnnnnnnnnnnnnnnnnnnnnnnnnnnnnnnnnnnnnnnnnnnnnnnnnnnnnnnnnnnnnnnnnnnnnnnnnnnnnnnnnnnnnnnnnnnnnnnnnnnnnnnnnnnnnnnnnnnnnnnnnnnnnnnnnnnnnnnnnnnnnnnnnnnnnnnnnnnnnnnnnnnnnnnnnnnnnnnnnnnnnnnnnnnnnnnnnnnnnnnnnnnnnnnnnnnnnnnnnnnnnnnnnnnnnnnnnnnnnnnnnnnnnnnnnnnnnnnnnnnnnnnnnnnnnnnnnnnnnnnnnnnnnnnnnnnnnnnnnnnnnnnnnnnnnnnnnnnnnnnnnnnnnnnnnnnnnnnnnnnnnnnnnnnnnnnnnnnnnnnnnnnnnnnnnnnnnnnnnnnnnnnnnnnnnnnnnnnnnnnnnnnnnnnnnnnnnnnnnnnnnnnnnnnnnnnnnnnnnnnnnnnnnnnnnnnnnnnnnnnnnnnnnnnnnnnnnnnnnnnnnnnnnnnnnnnnnnnnnnnnnnnnnnnnnnnnnnnnnnnnnnnnnnnnnnnnnnnnnnnnnnnnnnnnnnnnnnnnnnnnnnnnnnnnnnnnnnnnnnnnnnnnnnnnnnnnnnnnnnnnnnnnnnnnnnnnnnnnnnnnnnnnnnnnnnnnnnnnnnnnnnnnnnnnnnnnnnnnnnnnnnnnnnnnnnnnnnnnnnnnnnnnnnnnnnnnnnnnnnnnnnnnnnnnnnnnnnnnnnnnnnnnnnnnnnnnnnnnnnnnnnnnnnnnnnnnnnnnnnnnnnnnnnnnnnnnnnnnnnnnnnnnnnnnnnnnnnnnnnnnnnnnnnnnnnnnnnnnnnnnnnnnnnnnnnnnnnnnnnnnnnnnnnnnnnnnnnnnnnnnnnnnnnnnnnnnnnnnnnnnnnnnnnnnnnnnnnnnnnnnnnnnnnnnnnnnnnnnnnnnnnnnnnnnnnnnnnnnnnnnnnnnnnnnnnnnnnnnnnnnnnnnnnnnnnnnnnnnnnnnnnnnnnnnnnnnnnnnnnnnnnnnnnnnnnnnnnnnnnnnnnnnnnnnnnnnnnnnnnnnnnnnnnnnnnnnnnnnnnnnnnnnnnnnnnnnnnnnnnnnnnnnnnnnnnnnnnnnnnnnnnnnnnnnnnnnnnnnnnnnnnnnnnnnnnnnnnnnnnnnnnnnnnnnnnnnnnnnnnnnnnnnnnnnnnnnnnnnnnnnnnnnnnnnnnnnnnnnnnnnnnnnnnnnnnnnnnnnnnnnnnnnnnnnnnnnnnnnnnnnnnnnnnnnnnnnnnnnnnnnnnnnnnnnnnnnnnnnnnnnnnnnnnnnnnnnnnnnnnnnnnnnnnnnnnnnnnnnnnnnnnnnnnnnnnnnnnnnnnnnnnnnnnnnnnnnnnnnnnnnnnnnnnnnnnnnnnnnnnnnnnnnnnnnnnnnnnnnnnnnnnnnnnnnnnnnnnnnnnnnnnnnnnnnnnnnnnnnnnnnnnnnnnnnnnnnnnnnnnnnnnnnnnnnnnnnnnnnnnnnnnnnnnnnnnnnnnnnnnnnnnnnnnnnnnnnnnnnnnnnnnnnnnnnnnnnnnnnnnnnnnnnnnnnnnnnnnnnnnnnnnnnnnnnnnnnnnnnnnnnnnnnnnnnnnnnnnnnnnnnnnnnnnnnnnnnnnnnnnnnnnnnnnnnnnnnnnnnnnnnnnnnnnnnnnnnnnnnnnnnnnnnnnnnnnnnnnnnnnnnnnnnnnnnnnnnnnnnnnnnnnnnnnnnnnnnnnnnnnnnnnnnnnnnnnnnnnnnnnnnnnnnnnnnnnnnnnnnnnnnnnnnnnnnnnnnnnnnnnnnnnnnnnnnnnnnnnnnnnnnnnnnnnnnnnnnnnnnnnnnnnnnnnnnnnnnnnnnnnnnnnnnnnnnnnnnnnnnnnnnnnnnnnnnnnnnnnnnnnnnnnnnnnnnnnnnnnnnnnnnnnnnnnnnnnnnnnnnnnnnnnnnnnnnnnnnnnnnnnnnnnnnnnnnnnnnnnnnnnnnnnnnnnnnnnnnnnnnnnnnnnnnnnnnnnnnnnnnnnnnnnnnnnnnnnnnnnnnnnnnnnnnnnnnnnnnnnnnnnnnnnnnnnnnnnnnnnnnnnnnnnnnnnnnnnnnnnnnnnnnnnnnnnnnnnnnnnnnnnnnnnnnnnnnnnnnnnnnnnnnnnnnnnnnnnnnnnnnnnnnnnnnnnnnnnnnnnnnnnnnnnnnnnnnnnnnnnnnnnnnnnnnnnnnnnnnnnnnnnnnnnnnnnnnnnnnnnnnnnnnnnnnnnnnnnnnnnnnnnnnnnnnnnnnnnnnnnnnnnnnnnnnnnnnnnnnnnnnnnnnnnnnnnnnnnnnnnnnnnnnnnnnnnnnnnnnnnnnnnnnnnnnnnnnnnnnnnnnnnnnnnnnnnnnnnnnnnnnnnnnnnnnnnnnnnnnnnnnnnnnnnnnnnnnnnnnnnnnnnnnnnnnnnnnnnnnnnnnnnnnnnnnnnnnnnnnnnnnnnnnnnnnnnnnnnnnnnnnnnnnnnnnnnnnnnnnnnnnnnnnnnnnnnnnnnnnnnnnnnnnnnnnnnnnnnnnnnnnnnnnnnnnnnnnnnnnnnnnnnnnnnnnnnnnnnnnnnnnnnnnnnnnnnnnnnnnnnnnnnnnnnnnnnnnnnnnnnnnnnnnnnnnnnnnnnnnnnnnnnnnnnnnnnnnnnnnnnnnnnnnnnnnnnnnnnnnnnnnnnnnnnnnnnnnnnnnnnnnnnnnnnnnnnnnnnnnnnnnnnnnnnnnnnnnnnnnnnnnnnnnnnnnnnnnnnnnnnnnnnnnnnnnnnnnnnnnnnnnnnnnnnnnnnnnnnnnnnnnnnnnnnnnnnnnnnnnnnnnnnnnnnnnnnnnnnnnnnnnnnnnnnnnnnnnnnnnnnnnnnnnnnnnnnnnnnnnnnnnnnnnnnnnnnnnnnnnnnnnnnnnnnnnnnnnnnnnnnnnnnnnnnnnnnnnnnnnnnnnnnnnnnnnnnnnnnnnnnnnnnnnnnnnnnnnnnnnnnnnnnnnnnnnnnnnnnnnnnnnnnnnnnnnnnnnnnnnnnnnnnnnnnnnnnnnnnnnnnnnnnnnnnnnnnnnnnnnnnnnnnnnnnnnnnnnnnnnnnnnnnnnnnnnnnnnnnnnnnnnnnnnnnnnnnnnnnnnnnnnnnnnnnnnnnnnnnnnnnnnnnnnnnnnnnnnnnnnnnnnnnnnnnnnnnnnnnnnnnnnnnnnnnnnnnnnnnnnnnnnnnnnnnnnnnnnnnnnnnnnnnnnnnnnnnnnnnnnnnnnnnnnnnnnnnnnnnnnnnnnnnnnnnnnnnnnnnnnnnnnnnnnnnnnnnnnnnnnnnnnnnnnnnnnnnnnnnnnnnnnnnnnnnnnnnnnnnnnnnnnnnnnnnnnnnnnnnnnnnnnnnnnnnnnnnnnnnnnnnnnnnnnnnnnnnnnnnnnnnnnnnnnnnnnnnnnnnnnnnnnnnnnnnnnnnnnnnnnnnnnnnnnnnnnnnnnnnnnnnnnnnnnnnnnnnnnnnnnnnnnnnnnnnnnnnnnnnnnnnnnnnnnnnnnnnnnnnnnnnnnnnnnnnnnnnnnnnnnnnnnnnnnnnnnnnnnnnnnnnnnnnnnnnnnnnnnnnnnnnnnnnnnnnnnnnnnnnnnnnnnnnnnnnnnnnnnnnnnnnnnnnnnnnnnnnnnnnnnnnnnnnnnnnnnnnnnnnnnnnnnnnnnnnnnnnnnnnnnnnnnnnnnnnnnnnnnnnnnnnnnnnnnnnnnnnnnnnnnnnnnnnnnnnnnnnnnnnnnnnnnnnnnnnnnnnnnnnnnnnnnnnnnnnnnnnnnnnnnnnnnnnnnnnnnnnnnnnnnnnnnnnnnnnnnnnnnnnnnnnnnnnnnnnnnnnnnnnnnnnnnnnnnnnnnnnnnnnnnnnnnnnnnnnnnnnnnnnnnnnnnnnnnnnnnnnnnnnnnnnnnnnnnnnnnnnnnnnnnnnnnnnnnnnnnnnnnnnnnnnnnnnnnnnnnnnnnnnnnnnnnnnnnnnnnnnnnnnnnnnnnnnnnnnnnnnnnnnnnnnnnnnnnnnnnnnnnnnnnnnnnnnnnnnnnnnnnnnnnnnnnnnnnnnnnnnnnnnnnnnnnnnnnnnnnnnnnnnnnnnnnnnnnnnnnnnnnnnnnnnnnnnnnnnnnnnnnnnnnnnnnnnnnnnnnnnnnnnnnnnnnnnnnnnnnnnnnnnnnnnnnnnnnnnnnnnnnnnnnnnnnnnnnnnnnnnnnnnnnnnnnnnnnnnnnnnnnnnnnnnnnnnnnnnnnnnnnnnnnnnnnnnnnnnnnnnnnnnnnnnnnnnnnnnnnnnnnnnnnnnnnnnnnnnnnnnnnnnnnnnnnnnnnnnnnnnnnnnnnnnnnnnnnnnnnnnnnnnnnnnnnnnnnnnnnnnnnnnnnnnnnnnnnnnnnnnnnnnnnnnnnnnnnnnnnnnnnnnnnnnnnnnnnnnnnnnnnnnnnnnnnnnnnnnnnnnnnnnnnnnnnnnnnnnnnnnnnnnnnnnnnnnnnnnnnnnnnnnnnnnnnnnnnnnnnnnnnnnnnnnnnnnnnnnnnnnnnnnnnnnnnnnnnnnnnnnnnnnnnnnnnnnnnnnnnnnnnnnnnnnnnnnnnnnnnnnnnnnnnnnnnnnnnnnnnnnnnnnnnnnnnnnnnnnnnnnnnnnnnnnnnnnnnnnnnnnnnnnnnnnnnnnnnnnnnnnnnnnnnnnnnnnnnnnnnnnnnnnnnnnnnnnnnnnnnnnnnnnnnnnnnnnnnnnnnnnnnnnnnnnnnnnnnnnnnnnnnnnnnnnnnnnnnnnnnnnnnnnnnnnnnnnnnnnnnnnnnnnnnnnnnnnnnnnnnnnnnnnnnnnnnnnnnnnnnnnnnnnnnnnnnnnnnnnnnnnnnnnnnnnnnnnnnnnnnnnnnnnnnnnnnnnnnnnnnnnnnnnnnnnnnnnnnnnnnnnnnnnnnnnnnnnnnnnnnnnnnnnnnnnnnnnnnnnnnnnnnnnnnnnnnnnnnnnnnnnnnnnnnnnnnnnnnnnnnnnnnnnnnnnnnnnnnnnnnnnnnnnnnnnnnnnnnnnnnnnnnnnnnnnnnnnnnnnnnnnnnnnnnnnnnnnnnnnnnnnnnnnnnnnnnnnnnnnnnnnnnnnnnnnnnnnnnnnnnnnnnnnnnnnnnnnnnnnnnnnnnnnnnnnnnnnnnnnnnnnnnnnnnnnnnnnnnnnnnnnnnnnnnnnnnnnnnnnnnnnnnnnnnnnnnnnnnnnnnnnnnnnnnnnnnnnnnnnnnnnnnnnnnnnnnnnnnnnnnnnnnnnnnnnnnnnnnnnnnnnnnnnnnnnnnnnnnnnnnnnnnnnnnnnnnnnnnnnnnnnnnnnnnnnnnnnnnnnnnnnnnnnnnnnnnnnnnnnnnnnnnnnnnnnnnnnnnnnnnnnnnnnnnnnnnnnnnnnnnnnnnnnnnnnnnnnnnnnnnnnnnnnnnnnnnnnnnnnnnnnnnnnnnnnnnnnnnnnnnnnnnnnnnnnnnnnnnnnnnnnnnnnnnnnnnnnnnnnnnnnnnnnnnnnnnnnnnnnnnnnnnnnnnnnnnnnnnnnnnnnnnnnnnnnnnnnnnnnnnnnnnnnnnnnnnnnnnnnnnnnnnnnnnnnnnnnnnnnnnnnnnnnnnnnnnnnnnnnnnnnnnnnnnnnnnnnnnnnnnnnnnnnnnnnnnnnnnnnnnnnnnnnnnnnnnnnnnnnnnnnnnnnnnnnnnnnnnnnnnnnnnnnnnnnnnnnnnnnnnnnnnnnnnnnnnnnnnnnnnnnnnnnnnnnnnnnnnnnnnnnnnnnnnnnnnnnnnnnnnnnnnnnnnnnnnnnnnnnnnnnnnnnnnnnnnnnnnnnnnnnnnnnnnnnnnnnnnnnnnnnnnnnnnnnnnnnnnnnnnnnnnnnnnnnnnnnnnnnnnnnnnnnnnnnnnnnnnnnnnnnnnnnnnnnnnnnnnnnnnnnnnnnnnnnnnnnnnnnnnnnnnnnnnnnnnnnnnnnnnnnnnnnnnnnnnnnnnnnnnnnnnnnnnnnnnnnnnnnnnnnnnnnnnnnnnnnnnnnnnnnnnnnnnnnnnnnnnnnnnnnnnnnnnnnnnnnnnnnnnnnnnnnnnnnnnnnnnnnnnnnnnnnnnnnnnnnnnnnnnnnnnnnnnnnnnnnnnnnnnnnnnnnnnnnnnnnnnnnnnnnnnnnnnnnnnnnnnnnnnnnnnnnnnnnnnnnnnnnnnnnnnnnnnnnnnnnnnnnnnnnnnnnnnnnnnnnnnnnnnnnnnnnnnnnnnnnnnnnnnnnnnnnnnnnnnnnnnnnnnnnnnnnnnnnnnnnnnnnnnnnnnnnnnnnnnnnnnnnnnnnnnnnnnnnnnnnnnnnnnnnnnnnnnnnnnnnnnnnnnnnnnnnnnnnnnnnnnnnnnnnnnnnnnnnnnnnnnnnnnnnnnnnnnnnnnnnnnnnnnnnnnnnnnnnnnnnnnnnnnnnnnnnnnnnnnnnnnnnnnnnnnnnnnnnnnnnnnnnnnnnnnnnnnnnnnnnnnnnnnnnnnnnnnnnnnnnnnnnnnnnnnnnnnnnnnnnnnnnnnnnnnnnnnnnnnnnnnnnnnnnnnnnnnnnnnnnnnnnnnnnnnnnnnnnnnnnnnnnnnnnnnnnnnnnnnnnnnnnnnnnnnnnnnnnnnnnnnnnnnnnnnnnnnnnnnnnnnnnnnnnnnnnnnnnnnnnnnnnnnnnnnnnnnnnnnnnnnnnnnnnnnnnnnnnnnnnnnnnnnnnnnnnnnnnnnnnnnnnnnnnnnnnnnnnnnnnnnnnnnnnnnnnnnnnnnnnnnnnnnnnnnnnnnnnnnnnnnnnnnnnnnnnnnnnnnnnnnnnnnnnnnnnnnnnnnnnnnnnnnnnnnnnnnnnnnnnnnnnnnnnnnnnnnnnnnnnnnnnnnnnnnnnnnnnnnnnnnnnnnnnnnnnnnnnnnnnnnnnnnnnnnnnnnnnnnnnnnnnnnnnnnnnnnnnnnnnnnnnnnnnnnnnnnnnnnnnnnnnnnnnnnnnnnnnnnnnnnnnnnnnnnnnnnnnnnnnnnnnnnnnnnnnnnnnnnnnnnnnnnnnnnnnnnnnnnnnnnnnnnnnnnnnnnnnnnnnnnnnnnnnnnnnnnnnnnnnnnnnnnnnnnnnnnnnnnnnnnnnnnnnnnnnnnnnnnnnnnnnnnnnnnnnnnnnnnnnnnnnnnnnnnnnnnnnnnnnnnnnnnnnnnnnnnnnnnnnnnnnnnnnnnnnnnnnnnnnnnnnnnnnnnnnnnnnnnnnnnnnnnnnnnnnnnnnnnnnnnnnnnnnnnnnnnnnnnnnnnnnnnnnnnnnnnnnnnnnnnnnnnnnnnnnnnnnnnnnnnnnnnnnnnnnnnnnnnnnnnnnnnnnnnnnnnnnnnnnnnnnnnnnnnnnnnnnnnnnnnnnnnnnnnnnnnnnnnnnnnnnnnnnnnnnnnnnnnnnnnnnnnnnnnnnnnnnnnnnnnnnnnnnnnnnnnnnnnnnnnnnnnnnnnnnnnnnnnnnnnnnnnnnnnnnnnnnnnnnnnnnnnnnnnnnnnnnnnnnnnnnnnnnnnnnnnnnnnnnnnnnnnnnnnnnnnnnnnnnnnnnnnnnnnnnnnnnnnnnnnnnnnnnnnnnnnnnnnnnnnnnnnnnnnnnnnnnnnnnnnnnnnnnnnnnnnnnnnnnnnnnnnnnnnnnnnnnnnnnnnnnnnnnnnnnnnnnnnnnnnnnnnnnnnnnnnnnnnnnnnnnnnnnnnnnnnnnnnnnnnnnnnnnnnnnnnnnnnnnnnnnnnnnnnnnnnnnnnnnnnnnnnnnnnnnnnnnnnnnnnnnnnnnnnnnnnnnnnnnnnnnnnnnnnnnnnnnnnnnnnnnnnnnnnnnnnnnnnnnnnnnnnnnnnnnnnnnnnnnnnnnnnnnnnnnnnnnnnnnnnnnnnnnnnnnnnnnnnnnnnnnnnnnnnnnnnnnnnnnnnnnnnnnnnnnnnnnnnnnnnnnnnnnnnnnnnnnnnnnnnnnnnnnnnnnnnnnnnnnnnnnnnnnnnnnnnnnnnnnnnnnnnnnnnnnnnnnnnnnnnnnnnnnnnnnnnnnnnnnnnnnnnnnnnnnnnnnnnnnnnnnnnnnnnnnnnnnnnnnnnnnnnnnnnnnnnnnnnnnnnnnnnnnnnnnnnnnnnnnnnnnnnnnnnnnnnnnnnnnnnnnnnnnnnnnnnnnnnnnnnnnnnnnnnnnnnnnnnnnnnnnnnnnnnnnnnnnnnnnnnnnnnnnnnnnnnnnnnnnnnnnnnnnnnnnnnnnnnnnnnnnnnnnnnnnnnnnnnnnnnnnnnnnnnnnnnnnnnnnnnnnnnnnnnnnnnnnnnnnnnnnnnnnnnnnnnnnnnnnnnnnnnnnnnnnnnnnnnnnnnnnnnnnnnnnnnnnnnnnnnnnnnnnnnnnnnnnnnnnnnnnnnnnnnnnnnnnnnnnnnnnnnnnnnnnnnnnnnnnnnnnnnnnnnnnnnnnnnnnnnnnnnnnnnnnnnnnnnnnnnnnnnnnnnnnnnnnnnnnnnnnnnnnnnnnnnnnnnnnnnnnnnnnnnnnnnnnnnnnnnnnnnnnnnnnnnnnnnnnnnnnnnnnnnnnnnnnnnnnnnnnnnnnnnnnnnnnnnnnnnnnnnnnnnnnnnnnnnnnnnnnnnnnnnnnnnnnnnnnnnnnnnnnnnnnnnnnnnnnnnnnnnnnnnnnnnnnnnnnnnnnnnnnnnnnnnnnnnnnnnnnnnnnnnnnnnnnnnnnnnnnnnnnnnnnnnnnnnnnnnnnnnnnnnnnnnnnnnnnnnnnnnnnnnnnnnnnnnnnnnnnnnnnnnnnnnnnnnnnnnnnnnnnnnnnnnnnnnnnnnnnnnnnnnnnnnnnnnnnnnnnnnnnnnnnnnnnnnnnnnnnnnnnnnnnnnnnnnnnnnnnnnnnnnnnnnnnnnnnnnnnnnnnnnnnnnnnnnnnnnnnnnnnnnnnnnnnnnnnnnnnnnnnnnnnnnnnnnnnnnnnnnnnnnnnnnnnnnnnnnnnnnnnnnnnnnnnnnnnnnnnnnnnnnnnnnnnnnnnnnnnnnnnnnnnnnnnnnnnnnnnnnnnnnnnnnnnnnnnnnnnnnnnnnnnnnnnnnnnnnnnnnnnnnnnnnnnnnnnnnnnnnnnnnnnnnnnnnnnnnnnnnnnnnnnnnnnnnnnnnnnnnnnnnnnnnnnnnnnnnnnnnnnnnnnnnnnnnnnnnnnnnnnnnnnnnnnnnnnnnnnnnnnnnnnnnnnnnnnnnnnnnnnnnnnnnnnnnnnnnnnnnnnnnnnnnnnnnnnnnnnnnnnnnnnnnnnnnnnnnnnnnnnnnnnnnnnnnnnnnnnnnnnnnnnnnnnnnnnnnnnnnnnnnnnnnnnnnnnnnnnnnnnnnnnnnnnnnnnnnnnnnnnnnnnnnnnnnnnnnnnnnnnnnnnnnnnnnnnnnnnnnnnnnnnnnnnnnnnnnnnnnnnnnnnnnnnnnnnnnnnnnnnnnnnnnnnnnnnnnnnnnnnnnnnnnnnnnnnnnnnnnnnnnnnnnnnnnnnnnnnnnnnnnnnnnnnnnnnnnnnnnnnnnnnnnnnnnnnnnnnnnnnnnnnnnnnnnnnnnnnnnnnnnnnnnnnnnnnnnnnnnnnnnnnnnnnnnnnnnnnnnnnnnnnnnnnnnnnnnnnnnnnnnnnnnnnnnnnnnnnnnnnnnnnnnnnnnnnnnnnnnnnnnnnnnnnnnnnnnnnnnnnnnnnnnnnnnnnnnnnnnnnnnnnnnnnnnnnnnnnnnnnnnnnnnnnnnnnnnnnnnnnnnnnnnnnnnnnnnnnnnnnnnnnnnnnnnnnnnnnnnnnnnnnnnnnnnnnnnnnnnnnnnnnnnnnnnnnnnnnnnnnnnnnnnnnnnnnnnnnnnnnnnnnnnnnnnnnnnnnnnnnnnnnnnnnnnnnnnnnnnnnnnnnnnnnnnnnnnnnnnnnnnnnnnnnnnnnnnnnnnnnnnnnnnnnnnnnnnnnnnnnnnnnnnnnnnnnnnnnnnnnnnnnnnnnnnnnnnnnnnnnnnnnnnnnnnnnnnnnnnnnnnnnnnnnnnnnnnnnnnnnnnnnnnnnnnnnnnnnnnnnnnnnnnnnnnnnnnnnnnnnnnnnnnnnnnnnnnnnnnnnnnnnnnnnnnnnnnnnnnnnnnnnnnnnnnnnnnnnnnnnnnnnnnnnnnnnnnnnnnnnnnnnnnnnnnnnnnnnnnnnnnnnnnnnnnnnnnnnnnnnnnnnnnnnnnnnnnnnnnnnnnnnnnnnnnnnnnnnnnnnnnnnnnnnnnnnnnnnnnnnnnnnnnnnnnnnnnnnnnnnnnnnnnnnnnnnnnnnnnnnnnnnnnnnnnnnnnnnnnnnnnnnnnnnnnnnnnnnnnnnnnnnnnnnnnnnnnnnnnnnnnnnnnnnnnnnnnnnnnnnnnnnnnnnnnnnnnnnnnnnnnnnnnnnnnnnnnnnnnnnnnnnnnnnnnnnnnnnnnnnnnnnnnnnnnnnnnnnnnnnnnnnnnnnnnnnnnnnnnnnnnnnnnnnnnnnnnnnnnnnnnnnnnnnnnnnnnnnnnnnnnnnnnnnnnnnnnnnnnnnnnnnnnnnnnnnnnnnnnnnnnnnnnnnnnnnnnnnnnnnnnnnnnnnnnnnnnnnnnnnnnnnnnnnnnnnnnnnnnnnnnnnnnnnnnnnnnnnnnnnnnnnnnnnnnnnnnnnnnnnnnnnnnnnnnnnnnnnnnnnnnnnnnnnnnnnnnnnnnnnnnnnnnnnnnnnnnnnnnnnnnnnnnnnnnnnnnnnnnnnnnnnnnnnnnnnnnnnnnnnnnnnnnnnnnnnnnnnnnnnnnnnnnnnnnnnnnnnnnnnnnnnnnnnnnnnnnnnnnnnnnnnnnnnnnnnnnnnnnnnnnnnnnnnnnnnnnnnnnnnnnnnnnnnnnnnnnnnnnnnnnnnnnnnnnnnnnnnnnnnnnnnnnnnnnnnnnnnnnnnnnnnnnnnnnnnnnnnnnnnnnnnnnnnnnnnnnnnnnnnnnnnnnnnnnnnnnnnnnnnnnnnnnnnnnnnnnnnnnnnnnnnnnnnnnnnnnnnnnnnnnnnnnnnnnnnnnnnnnnnnnnnnnnnnnnnnnnnnnnnnnnnnnnnnnnnnnnnnnnnnnnnnnnnnnnnnnnnnnnnnnnnnnnnnnnnnnnnnnnnnnnnnnnnnnnnnnnnnnnnnnnnnnnnnnnnnnnnnnnnnnnnnnnnnnnnnnnnnnnnnnnnnnnnnnnnnnnnnnnnnnnnnnnnnnnnnnnnnnnnnnnnnnnnnnnnnnnnnnnnnnnnnnnnnnnnnnnnnnnnnnnnnnnnnnnnnnnnnnnnnnnnnnnnnnnnnnnnnnnnnnnnnnnnnnnnnnnnnnnnnnnnnnnnnnnnnnnnnnnnnnnnnnnnnnnnnnnnnnnnnnnnnnnnnnnnnnnnnnnnnnnnnnnnnnnnnnnnnnnnnnnnnnnnnnnnnnnnnnnnnnnnnnnnnnnnnnnnnnnnnnnnnnnnnnnnnnnnnnnnnnnnnnnnnnnnnnnnnnnnnnnnnnnnnnnnnnnnnnnnnnnnnnnnnnnnnnnnnnnnnnnnnnnnnnnnnnnnnnnnnnnnnnnnnnnnnnnnnnnnnnnnnnnnnnnnnnnnnnnnnnnnnnnnnnnnnnnnnnnnnnnnnnnnnnnnnnnnnnnnnnnnnnnnnnnnnnnnnnnnnnnnnnnnnnnnnnnnnnnnnnnnnnnnnnnnnnnnnnnnnnnnnnnnnnnnnnnnnnnnnnnnnnnnnnnnnnnnnnnnnnnnnnnnnnnnnnnnnnnnnnnnnnnnnnnnnnnnnnnnnnnnnnnnnnnnnnnnnnnnnnnnnnnnnnnnnnnnnnnnnnnnnnnnnnnnnnnnnnnnnnnnnnnnnnnnnnnnnnnnnnnnnnnnnnnnnnnnnnnnnnnnnnnnnnnnnnnnnnnnnnnnnnnnnnnnnnnnnnnnnnnnnnnnnnnnnnnnnnnnnnnnnnnnnnnnnnnnnnnnnnnnnnnnnnnnnnnnnnnnnnnnnnnnnnnnnnnnnnnnnnnnnnnnnnnnnnnnnnnnnnnnnnnnnnnnnnnnnnnnnnnnnnnnnnnnnnnnnnnnnnnnnnnnnnnnnnnnnnnnnnnnnnnnnnnnnnnnnnnnnnnnnnnnnnnnnnnnnnnnnnnnnnnnnnnnnnnnnnnnnnnnnnnnnnnnnnnnnnnnnnnnnnnnnnnnnnnnnnnnnnnnnnnnnnnnnnnnnnnnnnnnnnnnnnnnnnnnnnnnnnnnnnnnnnnnnnnnnnnnnnnnnnnnnnnnnnnnnnnnnnnnnnnnnnnnnnnnnnnnnnnnnnnnnnnnnnnnnnnnnnnnnnnnnnnnnnnnnnnnnnnnnnnnnnnnnnnnnnnnnnnnnnnnnnnnnnnnnnnnnnnnnnnnnnnnnnnnnnnnnnnnnnnnnnnnnnnnnnnnnnnnnnnnnnnnnnnnnnnnnnnnnnnnnnnnnnnnnnnnnnnnnnnnnnnnnnnnnnnnnnnnnnnnnnnnnnnnnnnnnnnnnnnnnnnnnnnnnnnnnnnnnnnnnnnnnnnnnnnnnnnnnnnnnnnnnnnnnnnnnnnnnnnnnnnnnnnnnnnnnnnnnnnnnnnnnnnnnnnnnnnnnnnnnnnnnnnnnnnnnnnnnnnnnnnnnnnnnnnnnnnnnnnnnnnnnnnnnnnnnnnnnnnnnnnnnnnnnnnnnnnnnnnnnnnnnnnnnnnnnnnnnnnnnnnnnnnnnnnnnnnnnnnnnnnnnnnnnnnnnnnnnnnnnnnnnnnnnnnnnnnnnnnnnnnnnnnnnnnnnnnnnnnnnnnnnnnnnnnnnnnnnnnnnnnnnnnnnnnnnnnnnnnnnnnnnnnnnnnnnnnnnnnnnnnnnnnnnnnnnnnnnnnnnnnnnnnnnnnnnnnnnnnnnnnnnnnnnnnnnnnnnnnnnnnnnnnnnnnnnnnnnnnnnnnnnnnnnnnnnnnnnnnnnnnnnnnnnnnnnnnnnnnnnnnnnnnnnnnnnnnnnnnnnnnnnnnnnnnnnnnnnnnnnnnnnnnnnnnnnnnnnnnnnnnnnnnnnnnnnnnnnnnnnnnnnnnnnnnnnnnnnnnnnnnnnnnnnnnnnnnnnnnnnnnnnnnnnnnnnnnnnnnnnnnnnnnnnnnnnnnnnnnnnnnnnnnnnnnnnnnnnnnnnnnnnnnnnnnnnnnnnnnnnnnnnnnnnnnnnnnnnnnnnnnnnnnnnnnnnnnnnnnnnnnnnnnnnnnnnnnnnnnnnnnnnnnnnnnnnnnnnnnnnnnnnnnnnnnnnnnnnnnnnnnnnnnnnnnnnnnnnnnnnnnnnnnnnnnnnnnnnnnnnnnnnnnnnnnnnnnnnnnnnnnnnnnnnnnnnnnnnnnnnnnnnnnnnnnnnnnnnnnnnnnnnnnnnnnnnnnnnnnnnnnnnnnnnnnnnnnnnnnnnnnnnnnnnnnnnnnnnnnnnnnnnnnnnnnnnnnnnnnnnnnnnnnnnnnnnnnnnnnnnnnnnnnnnnnnnnnnnnnnnnnnnnnnnnnnnnnnnnnnnnnnnnnnnnnnnnnnnnnnnnnnnnnnnnnnnnnnnnnnnnnnnnnnnnnnnnnnnnnnnnnnnnnnnnnnnnnnnnnnnnnnnnnnnnnnnnnnnnnnnnnnnnnnnnnnnnnnnnnnnnnnnnnnnnnnnnnnnnnnnnnnnnnnnnnnnnnnnnnnnnnnnnnnnnnnnnnnnnnnnnnnnnnnnnnnnnnnnnnnnnnnnnnnnnnnnnnnnnnnnnnnnnnnnnnnnnnnnnnnnnnnnnnnnnnnnnnnnnnnnnnnnnnnnnnnnnnnnnnnnnnnnnnnnnnnnnnnnnnnnnnnnnnnnnnnnnnnnnnnnnnnnnnnnnnnnnnnnnnnnnnnnnnnnnnnnnnnnnnnnnnnnnnnnnnnnnnnnnnnnnnnnnnnnnnnnnnnnnnnnnnnnnnnnnnnnnnnnnnnnnnnnnnnnnnnnnnnnnnnnnnnnnnnnnnnnnnnnnnnnnnnnnnnnnnnnnnnnnnnnnnnnnnnnnnnnnnnnnnnnnnnnnnnnnnnnnnnnnnnnnnnnnnnnnnnnnnnnnnnnnnnnnnnnnnnnnnnnnnnnnnnnnnnnnnnnnnnnnnnnnnnnnnnnnnnnnnnnnnnnnnnnnnnnnnnnnnnnnnnnnnnnnnnnnnnnnnnnnnnnnnnnnnnnnnnnnnnnnnnnnnnnnnnnnnnnnnnnnnnnnnnnnnnnnnnnnnnnnnnnnnnnnnnnnnnnnnnnnnnnnnnnnnnnnnnnnnnnnnnnnnnnnnnnnnnnnnnnnnnnnnnnnnnnnnnnnnnnnnnnnnnnnnnnnnnnnnnnnnnnnnnnnnnnnnnnnnnnnnnnnnnnnnnnnnnnnnnnnnnnnnnnnnnnnnnnnnnnnnnnnnnnnnnnnnnnnnnnnnnnnnnnnnnnnnnnnnnnnnnnnnnnnnnnnnnnnnnnnnnnnnnnnnnnnnnnnnnnnnnnnnnnnnnnnnnnnnnnnnnnnnnnnnnnnnnnnnnnnnnnnnnnnnnnnnnnnnnnnnnnnnnnnnnnnnnnnnnnnnnnnnnnnnnnnnnnnnnnnnnnnnnnnnnnnnnnnnnnnnnnnnnnnnnnnnnnnnnnnnnnnnnnnnnnnnnnnnnnnnnnnnnnnnnnnnnnnnnnnnnnnnnnnnnnnnnnnnnnnnnnnnnnnnnnnnnnnnnnnnnnnnnnnnnnnnnnnnnnnnnnnnnnnnnnnnnnnnnnnnnnnnnnnnnnnnnnnnnnnnnnnnnnnnnnnnnnnnnnnnnnnnnnnnnnnnnnnnnnnnnnnnnnnnnnnnnnnnnnnnnnnnnnnnnnnnnnnnnnnnnnnnnnnnnnnnnnnnnnnnnnnnnnnnnnnnnnnnnnnnnnnnnnnnnnnnnnnnnnnnnnnnnnnnnnnnnnnnnnnnnnnnnnnnnnnnnnnnnnnnnnnnnnnnnnnnnnnnnnnnnnnnnnnnnnnnnnnnnnnnnnnnnnnnnnnnnnnnnnnnnnnnnnnnnnnnnnnnnnnnnnnnnnnnnnnnnnnnnnnnnnnnnnnnnnnnnnnnnnnnnnnnnnnnnnnnnnnnnnnnnnnnnnnnnnnnnnnnnnnnnnnnnnnnnnnnnnnnnnnnnnnnnnnnnnnnnnnnnnnnnnnnnnnnnnnnnnnnnnnnnnnnnnnnnnnnnnnnnnnnnnnnnnnnnnnnnnnnnnnnnnnnnnnnnnnnnnnnnnnnnnnnnnnnnnnnnnnnnnnnnnnnnnnnnnnnnnnnnnnnnnnnnnnnnnnnnnnnnnnnnnnnnnnnnnnnnnnnnnnnnnnnnnnnnnnnnnnnnnnnnnnnnnnnnnnnnnnnnnnnnnnnnnnnnnnnnnnnnnnnnnnnnnnnnnnnnnnnnnnnnnnnnnnnnnnnnnnnnnnnnnnnnnnnnnnnnnnnnnnnnnnnnnnnnnnnnnnnnnnnnnnnnnnnnnnnnnnnnnnnnnnnnnnnnnnnnnnnnnnnnnnnnnnnnnnnnnnnnnnnnnnnnnnnnnnnnnnnnnnnnnnnnnnnnnnnnnnnnnnnnnnnnnnnnnnnnnnnnnnnnnnnnnnnnnnnnnnnnnnnnnnnnnnnnnnnnnnnnnnnnnnnnnnnnnnnnnnnnnnnnnnnnnnnnnnnnnnnnnnnnnnnnnnnnnnnnnnnnnnnnnnnnnnnnnnnnnnnnnnnnnnnnnnnnnnnnnnnnnnnnnnnnnnnnnnnnnnnnnnnnnnnnnnnnnnnnnnnnnnnnnnnnnnnnnnnnnnnnnnnnnnnnnnnnnnnnnnnnnnnnnnnnnnnnnnnnnnnnnnnnnnnnnnnnnnnnnnnnnnnnnnnnnnnnnnnnnnnnnnnnnnnnnnnnnnnnnnnnnnnnnnnnnnnnnnnnnnnnnnnnnnnnnnnnnnnnnnnnnnnnnnnnnnnnnnnnnnnnnnnnnnnnnnnnnnnnnnnnnnnnnnnnnnnnnnnnnnnnnnnnnnnnnnnnnnnnnnnnnnnnnnnnnnnnnnnnnnnnnnnnnnnnnnnnnnnnnnnnnnnnnnnnnnnnnnnnnnnnnnnnnnnnnnnnnnnnnnnnnnnnnnnnnnnnnnnnnnnnnnnnnnnnnnnnnnnnnnnnnnnnnnnnnnnnnnnnnnnnnnnnnnnnnnnnnnnnnnnnnnnnnnnnnnnnnnnnnnnnnnnnnnnnnnnnnnnnnnnnnnnnnnnnnnnnnnnnnnnnnnnnnnnnnnnnnnnnnnnnnnnnnnnnnnnnnnnnnnnnnnnnnnnnnnnnnnnnnnnnnnnnnnnnnnnnnnnnnnnnnnnnnnnnnnnnnnnnnnnnnnnnnnnnnnnnnnnnnnnnnnnnnnnnnnnnnnnnnnnnnnnnnnnnnnnnnnnnnnnnnnnnnnnnnnnnnnnnnnnnnnnnnnnnnnnnnnnnnnnnnnnnnnnnnnnnnnnnnnnnnnnnnnnnnnnnnnnnnnnnnnnnnnnnnnnnnnnnnnnnnnnnnnnnnnnnnnnnnnnnnnnnnnnnnnnnnagagatttttccaagccgatcccagttccaggatcagagccattaccgaccttattcatgagataccaacagctcacaacctatgccatttcaatcatgtcaccgactatatcgatgggctctgcgaagcttgctgcatcaagggactgctgagattacctgtctttaccactgtcggtggcagagggataggcgcgggaatcaacaacactcctccattttacctgctctggcatgcaaatgacctcgctggcatgctggttcaaaattggcaaccctgggataatatggggattccggcatggttgggttcttttcaaaaagaaagcaggaaagtgggcttacttgccggaatgacctggctgccgcgcaaggtgcatctgcatgatcctgtctcaggtcaggcagcatgttgttcctgcggcttaccctccaaagctctcgtctattcctgcagcataaaacctgaaccagtgccggaaggccttaaatggaaagaccctcatggtgtttacaccgatcagggaaaaagtctccagtccaaaatcaaactgatgtccaatgatagatacactttcgcggaccgggattggtatagcccgttgttcagctatttgcacgcggaaggaaactccagacaaggaaaactatggttggttggatttgccagcgataaagcaaaaagcatagacatctgggacaagatcatcgagcttgagggaactgatacaaatgatgagctactggctcaattggcaaacagggctactgcccttaatgccatgcgcaagaagcctctcagaggtgatttcaaaaagtcagtgggcactccccagattgctgacattatcccccacgccgaaagcagaattgccatcaatgcgggtaaaatgactgagaacaggggctattcctggcaggatgccgatactgaatacggagaactgctcaccaaggttgcatgctctttggagccggctcaaacagtggacgccaggctcaagagaggtaaattcatttcccgcaagccctggccagttataccagaatccaaaacaaaacccgcagaggaggaccagaatgaatagaggaaccgttgacttcattgcaagcctggagaacctcaaagaaggcgatttgggcattcttagaaaactcaggggagcccggcttgatgaaaagcttcccggatttgacctgttttccgccctatggtggcctttgcggcaaaagaatcaacgcgctcccaagcgtgaagtggcttggttgatcgccaaactttttgctgaattccgctttgaacagcgcgagggagccacattgcccattcttatgggaggcatctgccggaagttggaacccaaaaaggaattaccccgggtattggcacgctttgatcaactcgcatcgcttgacattatgcagatggaagagccgctgtcggtcatcatgggtattttgcgcaagcaccagcaggtctgcctggactgggtagggcttactgatgttctgtcattttgggagcaggaacctgtcaaaagagaatggtcggattcatttattaaagcatacaagatcaacaaggaggattcagatgttgattgaaattcatatgattcagaatcacagcccggcaaatcttaaccgggacgacttgggcgcccccaagacctgttatttcggtggagtattacgttctcgcatctccagccagtgcatcaagcgcagcatccgttttgccccggaattcgcggaccttagaggaggtatccgaacaaggcgtctggcagagaaactcgaggaaatgctggaaaacaaagataagaagctggttgccaagtttcttgaagcctgcggaatcaaaaccaaatcttccaagaaagctgcaaaaaagtccgaaaagatacccgcggaagccgatgaagatcaggatgagcagcaggcggctgatacatctgacatgctggtttttaccacttatgatgccctgcgccaaatggcagagctgctttccgactccaaactaagtgaaagcgaaaaactgctgcagttcaaagatttgctcacaaactgcgtccattctccggatatagcactttgcggcaggatgttggagaccaaagagcttaaaaacactggcgttgaaggcgccctacaggttgcacatgcgatctccacccacattgccagacctgagatagactattttgtggcggccgatgatgttcccggtgaagacgccggagcgggtcatattggcgaatccatgtttgcctcagcctgtttctacaaatacttctccattgattgggaacagttggtcaagaacctgaaaggggacacgaatctggcagcccacaccgtgggtgcctttctcctcgccgcagccaaaaccaaccccagtggcaaacagaacagcttcgccgctcataactatcccgatggcatccttgttgagttcaagaattcccctattagctacgccaacgcattcgtcaggccagtttccgtggtcaaggaatcggacctggtggaacaaagcatcggccagctttccaactacgtgaacgacatcaggcttggctattatgatgagcaatccccagttatcagcttctggttttctccaaacaatcgctattcccttggcaatgagcattccaaactggcttccagaaacattggcaacctcaatgagcttgtaggcgctgtgttggattatattggcggcttcaagtgggaagaagttcagaaaagcaaggcttatgttggcggctgacatgagtgcgccacccaacaccttattcttgcgcttggagggggctttgcagtcttggggcagcaacgaggctaagtttgctttgcgcaggactaccgacgctcccacaaaatcaggtgtcctggggctgctttgcgcggccatgggaattgggcgcgcggaggctgctgattcatggctcccaaaactcgccaacctgcgcatgggcgtgcggatagaccgccccggcatacgctggtgggacttccatactgttggagcgggacaaagaatgcgcatggcagagctgaaggcacccaaaaaaccttccatggctggagctgccctggctgaaaccctgacaccaagcaaagtaaaaaccagggcagagaccttgctctcacgccgcgaatatcttgccgacgccagttttctggtcgccttgcagggtgagccggaacttgtggaaaagctctccgccgctctggccaagccggtctgggcaatttatctggggcgcaaatcctgtcccccttcacgtcccgtgggcgagcatgctccgggcttttataacactttggaggaggcgctgtccgcggttcccctgcaaaagcgctggcacaatgaacccctgccgcaaatactgccttgcgtcatggactggatccccagccaggacggagaacatgcgcctgatgacgcggagattcattacgatctgccggtttcttttcagccgccccgccatttgccgcgcttcgtgatcaggcgtgagctggttgtgggagaggatgtgcaagtgagcagggaaaccggaaccagcgtttggaggcccaaaggaacccgggcggattataacaattccgagtataagaaggtcagggcggagcggcttgtgatggaccatgccgcgtgcatggtatgcaaagctcccgccacgactgttcaacacgtgaattaccgcagggcgggaggcaaggaaataccggaagacctgcgggcgctgtgccgcctctgccacgacgcctgcaccatgctggaatacggttccggcatgaccaccgaccgcatcgacccctgcgaccccatctggcgggagcgaatactggcaaagcgcaaagatatagtcgagttccgttcgcgcgggcagcgtttccgcaaaatgaagccagaggaggaaaacggatgatctacttgtccaagctattgatcgatactggaggcaatccagaccgtccccgccccggcagaaagtggctggacaatatctataacgtccaccgccgcctttccatggcgttcccttcaggtttgcgccgggagcaggatccgcatttcctgaagcccttttcgccaaacgacttccaaaaaactcccttccttttccgggtcgataacaacatcgacggaaacgataaaagggcgattattatcgtccagtccgttcttgagccggattgggattattgcttccaaaacgcgcttgatttcctggcagcgccaccggaaacaaaggagtataatccagagtttcaagcgggacaactgctccggttcaggctgcgggtaaacgccagcgtacgccgtcatattcctgagaaggtgcaacaggacggtcaaaccatagaaactggcaacatcctgcacaaaagggtttctctcacctgggatccctcttccaccccggatcaggcccttgccgactggctggctgccaaaagcccaaagctgggcttcacccttcagcgctgtgagcttcttcaactgggttgggtttatggctccaagcctgaacctaaaaatgtcaaagcaaaggaacagggacagggctactggcgtgaacacacatacaatcctctgcgcttccgttcggctctactggagggaattctcaaagtggatgacccgaaactgtttctggaaacgcttagcagcggcattggaaaagcgaaaagcttcggctttggcctgctgtccgttctgccaatcaggaatgatgaataaagacctgcactctatcccccggatcagagatcggcttagctatctctatgtggagcatgccaaaattgatcagaacgggcaagccatcgccattcacgatgccctgggagaaaccccggttccttgtgccggcttggctatgctgatgctgggaccgggcataaccatcacccatgcggcaatactttcactggctgcctgtggctgtctggtagcctgggtgggggaacatggcgtcaggttctatgccgcaggcacaggtacaacccgtagcgccgtcaatcttatgaaacaggcaaagtactgggcagacccggttttgcatttacgggttgtgcgctccatgtatcagttgaggttccaggatgagctttctcctgatttaactttgaaccagatcaggggcaaggaaggtgcccgggtgcgcgatacatatttccaactctcccaaaagtatggtgtgcccatgcagggcagaaactatcaaagagacaactggaataaagcggatcccataaaccgggcattatctgtggcaaactcctgcctctacggcatatcgcacgctgccattgttgctgcaggattctctcccggattgggctttgtccacactggcaagcaactgtcatttgtctatgatatcgcggatctatacaaaatggaaatggctgctcccgccgcattccgggcgaccgctgaagggatcggcgaactcgaccgcagagtcaggcttgcctgccgtgatgaattccacaggcagaatctactcaaacgcattgtcgcggatattagttctctcttcggtgatattatgccagaggatagcctggatgactgttttgccgaagaaccagcattgcctggaggactctggtctccagatggagaagtttccccaggcggcatatcttacgggcaggatgatctgccaaaggaagattgatggtggttttagtattggaaaatgtgccaagctccctgaggggtaagatcacacgttggctgctggaagtaaaagccggggtgtttgtgggtaaagtctcagcaatggttagagataaactgtgggataaggttagaagcaattgcagcggtggaacttgcctgatgatctggagtagtcagaccgagcaagggtttgatatcgaattctggggtgccgcatcaagagtcgttacggaatgggagggtatcaaacttatgaccaagcatccttaaactaaggcttgaaggagttcaatgacctcttagacctctattgatcaagtgtattccccatgcatgtgggggtgaaccggatacacacgcatcggttgcataggctgtccggtattccccatgcatgtgggggtgaaccggatcacgtcaccaagatctggcttcggcacaggtattccccatgcatgtgggggtgaaccgcttatccgaatgctacaagctgcacgtgacctgtattccccatgcatgtgggggtgaaccgagacccttcaacctatcgcaaaagaattcaatgtattccccatgcatgtgggggtgaaccgactacaaaacgaggtgatcatatgagtgtcaagtattccccatgcatgtgggggtgaaccgcatctgttttgccttctgcattgccttgtatcgtattccccatgcatgtgggggtgaaccgaacgcccgccagccggcggcactgctggctatgtattccccatgcatgtgggggtgaaccgacgaatcccgtctatgccgcccaggccaacgcgtattccccatgcatgtgggggtgaaccgaaaccaggaattaacgtagtgccaggcaagacgtattccccatgcatgtgggggtgaaccgactttgacaaagccatccaggtaggtgatgccgtattccccatgcatgtgggggtgaaccgccgacgaaatagcgatgaagggactggtaacgtattccccatgcatgtgggggtgaaccggcggcggcggctttgtcggtatcctggtagaggtattccccatgcatgtgggggtgaaccgaggacgtagcgaggcggcttggtgacctgatggtattccccatgcatgtgggggtgaaccgcgcggagctttccttgttgtcaccggaaagaggtattccccatgcatgtgggggtgaaccgaattatcggaaataacaaagagtcttcaaggggtattccccatgcatgtgggggtgaaccgtcaacgaaaccagcaacctgctgatcgttggggtattccccatgcatgtgggggtgaaccgaggacgtagcgaggcggcttggtgacctgatggtattccccatgcatgtgggggtgaaccgcctgaatctatcaccctactgagacaggcaatgtattccccatgcatgtgggggtgaaccgatcgtccagattctcacgatcatcctggacatgtattccccatgcatgtgggggtgaaccgttataaagggcagtccagtgagcaatagcaaggtattccccatgcatgtgggggtgaaccgatggcaacaattagcaggaattaaacaagaaggtattccccatgcatgtgggggtgaaccgttccggatgcagtcatccgctgtcgatgtggagtattccccatgcatgtgggggtgaaccgttcatagcgccgcttttcagcctggctacggcgtattccccatgcatgtgggggtgaaccgacgcggcataaccgcatgggcagcgcgtattggtattccccacgcatgtgggggtgaaccgatcgacgccggcatcatcgaggatctgatcctgtattccccacgcatgtgggggtgttgcgatttcctcgcgcgcgggcgactctcatttgcatctggcgctcagaccttggtcttcctggggtcaaccttaacctttatatggatgacctaag

SEQ ID NO: 1100 - DNA, 103586 bp, Artificial Sequence
  Synthetic Oligonucleotide
  misc_feature (1)..(95919): n is a, c, g, or t
nnnnnnnnnnnnnnnnnnnnnnnnnnnnnnnnnnnnnnnnnnnnnnnnnnnnnnnnnnnnnnnnnnnnnnnnnnnnnnnnnnnnnnnnnnnnnnnnnnnnnnnnnnnnnnnnnnnnnnnnnnnnnnnnnnnnnnnnnnnnnnnnnnnnnnnnnnnnnnnnnnnnnnnnnnnnnnnnnnnnnnnnnnnnnnnnnnnnnnnnnnnnnnnnnnnnnnnnnnnnnnnnnnnnnnnnnnnnnnnnnnnnnnnnnnnnnnnnnnnnnnnnnnnnnnnnnnnnnnnnnnnnnnnnnnnnnnnnnnnnnnnnnnnnnnnnnnnnnnnnnnnnnnnnnnnnnnnnnnnnnnnnnnnnnnnnnnnnnnnnnnnnnnnnnnnnnnnnnnnnnnnnnnnnnnnnnnnnnnnnnnnnnnnnnnnnnnnnnnnnnnnnnnnnnnnnnnnnnnnnnnnnnnnnnnnnnnnnnnnnnnnnnnnnnnnnnnnnnnnnnnnnnnnnnnnnnnnnnnnnnnnnnnnnnnnnnnnnnnnnnnnnnnnnnnnnnnnnnnnnnnnnnnnnnnnnnnnnnnnnnnnnnnnnnnnnnnnnnnnnnnnnnnnnnnnnnnnnnnnnnnnnnnnnnnnnnnnnnnnnnnnnnnnnnnnnnnnnnnnnnnnnnnnnnnnnnnnnnnnnnnnnnnnnnnnnnnnnnnnnnnnnnnnnnnnnnnnnnnnnnnnnnnnnnnnnnnnnnnnnnnnnnnnnnnnnnnnnnnnnnnnnnnnnnnnnnnnnnnnnnnnnnnnnnnnnnnnnnnnnnnnnnnnnnnnnnnnnnnnnnnnnnnnnnnnnnnnnnnnnnnnnnnnnnnnnnnnnnnnnnnnnnnnnnnnnnnnnnnnnnnnnnnnnnnnnnnnnnnnnnnnnnnnnnnnnnnnnnnnnnnnnnnnnnnnnnnnnnnnnnnnnnnnnnnnnnnnnnnnnnnnnnnnnnnnnnnnnnnnnnnnnnnnnnnnnnnnnnnnnnnnnnnnnnnnnnnnnnnnnnnnnnnnnnnnnnnnnnnnnnnnnnnnnnnnnnnnnnnnnnnnnnnnnnnnnnnnnnnnnnnnnnnnnnnnnnnnnnnnnnnnnnnnnnnnnnnnnnnnnnnnnnnnnnnnnnnnnnnnnnnnnnnnnnnnnnnnnnnnnnnnnnnnnnnnnnnnnnnnnnnnnnnnnnnnnnnnnnnnnnnnnnnnnnnnnnnnnnnnnnnnnnnnnnnnnnnnnnnnnnnnnnnnnnnnnnnnnnnnnnnnnnnnnnnnnnnnnnnnnnnnnnnnnnnnnnnnnnnnnnnnnnnnnnnnnnnnnnnnnnnnnnnnnnnnnnnnnnnnnnnnnnnnnnnnnnnnnnnnnnnnnnnnnnnnnnnnnnnnnnnnnnnnnnnnnnnnnnnnnnnnnnnnnnnnnnnnnnnnnnnnnnnnnnnnnnnnnnnnnnnnnnnnnnnnnnnnnnnnnnnnnnnnnnnnnnnnnnnnnnnnnnnnnnnnnnnnnnnnnnnnnnnnnnnnnnnnnnnnnnnnnnnnnnnnnnnnnnnnnnnnnnnnnnnnnnnnnnnnnnnnnnnnnnnnnnnnnnnnnnnnnnnnnnnnnnnnnnnnnnnnnnnnnnnnnnnnnnnnnnnnnnnnnnnnnnnnnnnnnnnnnnnnnnnnnnnnnnnnnnnnnnnnnnnnnnnnnnnnnnnnnnnnnnnnnnnnnnnnnnnnnnnnnnnnnnnnnnnnnnnnnnnnnnnnnnnnnnnnnnnnnnnnnnnnnnnnnnnnnnnnnnnnnnnnnnnnnnnnnnnnnnnnnnnnnnnnnnnnnnnnnnnnnnnnnnnnnnnnnnnnnnnnnnnnnnnnnnnnnnnnnnnnnnnnnnnnnnnnnnnnnnnnnnnnnnnnnnnnnnnnnnnnnnnnnnnnnnnnnnnnnnnnnnnnnnnnnnnnnnnnnnnnnnnnnnnnnnnnnnnnnnnnnnnnnnnnnnnnnnnnnnnnnnnnnnnnnnnnnnnnnnnnnnnnnnnnnnnnnnnnnnnnnnnnnnnnnnnnnnnnnnnnnnnnnnnnnnnnnnnnnnnnnnnnnnnnnnnnnnnnnnnnnnnnnnnnnnnnnnnnnnnnnnnnnnnnnnnnnnnnnnnnnnnnnnnnnnnnnnnnnnnnnnnnnnnnnnnnnnnnnnnnnnnnnnnnnnnnnnnnnnnnnnnnnnnnnnnnnnnnnnnnnnnnnnnnnnnnnnnnnnnnnnnnnnnnnnnnnnnnnnnnnnnnnnnnnnnnnnnnnnnnnnnnnnnnnnnnnnnnnnnnnnnnnnnnnnnnnnnnnnnnnnnnnnnnnnnnnnnnnnnnnnnnnnnnnnnnnnnnnnnnnnnnnnnnnnnnnnnnnnnnnnnnnnnnnnnnnnnnnnnnnnnnnnnnnnnnnnnnnnnnnnnnnnnnnnnnnnnnnnnnnnnnnnnnnnnnnnnnnnnnnnnnnnnnnnnnnnnnnnnnnnnnnnnnnnnnnnnnnnnnnnnnnnnnnnnnnnnnnnnnnnnnnnnnnnnnnnnnnnnnnnnnnnnnnnnnnnnnnnnnnnnnnnnnnnnnnnnnnnnnnnnnnnnnnnnnnnnnnnnnnnnnnnnnnnnnnnnnnnnnnnnnnnnnnnnnnnnnnnnnnnnnnnnnnnnnnnnnnnnnnnnnnnnnnnnnnnnnnnnnnnnnnnnnnnnnnnnnnnnnnnnnnnnnnnnnnnnnnnnnnnnnnnnnnnnnnnnnnnnnnnnnnnnnnnnnnnnnnnnnnnnnnnnnnnnnnnnnnnnnnnnnnnnnnnnnnnnnnnnnnnnnnnnnnnnnnnnnnnnnnnnnnnnnnnnnnnnnnnnnnnnnnnnnnnnnnnnnnnnnnnnnnnnnnnnnnnnnnnnnnnnnnnnnnnnnnnnnnnnnnnnnnnnnnnnnnnnnnnnnnnnnnnnnnnnnnnnnnnnnnnnnnnnnnnnnnnnnnnnnnnnnnnnnnnnnnnnnnnnnnnnnnnnnnnnnnnnnnnnnnnnnnnnnnnnnnnnnnnnnnnnnnnnnnnnnnnnnnnnnnnnnnnnnnnnnnnnnnnnnnnnnnnnnnnnnnnnnnnnnnnnnnnnnnnnnnnnnnnnnnnnnnnnnnnnnnnnnnnnnnnnnnnnnnnnnnnnnnnnnnnnnnnnnnnnnnnnnnnnnnnnnnnnnnnnnnnnnnnnnnnnnnnnnnnnnnnnnnnnnnnnnnnnnnnnnnnnnnnnnnnnnnnnnnnnnnnnnnnnnnnnnnnnnnnnnnnnnnnnnnnnnnnnnnnnnnnnnnnnnnnnnnnnnnnnnnnnnnnnnnnnnnnnnnnnnnnnnnnnnnnnnnnnnnnnnnnnnnnnnnnnnnnnnnnnnnnnnnnnnnnnnnnnnnnnnnnnnnnnnnnnnnnnnnnnnnnnnnnnnnnnnnnnnnnnnnnnnnnnnnnnnnnnnnnnnnnnnnnnnnnnnnnnnnnnnnnnnnnnnnnnnnnnnnnnnnnnnnnnnnnnnnnnnnnnnnnnnnnnnnnnnnnnnnnnnnnnnnnnnnnnnnnnnnnnnnnnnnnnnnnnnnnnnnnnnnnnnnnnnnnnnnnnnnnnnnnnnnnnnnnnnnnnnnnnnnnnnnnnnnnnnnnnnnnnnnnnnnnnnnnnnnnnnnnnnnnnnnnnnnnnnnnnnnnnnnnnnnnnnnnnnnnnnnnnnnnnnnnnnnnnnnnnnnnnnnnnnnnnnnnnnnnnnnnnnnnnnnnnnnnnnnnnnnnnnnnnnnnnnnnnnnnnnnnnnnnnnnnnnnnnnnnnnnnnnnnnnnnnnnnnnnnnnnnnnnnnnnnnnnnnnnnnnnnnnnnnnnnnnnnnnnnnnnnnnnnnnnnnnnnnnnnnnnnnnnnnnnnnnnnnnnnnnnnnnnnnnnnnnnnnnnnnnnnnnnnnnnnnnnnnnnnnnnnnnnnnnnnnnnnnnnnnnnnnnnnnnnnnnnnnnnnnnnnnnnnnnnnnnnnnnnnnnnnnnnnnnnnnnnnnnnnnnnnnnnnnnnnnnnnnnnnnnnnnnnnnnnnnnnnnnnnnnnnnnnnnnnnnnnnnnnnnnnnnnnnnnnnnnnnnnnnnnnnnnnnnnnnnnnnnnnnnnnnnnnnnnnnnnnnnnnnnnnnnnnnnnnnnnnnnnnnnnnnnnnnnnnnnnnnnnnnnnnnnnnnnnnnnnnnnnnnnnnnnnnnnnnnnnnnnnnnnnnnnnnnnnnnnnnnnnnnnnnnnnnnnnnnnnnnnnnnnnnnnnnnnnnnnnnnnnnnnnnnnnnnnnnnnnnnnnnnnnnnnnnnnnnnnnnnnnnnnnnnnnnnnnnnnnnnnnnnnnnnnnnnnnnnnnnnnnnnnnnnnnnnnnnnnnnnnnnnnnnnnnnnnnnnnnnnnnnnnnnnnnnnnnnnnnnnnnnnnnnnnnnnnnnnnnnnnnnnnnnnnnnnnnnnnnnnnnnnnnnnnnnnnnnnnnnnnnnnnnnnnnnnnnnnnnnnnnnnnnnnnnnnnnnnnnnnnnnnnnnnnnnnnnnnnnnnnnnnnnnnnnnnnnnnnnnnnnnnnnnnnnnnnnnnnnnnnnnnnnnnnnnnnnnnnnnnnnnnnnnnnnnnnnnnnnnnnnnnnnnnnnnnnnnnnnnnnnnnnnnnnnnnnnnnnnnnnnnnnnnnnnnnnnnnnnnnnnnnnnnnnnnnnnnnnnnnnnnnnnnnnnnnnnnnnnnnnnnnnnnnnnnnnnnnnnnnnnnnnnnnnnnnnnnnnnnnnnnnnnnnnnnnnnnnnnnnnnnnnnnnnnnnnnnnnnnnnnnnnnnnnnnnnnnnnnnnnnnnnnnnnnnnnnnnnnnnnnnnnnnnnnnnnnnnnnnnnnnnnnnnnnnnnnnnnnnnnnnnnnnnnnnnnnnnnnnnnnnnnnnnnnnnnnnnnnnnnnnnnnnnnnnnnnnnnnnnnnnnnnnnnnnnnnnnnnnnnnnnnnnnnnnnnnnnnnnnnnnnnnnnnnnnnnnnnnnnnnnnnnnnnnnnnnnnnnnnnnnnnnnnnnnnnnnnnnnnnnnnnnnnnnnnnnnnnnnnnnnnnnnnnnnnnnnnnnnnnnnnnnnnnnnnnnnnnnnnnnnnnnnnnnnnnnnnnnnnnnnnnnnnnnnnnnnnnnnnnnnnnnnnnnnnnnnnnnnnnnnnnnnnnnnnnnnnnnnnnnnnnnnnnnnnnnnnnnnnnnnnnnnnnnnnnnnnnnnnnnnnnnnnnnnnnnnnnnnnnnnnnnnnnnnnnnnnnnnnnnnnnnnnnnnnnnnnnnnnnnnnnnnnnnnnnnnnnnnnnnnnnnnnnnnnnnnnnnnnnnnnnnnnnnnnnnnnnnnnnnnnnnnnnnnnnnnnnnnnnnnnnnnnnnnnnnnnnnnnnnnnnnnnnnnnnnnnnnnnnnnnnnnnnnnnnnnnnnnnnnnnnnnnnnnnnnnnnnnnnnnnnnnnnnnnnnnnnnnnnnnnnnnnnnnnnnnnnnnnnnnnnnnnnnnnnnnnnnnnnnnnnnnnnnnnnnnnnnnnnnnnnnnnnnnnnnnnnnnnnnnnnnnnnnnnnnnnnnnnnnnnnnnnnnnnnnnnnnnnnnnnnnnnnnnnnnnnnnnnnnnnnnnnnnnnnnnnnnnnnnnnnnnnnnnnnnnnnnnnnnnnnnnnnnnnnnnnnnnnnnnnnnnnnnnnnnnnnnnnnnnnnnnnnnnnnnnnnnnnnnnnnnnnnnnnnnnnnnnnnnnnnnnnnnnnnnnnnnnnnnnnnnnnnnnnnnnnnnnnnnnnnnnnnnnnnnnnnnnnnnnnnnnnnnnnnnnnnnnnnnnnnnnnnnnnnnnnnnnnnnnnnnnnnnnnnnnnnnnnnnnnnnnnnnnnnnnnnnnnnnnnnnnnnnnnnnnnnnnnnnnnnnnnnnnnnnnnnnnnnnnnnnnnnnnnnnnnnnnnnnnnnnnnnnnnnnnnnnnnnnnnnnnnnnnnnnnnnnnnnnnnnnnnnnnnnnnnnnnnnnnnnnnnnnnnnnnnnnnnnnnnnnnnnnnnnnnnnnnnnnnnnnnnnnnnnnnnnnnnnnnnnnnnnnnnnnnnnnnnnnnnnnnnnnnnnnnnnnnnnnnnnnnnnnnnnnnnnnnnnnnnnnnnnnnnnnnnnnnnnnnnnnnnnnnnnnnnnnnnnnnnnnnnnnnnnnnnnnnnnnnnnnnnnnnnnnnnnnnnnnnnnnnnnnnnnnnnnnnnnnnnnnnnnnnnnnnnnnnnnnnnnnnnnnnnnnnnnnnnnnnnnnnnnnnnnnnnnnnnnnnnnnnnnnnnnnnnnnnnnnnnnnnnnnnnnnnnnnnnnnnnnnnnnnnnnnnnnnnnnnnnnnnnnnnnnnnnnnnnnnnnnnnnnnnnnnnnnnnnnnnnnnnnnnnnnnnnnnnnnnnnnnnnnnnnnnnnnnnnnnnnnnnnnnnnnnnnnnnnnnnnnnnnnnnnnnnnnnnnnnnnnnnnnnnnnnnnnnnnnnnnnnnnnnnnnnnnnnnnnnnnnnnnnnnnnnnnnnnnnnnnnnnnnnnnnnnnnnnnnnnnnnnnnnnnnnnnnnnnnnnnnnnnnnnnnnnnnnnnnnnnnnnnnnnnnnnnnnnnnnnnnnnnnnnnnnnnnnnnnnnnnnnnnnnnnnnnnnnnnnnnnnnnnnnnnnnnnnnnnnnnnnnnnnnnnnnnnnnnnnnnnnnnnnnnnnnnnnnnnnnnnnnnnnnnnnnnnnnnnnnnnnnnnnnnnnnnnnnnnnnnnnnnnnnnnnnnnnnnnnnnnnnnnnnnnnnnnnnnnnnnnnnnnnnnnnnnnnnnnnnnnnnnnnnnnnnnnnnnnnnnnnnnnnnnnnnnnnnnnnnnnnnnnnnnnnnnnnnnnnnnnnnnnnnnnnnnnnnnnnnnnnnnnnnnnnnnnnnnnnnnnnnnnnnnnnnnnnnnnnnnnnnnnnnnnnnnnnnnnnnnnnnnnnnnnnnnnnnnnnnnnnnnnnnnnnnnnnnnnnnnnnnnnnnnnnnnnnnnnnnnnnnnnnnnnnnnnnnnnnnnnnnnnnnnnnnnnnnnnnnnnnnnnnnnnnnnnnnnnnnnnnnnnnnnnnnnnnnnnnnnnnnnnnnnnnnnnnnnnnnnnnnnnnnnnnnnnnnnnnnnnnnnnnnnnnnnnnnnnnnnnnnnnnnnnnnnnnnnnnnnnnnnnnnnnnnnnnnnnnnnnnnnnnnnnnnnnnnnnnnnnnnnnnnnnnnnnnnnnnnnnnnnnnnnnnnnnnnnnnnnnnnnnnnnnnnnnnnnnnnnnnnnnnnnnnnnnnnnnnnnnnnnnnnnnnnnnnnnnnnnnnnnnnnnnnnnnnnnnnnnnnnnnnnnnnnnnnnnnnnnnnnnnnnnnnnnnnnnnnnnnnnnnnnnnnnnnnnnnnnnnnnnnnnnnnnnnnnnnnnnnnnnnnnnnnnnnnnnnnnnnnnnnnnnnnnnnnnnnnnnnnnnnnnnnnnnnnnnnnnnnnnnnnnnnnnnnnnnnnnnnnnnnnnnnnnnnnnnnnnnnnnnnnnnnnnnnnnnnnnnnnnnnnnnnnnnnnnnnnnnnnnnnnnnnnnnnnnnnnnnnnnnnnnnnnnnnnnnnnnnnnnnnnnnnnnnnnnnnnnnnnnnnnnnnnnnnnnnnnnnnnnnnnnnnnnnnnnnnnnnnnnnnnnnnnnnnnnnnnnnnnnnnnnnnnnnnnnnnnnnnnnnnnnnnnnnnnnnnnnnnnnnnnnnnnnnnnnnnnnnnnnnnnnnnnnnnnnnnnnnnnnnnnnnnnnnnnnnnnnnnnnnnnnnnnnnnnnnnnnnnnnnnnnnnnnnnnnnnnnnnnnnnnnnnnnnnnnnnnnnnnnnnnnnnnnnnnnnnnnnnnnnnnnnnnnnnnnnnnnnnnnnnnnnnnnnnnnnnnnnnnnnnnnnnnnnnnnnnnnnnnnnnnnnnnnnnnnnnnnnnnnnnnnnnnnnnnnnnnnnnnnnnnnnnnnnnnnnnnnnnnnnnnnnnnnnnnnnnnnnnnnnnnnnnnnnnnnnnnnnnnnnnnnnnnnnnnnnnnnnnnnnnnnnnnnnnnnnnnnnnnnnnnnnnnnnnnnnnnnnnnnnnnnnnnnnnnnnnnnnnnnnnnnnnnnnnnnnnnnnnnnnnnnnnnnnnnnnnnnnnnnnnnnnnnnnnnnnnnnnnnnnnnnnnnnnnnnnnnnnnnnnnnnnnnnnnnnnnnnnnnnnnnnnnnnnnnnnnnnnnnnnnnnnnnnnnnnnnnnnnnnnnnnnnnnnnnnnnnnnnnnnnnnnnnnnnnnnnnnnnnnnnnnnnnnnnnnnnnnnnnnnnnnnnnnnnnnnnnnnnnnnnnnnnnnnnnnnnnnnnnnnnnnnnnnnnnnnnnnnnnnnnnnnnnnnnnnnnnnnnnnnnnnnnnnnnnnnnnnnnnnnnnnnnnnnnnnnnnnnnnnnnnnnnnnnnnnnnnnnnnnnnnnnnnnnnnnnnnnnnnnnnnnnnnnnnnnnnnnnnnnnnnnnnnnnnnnnnnnnnnnnnnnnnnnnnnnnnnnnnnnnnnnnnnnnnnnnnnnnnnnnnnnnnnnnnnnnnnnnnnnnnnnnnnnnnnnnnnnnnnnnnnnnnnnnnnnnnnnnnnnnnnnnnnnnnnnnnnnnnnnnnnnnnnnnnnnnnnnnnnnnnnnnnnnnnnnnnnnnnnnnnnnnnnnnnnnnnnnnnnnnnnnnnnnnnnnnnnnnnnnnnnnnnnnnnnnnnnnnnnnnnnnnnnnnnnnnnnnnnnnnnnnnnnnnnnnnnnnnnnnnnnnnnnnnnnnnnnnnnnnnnnnnnnnnnnnnnnnnnnnnnnnnnnnnnnnnnnnnnnnnnnnnnnnnnnnnnnnnnnnnnnnnnnnnnnnnnnnnnnnnnnnnnnnnnnnnnnnnnnnnnnnnnnnnnnnnnnnnnnnnnnnnnnnnnnnnnnnnnnnnnnnnnnnnnnnnnnnnnnnnnnnnnnnnnnnnnnnnnnnnnnnnnnnnnnnnnnnnnnnnnnnnnnnnnnnnnnnnnnnnnnnnnnnnnnnnnnnnnnnnnnnnnnnnnnnnnnnnnnnnnnnnnnnnnnnnnnnnnnnnnnnnnnnnnnnnnnnnnnnnnnnnnnnnnnnnnnnnnnnnnnnnnnnnnnnnnnnnnnnnnnnnnnnnnnnnnnnnnnnnnnnnnnnnnnnnnnnnnnnnnnnnnnnnnnnnnnnnnnnnnnnnnnnnnnnnnnnnnnnnnnnnnnnnnnnnnnnnnnnnnnnnnnnnnnnnnnnnnnnnnnnnnnnnnnnnnnnnnnnnnnnnnnnnnnnnnnnnnnnnnnnnnnnnnnnnnnnnnnnnnnnnnnnnnnnnnnnnnnnnnnnnnnnnnnnnnnnnnnnnnnnnnnnnnnnnnnnnnnnnnnnnnnnnnnnnnnnnnnnnnnnnnnnnnnnnnnnnnnnnnnnnnnnnnnnnnnnnnnnnnnnnnnnnnnnnnnnnnnnnnnnnnnnnnnnnnnnnnnnnnnnnnnnnnnnnnnnnnnnnnnnnnnnnnnnnnnnnnnnnnnnnnnnnnnnnnnnnnnnnnnnnnnnnnnnnnnnnnnnnnnnnnnnnnnnnnnnnnnnnnnnnnnnnnnnnnnnnnnnnnnnnnnnnnnnnnnnnnnnnnnnnnnnnnnnnnnnnnnnnnnnnnnnnnnnnnnnnnnnnnnnnnnnnnnnnnnnnnnnnnnnnnnnnnnnnnnnnnnnnnnnnnnnnnnnnnnnnnnnnnnnnnnnnnnnnnnnnnnnnnnnnnnnnnnnnnnnnnnnnnnnnnnnnnnnnnnnnnnnnnnnnnnnnnnnnnnnnnnnnnnnnnnnnnnnnnnnnnnnnnnnnnnnnnnnnnnnnnnnnnnnnnnnnnnnnnnnnnnnnnnnnnnnnnnnnnnnnnnnnnnnnnnnnnnnnnnnnnnnnnnnnnnnnnnnnnnnnnnnnnnnnnnnnnnnnnnnnnnnnnnnnnnnnnnnnnnnnnnnnnnnnnnnnnnnnnnnnnnnnnnnnnnnnnnnnnnnnnnnnnnnnnnnnnnnnnnnnnnnnnnnnnnnnnnnnnnnnnnnnnnnnnnnnnnnnnnnnnnnnnnnnnnnnnnnnnnnnnnnnnnnnnnnnnnnnnnnnnnnnnnnnnnnnnnnnnnnnnnnnnnnnnnnnnnnnnnnnnnnnnnnnnnnnnnnnnnnnnnnnnnnnnnnnnnnnnnnnnnnnnnnnnnnnnnnnnnnnnnnnnnnnnnnnnnnnnnnnnnnnnnnnnnnnnnnnnnnnnnnnnnnnnnnnnnnnnnnnnnnnnnnnnnnnnnnnnnnnnnnnnnnnnnnnnnnnnnnnnnnnnnnnnnnnnnnnnnnnnnnnnnnnnnnnnnnnnnnnnnnnnnnnnnnnnnnnnnnnnnnnnnnnnnnnnnnnnnnnnnnnnnnnnnnnnnnnnnnnnnnnnnnnnnnnnnnnnnnnnnnnnnnnnnnnnnnnnnnnnnnnnnnnnnnnnnnnnnnnnnnnnnnnnnnnnnnnnnnnnnnnnnnnnnnnnnnnnnnnnnnnnnnnnnnnnnnnnnnnnnnnnnnnnnnnnnnnnnnnnnnnnnnnnnnnnnnnnnnnnnnnnnnnnnnnnnnnnnnnnnnnnnnnnnnnnnnnnnnnnnnnnnnnnnnnnnnnnnnnnnnnnnnnnnnnnnnnnnnnnnnnnnnnnnnnnnnnnnnnnnnnnnnnnnnnnnnnnnnnnnnnnnnnnnnnnnnnnnnnnnnnnnnnnnnnnnnnnnnnnnnnnnnnnnnnnnnnnnnnnnnnnnnnnnnnnnnnnnnnnnnnnnnnnnnnnnnnnnnnnnnnnnnnnnnnnnnnnnnnnnnnnnnnnnnnnnnnnnnnnnnnnnnnnnnnnnnnnnnnnnnnnnnnnnnnnnnnnnnnnnnnnnnnnnnnnnnnnnnnnnnnnnnnnnnnnnnnnnnnnnnnnnnnnnnnnnnnnnnnnnnnnnnnnnnnnnnnnnnnnnnnnnnnnnnnnnnnnnnnnnnnnnnnnnnnnnnnnnnnnnnnnnnnnnnnnnnnnnnnnnnnnnnnnnnnnnnnnnnnnnnnnnnnnnnnnnnnnnnnnnnnnnnnnnnnnnnnnnnnnnnnnnnnnnnnnnnnnnnnnnnnnnnnnnnnnnnnnnnnnnnnnnnnnnnnnnnnnnnnnnnnnnnnnnnnnnnnnnnnnnnnnnnnnnnnnnnnnnnnnnnnnnnnnnnnnnnnnnnnnnnnnnnnnnnnnnnnnnnnnnnnnnnnnnnnnnnnnnnnnnnnnnnnnnnnnnnnnnnnnnnnnnnnnnnnnnnnnnnnnnnnnnnnnnnnnnnnnnnnnnnnnnnnnnnnnnnnnnnnnnnnnnnnnnnnnnnnnnnnnnnnnnnnnnnnnnnnnnnnnnnnnnnnnnnnnnnnnnnnnnnnnnnnnnnnnnnnnnnnnnnnnnnnnnnnnnnnnnnnnnnnnnnnnnnnnnnnnnnnnnnnnnnnnnnnnnnnnnnnnnnnnnnnnnnnnnnnnnnnnnnnnnnnnnnnnnnnnnnnnnnnnnnnnnnnnnnnnnnnnnnnnnnnnnnnnnnnnnnnnnnnnnnnnnnnnnnnnnnnnnnnnnnnnnnnnnnnnnnnnnnnnnnnnnnnnnnnnnnnnnnnnnnnnnnnnnnnnnnnnnnnnnnnnnnnnnnnnnnnnnnnnnnnnnnnnnnnnnnnnnnnnnnnnnnnnnnnnnnnnnnnnnnnnnnnnnnnnnnnnnnnnnnnnnnnnnnnnnnnnnnnnnnnnnnnnnnnnnnnnnnnnnnnnnnnnnnnnnnnnnnnnnnnnnnnnnnnnnnnnnnnnnnnnnnnnnnnnnnnnnnnnnnnnnnnnnnnnnnnnnnnnnnnnnnnnnnnnnnnnnnnnnnnnnnnnnnnnnnnnnnnnnnnnnnnnnnnnnnnnnnnnnnnnnnnnnnnnnnnnnnnnnnnnnnnnnnnnnnnnnnnnnnnnnnnnnnnnnnnnnnnnnnnnnnnnnnnnnnnnnnnnnnnnnnnnnnnnnnnnnnnnnnnnnnnnnnnnnnnnnnnnnnnnnnnnnnnnnnnnnnnnnnnnnnnnnnnnnnnnnnnnnnnnnnnnnnnnnnnnnnnnnnnnnnnnnnnnnnnnnnnnnnnnnnnnnnnnnnnnnnnnnnnnnnnnnnnnnnnnnnnnnnnnnnnnnnnnnnnnnnnnnnnnnnnnnnnnnnnnnnnnnnnnnnnnnnnnnnnnnnnnnnnnnnnnnnnnnnnnnnnnnnnnnnnnnnnnnnnnnnnnnnnnnnnnnnnnnnnnnnnnnnnnnnnnnnnnnnnnnnnnnnnnnnnnnnnnnnnnnnnnnnnnnnnnnnnnnnnnnnnnnnnnnnnnnnnnnnnnnnnnnnnnnnnnnnnnnnnnnnnnnnnnnnnnnnnnnnnnnnnnnnnnnnnnnnnnnnnnnnnnnnnnnnnnnnnnnnnnnnnnnnnnnnnnnnnnnnnnnnnnnnnnnnnnnnnnnnnnnnnnnnnnnnnnnnnnnnnnnnnnnnnnnnnnnnnnnnnnnnnnnnnnnnnnnnnnnnnnnnnnnnnnnnnnnnnnnnnnnnnnnnnnnnnnnnnnnnnnnnnnnnnnnnnnnnnnnnnnnnnnnnnnnnnnnnnnnnnnnnnnnnnnnnnnnnnnnnnnnnnnnnnnnnnnnnnnnnnnnnnnnnnnnnnnnnnnnnnnnnnnnnnnnnnnnnnnnnnnnnnnnnnnnnnnnnnnnnnnnnnnnnnnnnnnnnnnnnnnnnnnnnnnnnnnnnnnnnnnnnnnnnnnnnnnnnnnnnnnnnnnnnnnnnnnnnnnnnnnnnnnnnnnnnnnnnnnnnnnnnnnnnnnnnnnnnnnnnnnnnnnnnnnnnnnnnnnnnnnnnnnnnnnnnnnnnnnnnnnnnnnnnnnnnnnnnnnnnnnnnnnnnnnnnnnnnnnnnnnnnnnnnnnnnnnnnnnnnnnnnnnnnnnnnnnnnnnnnnnnnnnnnnnnnnnnnnnnnnnnnnnnnnnnnnnnnnnnnnnnnnnnnnnnnnnnnnnnnnnnnnnnnnnnnnnnnnnnnnnnnnnnnnnnnnnnnnnnnnnnnnnnnnnnnnnnnnnnnnnnnnnnnnnnnnnnnnnnnnnnnnnnnnnnnnnnnnnnnnnnnnnnnnnnnnnnnnnnnnnnnnnnnnnnnnnnnnnnnnnnnnnnnnnnnnnnnnnnnnnnnnnnnnnnnnnnnnnnnnnnnnnnnnnnnnnnnnnnnnnnnnnnnnnnnnnnnnnnnnnnnnnnnnnnnnnnnnnnnnnnnnnnnnnnnnnnnnnnnnnnnnnnnnnnnnnnnnnnnnnnnnnnnnnnnnnnnnnnnnnnnnnnnnnnnnnnnnnnnnnnnnnnnnnnnnnnnnnnnnnnnnnnnnnnnnnnnnnnnnnnnnnnnnnnnnnnnnnnnnnnnnnnnnnnnnnnnnnnnnnnnnnnnnnnnnnnnnnnnnnnnnnnnnnnnnnnnnnnnnnnnnnnnnnnnnnnnnnnnnnnnnnnnnnnnnnnnnnnnnnnnnnnnnnnnnnnnnnnnnnnnnnnnnnnnnnnnnnnnnnnnnnnnnnnnnnnnnnnnnnnnnnnnnnnnnnnnnnnnnnnnnnnnnnnnnnnnnnnnnnnnnnnnnnnnnnnnnnnnnnnnnnnnnnnnnnnnnnnnnnnnnnnnnnnnnnnnnnnnnnnnnnnnnnnnnnnnnnnnnnnnnnnnnnnnnnnnnnnnnnnnnnnnnnnnnnnnnnnnnnnnnnnnnnnnnnnnnnnnnnnnnnnnnnnnnnnnnnnnnnnnnnnnnnnnnnnnnnnnnnnnnnnnnnnnnnnnnnnnnnnnnnnnnnnnnnnnnnnnnnnnnnnnnnnnnnnnnnnnnnnnnnnnnnnnnnnnnnnnnnnnnnnnnnnnnnnnnnnnnnnnnnnnnnnnnnnnnnnnnnnnnnnnnnnnnnnnnnnnnnnnnnnnnnnnnnnnnnnnnnnnnnnnnnnnnnnnnnnnnnnnnnnnnnnnnnnnnnnnnnnnnnnnnnnnnnnnnnnnnnnnnnnnnnnnnnnnnnnnnnnnnnnnnnnnnnnnnnnnnnnnnnnnnnnnnnnnnnnnnnnnnnnnnnnnnnnnnnnnnnnnnnnnnnnnnnnnnnnnnnnnnnnnnnnnnnnnnnnnnnnnnnnnnnnnnnnnnnnnnnnnnnnnnnnnnnnnnnnnnnnnnnnnnnnnnnnnnnnnnnnnnnnnnnnnnnnnnnnnnnnnnnnnnnnnnnnnnnnnnnnnnnnnnnnnnnnnnnnnnnnnnnnnnnnnnnnnnnnnnnnnnnnnnnnnnnnnnnnnnnnnnnnnnnnnnnnnnnnnnnnnnnnnnnnnnnnnnnnnnnnnnnnnnnnnnnnnnnnnnnnnnnnnnnnnnnnnnnnnnnnnnnnnnnnnnnnnnnnnnnnnnnnnnnnnnnnnnnnnnnnnnnnnnnnnnnnnnnnnnnnnnnnnnnnnnnnnnnnnnnnnnnnnnnnnnnnnnnnnnnnnnnnnnnnnnnnnnnnnnnnnnnnnnnnnnnnnnnnnnnnnnnnnnnnnnnnnnnnnnnnnnnnnnnnnnnnnnnnnnnnnnnnnnnnnnnnnnnnnnnnnnnnnnnnnnnnnnnnnnnnnnnnnnnnnnnnnnnnnnnnnnnnnnnnnnnnnnnnnnnnnnnnnnnnnnnnnnnnnnnnnnnnnnnnnnnnnnnnnnnnnnnnnnnnnnnnnnnnnnnnnnnnnnnnnnnnnnnnnnnnnnnnnnnnnnnnnnnnnnnnnnnnnnnnnnnnnnnnnnnnnnnnnnnnnnnnnnnnnnnnnnnnnnnnnnnnnnnnnnnnnnnnnnnnnnnnnnnnnnnnnnnnnnnnnnnnnnnnnnnnnnnnnnnnnnnnnnnnnnnnnnnnnnnnnnnnnnnnnnnnnnnnnnnnnnnnnnnnnnnnnnnnnnnnnnnnnnnnnnnnnnnnnnnnnnnnnnnnnnnnnnnnnnnnnnnnnnnnnnnnnnnnnnnnnnnnnnnnnnnnnnnnnnnnnnnnnnnnnnnnnnnnnnnnnnnnnnnnnnnnnnnnnnnnnnnnnnnnnnnnnnnnnnnnnnnnnnnnnnnnnnnnnnnnnnnnnnnnnnnnnnnnnnnnnnnnnnnnnnnnnnnnnnnnnnnnnnnnnnnnnnnnnnnnnnnnnnnnnnnnnnnnnnnnnnnnnnnnnnnnnnnnnnnnnnnnnnnnnnnnnnnnnnnnnnnnnnnnnnnnnnnnnnnnnnnnnnnnnnnnnnnnnnnnnnnnnnnnnnnnnnnnnnnnnnnnnnnnnnnnnnnnnnnnnnnnnnnnnnnnnnnnnnnnnnnnnnnnnnnnnnnnnnnnnnnnnnnnnnnnnnnnnnnnnnnnnnnnnnnnnnnnnnnnnnnnnnnnnnnnnnnnnnnnnnnnnnnnnnnnnnnnnnnnnnnnnnnnnnnnnnnnnnnnnnnnnnnnnnnnnnnnnnnnnnnnnnnnnnnnnnnnnnnnnnnnnnnnnnnnnnnnnnnnnnnnnnnnnnnnnnnnnnnnnnnnnnnnnnnnnnnnnnnnnnnnnnnnnnnnnnnnnnnnnnnnnnnnnnnnnnnnnnnnnnnnnnnnnnnnnnnnnnnnnnnnnnnnnnnnnnnnnnnnnnnnnnnnnnnnnnnnnnnnnnnnnnnnnnnnnnnnnnnnnnnnnnnnnnnnnnnnnnnnnnnnnnnnnnnnnnnnnnnnnnnnnnnnnnnnnnnnnnnnnnnnnnnnnnnnnnnnnnnnnnnnnnnnnnnnnnnnnnnnnnnnnnnnnnnnnnnnnnnnnnnnnnnnnnnnnnnnnnnnnnnnnnnnnnnnnnnnnnnnnnnnnnnnnnnnnnnnnnnnnnnnnnnnnnnnnnnnnnnnnnnnnnnnnnnnnnnnnnnnnnnnnnnnnnnnnnnnnnnnnnnnnnnnnnnnnnnnnnnnnnnnnnnnnnnnnnnnnnnnnnnnnnnnnnnnnnnnnnnnnnnnnnnnnnnnnnnnnnnnnnnnnnnnnnnnnnnnnnnnnnnnnnnnnnnnnnnnnnnnnnnnnnnnnnnnnnnnnnnnnnnnnnnnnnnnnnnnnnnnnnnnnnnnnnnnnnnnnnnnnnnnnnnnnnnnnnnnnnnnnnnnnnnnnnnnnnnnnnnnnnnnnnnnnnnnnnnnnnnnnnnnnnnnnnnnnnnnnnnnnnnnnnnnnnnnnnnnnnnnnnnnnnnnnnnnnnnnnnnnnnnnnnnnnnnnnnnnnnnnnnnnnnnnnnnnnnnnnnnnnnnnnnnnnnnnnnnnnnnnnnnnnnnnnnnnnnnnnnnnnnnnnnnnnnnnnnnnnnnnnnnnnnnnnnnnnnnnnnnnnnnnnnnnnnnnnnnnnnnnnnnnnnnnnnnnnnnnnnnnnnnnnnnnnnnnnnnnnnnnnnnnnnnnnnnnnnnnnnnnnnnnnnnnnnnnnnnnnnnnnnnnnnnnnnnnnnnnnnnnnnnnnnnnnnnnnnnnnnnnnnnnnnnnnnnnnnnnnnnnnnnnnnnnnnnnnnnnnnnnnnnnnnnnnnnnnnnnnnnnnnnnnnnnnnnnnnnnnnnnnnnnnnnnnnnnnnnnnnnnnnnnnnnnnnnnnnnnnnnnnnnnnnnnnnnnnnnnnnnnnnnnnnnnnnnnnnnnnnnnnnnnnnnnnnnnnnnnnnnnnnnnnnnnnnnnnnnnnnnnnnnnnnnnnnnnnnnnnnnnnnnnnnnnnnnnnnnnnnnnnnnnnnnnnnnnnnnnnnnnnnnnnnnnnnnnnnnnnnnnnnnnnnnnnnnnnnnnnnnnnnnnnnnnnnnnnnnnnnnnnnnnnnnnnnnnnnnnnnnnnnnnnnnnnnnnnnnnnnnnnnnnnnnnnnnnnnnnnnnnnnnnnnnnnnnnnnnnnnnnnnnnnnnnnnnnnnnnnnnnnnnnnnnnnnnnnnnnnnnnnnnnnnnnnnnnnnnnnnnnnnnnnnnnnnnnnnnnnnnnnnnnnnnnnnnnnnnnnnnnnnnnnnnnnnnnnnnnnnnnnnnnnnnnnnnnnnnnnnnnnnnnnnnnnnnnnnnnnnnnnnnnnnnnnnnnnnnnnnnnnnnnnnnnnnnnnnnnnnnnnnnnnnnnnnnnnnnnnnnnnnnnnnnnnnnnnnnnnnnnnnnnnnnnnnnnnnnnnnnnnnnnnnnnnnnnnnnnnnnnnnnnnnnnnnnnnnnnnnnnnnnnnnnnnnnnnnnnnnnnnnnnnnnnnnnnnnnnnnnnnnnnnnnnnnnnnnnnnnnnnnnnnnnnnnnnnnnnnnnnnnnnnnnnnnnnnnnnnnnnnnnnnnnnnnnnnnnnnnnnnnnnnnnnnnnnnnnnnnnnnnnnnnnnnnnnnnnnnnnnnnnnnnnnnnnnnnnnnnnnnnnnnnnnnnnnnnnnnnnnnnnnnnnnnnnnnnnnnnnnnnnnnnnnnnnnnnnnnnnnnnnnnnnnnnnnnnnnnnnnnnnnnnnnnnnnnnnnnnnnnnnnnnnnnnnnnnnnnnnnnnnnnnnnnnnnnnnnnnnnnnnnnnnnnnnnnnnnnnnnnnnnnnnnnnnnnnnnnnnnnnnnnnnnnnnnnnnnnnnnnnnnnnnnnnnnnnnnnnnnnnnnnnnnnnnnnnnnnnnnnnnnnnnnnnnnnnnnnnnnnnnnnnnnnnnnnnnnnnnnnnnnnnnnnnnnnnnnnnnnnnnnnnnnnnnnnnnnnnnnnnnnnnnnnnnnnnnnnnnnnnnnnnnnnnnnnnnnnnnnnnnnnnnnnnnnnnnnnnnnnnnnnnnnnnnnnnnnnnnnnnnnnnnnnnnnnnnnnnnnnnnnnnnnnnnnnnnnnnnnnnnnnnnnnnnnnnnnnnnnnnnnnnnnnnnnnnnnnnnnnnnnnnnnnnnnnnnnnnnnnnnnnnnnnnnnnnnnnnnnnnnnnnnnnnnnnnnnnnnnnnnnnnnnnnnnnnnnnnnnnnnnnnnnnnnnnnnnnnnnnnnnnnnnnnnnnnnnnnnnnnnnnnnnnnnnnnnnnnnnnnnnnnnnnnnnnnnnnnnnnnnnnnnnnnnnnnnnnnnnnnnnnnnnnnnnnnnnnnnnnnnnnnnnnnnnnnnnnnnnnnnnnnnnnnnnnnnnnnnnnnnnnnnnnnnnnnnnnnnnnnnnnnnnnnnnnnnnnnnnnnnnnnnnnnnnnnnnnnnnnnnnnnnnnnnnnnnnnnnnnnnnnnnnnnnnnnnnnnnnnnnnnnnnnnnnnnnnnnnnnnnnnnnnnnnnnnnnnnnnnnnnnnnnnnnnnnnnnnnnnnnnnnnnnnnnnnnnnnnnnnnnnnnnnnnnnnnnnnnnnnnnnnnnnnnnnnnnnnnnnnnnnnnnnnnnnnnnnnnnnnnnnnnnnnnnnnnnnnnnnnnnnnnnnnnnnnnnnnnnnnnnnnnnnnnnnnnnnnnnnnnnnnnnnnnnnnnnnnnnnnnnnnnnnnnnnnnnnnnnnnnnnnnnnnnnnnnnnnnnnnnnnnnnnnnnnnnnnnnnnnnnnnnnnnnnnnnnnnnnnnnnnnnnnnnnnnnnnnnnnnnnnnnnnnnnnnnnnnnnnnnnnnnnnnnnnnnnnnnnnnnnnnnnnnnnnnnnnnnnnnnnnnnnnnnnnnnnnnnnnnnnnnnnnnnnnnnnnnnnnnnnnnnnnnnnnnnnnnnnnnnnnnnnnnnnnnnnnnnnnnnnnnnnnnnnnnnnnnnnnnnnnnnnnnnnnnnnnnnnnnnnnnnnnnnnnnnnnnnnnnnnnnnnnnnnnnnnnnnnnnnnnnnnnnnnnnnnnnnnnnnnnnnnnnnnnnnnnnnnnnnnnnnnnnnnnnnnnnnnnnnnnnnnnnnnnnnnnnnnnnnnnnnnnnnnnnnnnnnnnnnnnnnnnnnnnnnnnnnnnnnnnnnnnnnnnnnnnnnnnnnnnnnnnnnnnnnnnnnnnnnnnnnnnnnnnnnnnnnnnnnnnnnnnnnnnnnnnnnnnnnnnnnnnnnnnnnnnnnnnnnnnnnnnnnnnnnnnnnnnnnnnnnnnnnnnnnnnnnnnnnnnnnnnnnnnnnnnnnnnnnnnnnnnnnnnnnnnnnnnnnnnnnnnnnnnnnnnnnnnnnnnnnnnnnnnnnnnnnnnnnnnnnnnnnnnnnnnnnnnnnnnnnnnnnnnnnnnnnnnnnnnnnnnnnnnnnnnnnnnnnnnnnnnnnnnnnnnnnnnnnnnnnnnnnnnnnnnnnnnnnnnnnnnnnnnnnnnnnnnnnnnnnnnnnnnnnnnnnnnnnnnnnnnnnnnnnnnnnnnnnnnnnnnnnnnnnnnnnnnnnnnnnnnnnnnnnnnnnnnnnnnnnnnnnnnnnnnnnnnnnnnnnnnnnnnnnnnnnnnnnnnnnnnnnnnnnnnnnnnnnnnnnnnnnnnnnnnnnnnnnnnnnnnnnnnnnnnnnnnnnnnnnnnnnnnnnnnnnnnnnnnnnnnnnnnnnnnnnnnnnnnnnnnnnnnnnnnnnnnnnnnnnnnnnnnnnnnnnnnnnnnnnnnnnnnnnnnnnnnnnnnnnnnnnnnnnnnnnnnnnnnnnnnnnnnnnnnnnnnnnnnnnnnnnnnnnnnnnnnnnnnnnnnnnnnnnnnnnnnnnnnnnnnnnnnnnnnnnnnnnnnnnnnnnnnnnnnnnnnnnnnnnnnnnnnnnnnnnnnnnnnnnnnnnnnnnnnnnnnnnnnnnnnnnnnnnnnnnnnnnnnnnnnnnnnnnnnnnnnnnnnnnnnnnnnnnnnnnnnnnnnnnnnnnnnnnnnnnnnnnnnnnnnnnnnnnnnnnnnnnnnnnnnnnnnnnnnnnnnnnnnnnnnnnnnnnnnnnnnnnnnnnnnnnnnnnnnnnnnnnnnnnnnnnnnnnnnnnnnnnnnnnnnnnnnnnnnnnnnnnnnnnnnnnnnnnnnnnnnnnnnnnnnnnnnnnnnnnnnnnnnnnnnnnnnnnnnnnnnnnnnnnnnnnnnnnnnnnnnnnnnnnnnnnnnnnnnnnnnnnnnnnnnnnnnnnnnnnnnnnnnnnnnnnnnnnnnnnnnnnnnnnnnnnnnnnnnnnnnnnnnnnnnnnnnnnnnnnnnnnnnnnnnnnnnnnnnnnnnnnnnnnnnnnnnnnnnnnnnnnnnnnnnnnnnnnnnnnnnnnnnnnnnnnnnnnnnnnnnnnnnnnnnnnnnnnnnnnnnnnnnnnnnnnnnnnnnnnnnnnnnnnnnnnnnnnnnnnnnnnnnnnnnnnnnnnnnnnnnnnnnnnnnnnnnnnnnnnnnnnnnnnnnnnnnnnnnnnnnnnnnnnnnnnnnnnnnnnnnnnnnnnnnnnnnnnnnnnnnnnnnnnnnnnnnnnnnnnnnnnnnnnnnnnnnnnnnnnnnnnnnnnnnnnnnnnnnnnnnnnnnnnnnnnnnnnnnnnnnnnnnnnnnnnnnnnnnnnnnnnnnnnnnnnnnnnnnnnnnnnnnnnnnnnnnnnnnnnnnnnnnnnnnnnnnnnnnnnnnnnnnnnnnnnnnnnnnnnnnnnnnnnnnnnnnnnnnnnnnnnnnnnnnnnnnnnnnnnnnnnnnnnnnnnnnnnnnnnnnnnnnnnnnnnnnnnnnnnnnnnnnnnnnnnnnnnnnnnnnnnnnnnnnnnnnnnnnnnnnnnnnnnnnnnnnnnnnnnnnnnnnnnnnnnnnnnnnnnnnnnnnnnnnnnnnnnnnnnnnnnnnnnnnnnnnnnnnnnnnnnnnnnnnnnnnnnnnnnnnnnnnnnnnnnnnnnnnnnnnnnnnnnnnnnnnnnnnnnnnnnnnnnnnnnnnnnnnnnnnnnnnnnnnnnnnnnnnnnnnnnnnnnnnnnnnnnnnnnnnnnnnnnnnnnnnnnnnnnnnnnnnnnnnnnnnnnnnnnnnnnnnnnnnnnnnnnnnnnnnnnnnnnnnnnnnnnnnnnnnnnnnnnnnnnnnnnnnnnnnnnnnnnnnnnnnnnnnnnnnnnnnnnnnnnnnnnnnnnnnnnnnnnnnnnnnnnnnnnnnnnnnnnnnnnnnnnnnnnnnnnnnnnnnnnnnnnnnnnnnnnnnnnnnnnnnnnnnnnnnnnnnnnnnnnnnnnnnnnnnnnnnnnnnnnnnnnnnnnnnnnnnnnnnnnnnnnnnnnnnnnnnnnnnnnnnnnnnnnnnnnnnnnnnnnnnnnnnnnnnnnnnnnnnnnnnnnnnnnnnnnnnnnnnnnnnnnnnnnnnnnnnnnnnnnnnnnnnnnnnnnnnnnnnnnnnnnnnnnnnnnnnnnnnnnnnnnnnnnnnnnnnnnnnnnnnnnnnnnnnnnnnnnnnnnnnnnnnnnnnnnnnnnnnnnnnnnnnnnnnnnnnnnnnnnnnnnnnnnnnnnnnnnnnnnnnnnnnnnnnnnnnnnnnnnnnnnnnnnnnnnnnnnnnnnnnnnnnnnnnnnnnnnnnnnnnnnnnnnnnnnnnnnnnnnnnnnnnnnnnnnnnnnnnnnnnnnnnnnnnnnnnnnnnnnnnnnnnnnnnnnnnnnnnnnnnnnnnnnnnnnnnnnnnnnnnnnnnnnnnnnnnnnnnnnnnnnnnnnnnnnnnnnnnnnnnnnnnnnnnnnnnnnnnnnnnnnnnnnnnnnnnnnnnnnnnnnnnnnnnnnnnnnnnnnnnnnnnnnnnnnnnnnnnnnnnnnnnnnnnnnnnnnnnnnnnnnnnnnnnnnnnnnnnnnnnnnnnnnnnnnnnnnnnnnnnnnnnnnnnnnnnnnnnnnnnnnnnnnnnnnnnnnnnnnnnnnnnnnnnnnnnnnnnnnnnnnnnnnnnnnnnnnnnnnnnnnnnnnnnnnnnnnnnnnnnnnnnnnnnnnnnnnnnnnnnnnnnnnnnnnnnnnnnnnnnnnnnnnnnnnnnnnnnnnnnnnnnnnnnnnnnnnnnnnnnnnnnnnnnnnnnnnnnnnnnnnnnnnnnnnnnnnnnnnnnnnnnnnnnnnnnnnnnnnnnnnnnnnnnnnnnnnnnnnnnnnnnnnnnnnnnnnnnnnnnnnnnnnnnnnnnnnnnnnnnnnnnnnnnnnnnnnnnnnnnnnnnnnnnnnnnnnnnnnnnnnnnnnnnnnnnnnnnnnnnnnnnnnnnnnnnnnnnnnnnnnnnnnnnnnnnnnnnnnnnnnnnnnnnnnnnnnnnnnnnnnnnnnnnnnnnnnnnnnnnnnnnnnnnnnnnnnnnnnnnnnnnnnnnnnnnnnnnnnnnnnnnnnnnnnnnnnnnnnnnnnnnnnnnnnnnnnnnnnnnnnnnnnnnnnnnnnnnnnnnnnnnnnnnnnnnnnnnnnnnnnnnnnnnnnnnnnnnnnnnnnnnnnnnnnnnnnnnnnnnnnnnnnnnnnnnnnnnnnnnnnnnnnnnnnnnnnnnnnnnnnnnnnnnnnnnnnnnnnnnnnnnnnnnnnnnnnnnnnnnnnnnnnnnnnnnnnnnnnnnnnnnnnnnnnnnnnnnnnnnnnnnnnnnnnnnnnnnnnnnnnnnnnnnnnnnnnnnnnnnnnnnnnnnnnnnnnnnnnnnnnnnnnnnnnnnnnnnnnnnnnnnnnnnnnnnnnnnnnnnnnnnnnnnnnnnnnnnnnnnnnnnnnnnnnnnnnnnnnnnnnnnnnnnnnnnnnnnnnnnnnnnnnnnnnnnnnnnnnnnnnnnnnnnnnnnnnnnnnnnnnnnnnnnnnnnnnnnnnnnnnnnnnnnnnnnnnnnnnnnnnnnnnnnnnnnnnnnnnnnnnnnnnnnnnnnnnnnnnnnnnnnnnnnnnnnnnnnnnnnnnnnnnnnnnnnnnnnnnnnnnnnnnnnnnnnnnnnnnnnnnnnnnnnnnnnnnnnnnnnnnnnnnnnnnnnnnnnnnnnnnnnnnnnnnnnnnnnnnnnnnnnnnnnnnnnnnnnnnnnnnnnnnnnnnnnnnnnnnnnnnnnnnnnnnnnnnnnnnnnnnnnnnnnnnnnnnnnnnnnnnnnnnnnnnnnnnnnnnnnnnnnnnnnnnnnnnnnnnnnnnnnnnnnnnnnnnnnnnnnnnnnnnnnnnnnnnnnnnnnnnnnnnnnnnnnnnnnnnnnnnnnnnnnnnnnnnnnnnnnnnnnnnnnnnnnnnnnnnnnnnnnnnnnnnnnnnnnnnnnnnnnnnnnnnnnnnnnnnnnnnnnnnnnnnnnnnnnnnnnnnnnnnnnnnnnnnnnnnnnnnnnnnnnnnnnnnnnnnnnnnnnnnnnnnnnnnnnnnnnnnnnnnnnnnnnnnnnnnnnnnnnnnnnnnnnnnnnnnnnnnnnnnnnnnnnnnnnnnnnnnnnnnnnnnnnnnnnnnnnnnnnnnnnnnnnnnnnnnnnnnnnnnnnnnnnnnnnnnnnnnnnnnnnnnnnnnnnnnnnnnnnnnnnnnnnnnnnnnnnnnnnnnnnnnnnnnnnnnnnnnnnnnnnnnnnnnnnnnnnnnnnnnnnnnnnnnnnnnnnnnnnnnnnnnnnnnnnnnnnnnnnnnnnnnnnnnnnnnnnnnnnnnnnnnnnnnnnnnnnnnnnnnnnnnnnnnnnnnnnnnnnnnnnnnnnnnnnnnnnnnnnnnnnnnnnnnnnnnnnnnnnnnnnnnnnnnnnnnnnnnnnnnnnnnnnnnnnnnnnnnnnnnnnnnnnnnnnnnnnnnnnnnnnnnnnnnnnnnnnnnnnnnnnnnnnnnnnnnnnnnnnnnnnnnnnnnnnnnnnnnnnnnnnnnnnnnnnnnnnnnnnnnnnnnnnnnnnnnnnnnnnnnnnnnnnnnnnnnnnnnnnnnnnnnnnnnnnnnnnnnnnnnnnnnnnnnnnnnnnnnnnnnnnnnnnnnnnnnnnnnnnnnnnnnnnnnnnnnnnnnnnnnnnnnnnnnnnnnnnnnnnnnnnnnnnnnnnnnnnnnnnnnnnnnnnnnnnnnnnnnnnnnnnnnnnnnnnnnnnnnnnnnnnnnnnnnnnnnnnnnnnnnnnnnnnnnnnnnnnnnnnnnnnnnnnnnnnnnnnnnnnnnnnnnnnnnnnnnnnnnnnnnnnnnnnnnnnnnnnnnnnnnnnnnnnnnnnnnnnnnnnnnnnnnnnnnnnnnnnnnnnnnnnnnnnnnnnnnnnnnnnnnnnnnnnnnnnnnnnnnnnnnnnnnnnnnnnnnnnnnnnnnnnnnnnnnnnnnnnnnnnnnnnnnnnnnnnnnnnnnnnnnnnnnnnnnnnnnnnnnnnnnnnnnnnnnnnnnnnnnnnnnnnnnnnnnnnnnnnnnnnnnnnnnnnnnnnnnnnnnnnnnnnnnnnnnnnnnnnnnnnnnnnnnnnnnnnnnnnnnnnnnnnnnnnnnnnnnnnnnnnnnnnnnnnnnnnnnnnnnnnnnnnnnnnnnnnnnnnnnnnnnnnnnnnnnnnnnnnnnnnnnnnnnnnnnnnnnnnnnnnnnnnnnnnnnnnnnnnnnnnnnnnnnnnnnnnnnnnnnnnnnnnnnnnnnnnnnnnnnnnnnnnnnnnnnnnnnnnnnnnnnnnnnnnnnnnnnnnnnnnnnnnnnnnnnnnnnnnnnnnnnnnnnnnnnnnnnnnnnnnnnnnnnnnnnnnnnnnnnnnnnnnnnnnnnnnnnnnnnnnnnnnnnnnnnnnnnnnnnnnnnnnnnnnnnnnnnnnnnnnnnnnnnnnnnnnnnnnnnnnnnnnnnnnnnnnnnnnnnnnnnnnnnnnnnnnnnnnnnnnnnnnnnnnnnnnnnnnnnnnnnnnnnnnnnnnnnnnnnnnnnnnnnnnnnnnnnnnnnnnnnnnnnnnnnnnnnnnnnnnnnnnnnnnnnnnnnnnnnnnnnnnnnnnnnnnnnnnnnnnnnnnnnnnnnnnnnnnnnnnnnnnnnnnnnnnnnnnnnnnnnnnnnnnnnnnnnnnnnnnnnnnnnnnnnnnnnnnnnnnnnnnnnnnnnnnnnnnnnnnnnnnnnnnnnnnnnnnnnnnnnnnnnnnnnnnnnnnnnnnnnnnnnnnnnnnnnnnnnnnnnnnnnnnnnnnnnnnnnnnnnnnnnnnnnnnnnnnnnnnnnnnnnnnnnnnnnnnnnnnnnnnnnnnnnnnnnnnnnnnnnnnnnnnnnnnnnnnnnnnnnnnnnnnnnnnnnnnnnnnnnnnnnnnnnnnnnnnnnnnnnnnnnnnnnnnnnnnnnnnnnnnnnnnnnnnnnnnnnnnnnnnnnnnnnnnnnnnnnnnnnnnnnnnnnnnnnnnnnnnnnnnnnnnnnnnnnnnnnnnnnnnnnnnnnnnnnnnnnnnnnnnnnnnnnnnnnnnnnnnnnnnnnnnnnnnnnnnnnnnnnnnnnnnnnnnnnnnnnnnnnnnnnnnnnnnnnnnnnnnnnnnnnnnnnnnnnnnnnnnnnnnnnnnnnnnnnnnnnnnnnnnnnnnnnnnnnnnnnnnnnnnnnnnnnnnnnnnnnnnnnnnnnnnnnnnnnnnnnnnnnnnnnnnnnnnnnnnnnnnnnnnnnnnnnnnnnnnnnnnnnnnnnnnnnnnnnnnnnnnnnnnnnnnnnnnnnnnnnnnnnnnnnnnnnnnnnnnnnnnnnnnnnnnnnnnnnnnnnnnnnnnnnnnnnnnnnnnnnnnnnnnnnnnnnnnnnnnnnnnnnnnnnnnnnnnnnnnnnnnnnnnnnnnnnnnnnnnnnnnnnnnnnnnnnnnnnnnnnnnnnnnnnnnnnnnnnnnnnnnnnnnnnnnnnnnnnnnnnnnnnnnnnnnnnnnnnnnnnnnnnnnnnnnnnnnnnnnnnnnnnnnnnnnnnnnnnnnnnnnnnnnnnnnnnnnnnnnnnnnnnnnnnnnnnnnnnnnnnnnnnnnnnnnnnnnnnnnnnnnnnnnnnnnnnnnnnnnnnnnnnnnnnnnnnnnnnnnnnnnnnnnnnnnnnnnnnnnnnnnnnnnnnnnnnnnnnnnnnnnnnnnnnnnnnnnnnnnnnnnnnnnnnnnnnnnnnnnnnnnnnnnnnnnnnnnnnnnnnnnnnnnnnnnnnnnnnnnnnnnnnnnnnnnnnnnnnnnnnnnnnnnnnnnnnnnnnnnnnnnnnnnnnnnnnnnnnnnnnnnnnnnnnnnnnnnnnnnnnnnnnnnnnnnnnnnnnnnnnnnnnnnnnnnnnnnnnnnnnnnnnnnnnnnnnnnnnnnnnnnnnnnnnnnnnnnnnnnnnnnnnnnnnnnnnnnnnnnnnnnnnnnnnnnnnnnnnnnnnnnnnnnnnnnnnnnnnnnnnnnnnnnnnnnnnnnnnnnnnnnnnnnnnnnnnnnnnnnnnnnnnnnnnnnnnnnnnnnnnnnnnnnnnnnnnnnnnnnnnnnnnnnnnnnnnnnnnnnnnnnnnnnnnnnnnnnnnnnnnnnnnnnnnnnnnnnnnnnnnnnnnnnnnnnnnnnnnnnnnnnnnnnnnnnnnnnnnnnnnnnnnnnnnnnnnnnnnnnnnnnnnnnnnnnnnnnnnnnnnnnnnnnnnnnnnnnnnnnnnnnnnnnnnnnnnnnnnnnnnnnnnnnnnnnnnnnnnnnnnnnnnnnnnnnnnnnnnnnnnnnnnnnnnnnnnnnnnnnnnnnnnnnnnnnnnnnnnnnnnnnnnnnnnnnnnnnnnnnnnnnnnnnnnnnnnnnnnnnnnnnnnnnnnnnnnnnnnnnnnnnnnnnnnnnnnnnnnnnnnnnnnnnnnnnnnnnnnnnnnnnnnnnnnnnnnnnnnnnnnnnnnnnnnnnnnnnnnnnnnnnnnnnnnnnnnnnnnnnnnnnnnnnnnnnnnnnnnnnnnnnnnnnnnnnnnnnnnnnnnnnnnnnnnnnnnnnnnnnnnnnnnnnnnnnnnnnnnnnnnnnnnnnnnnnnnnnnnnnnnnnnnnnnnnnnnnnnnnnnnnnnnnnnnnnnnnnnnnnnnnnnnnnnnnnnnnnnnnnnnnnnnnnnnnnnnnnnnnnnnnnnnnnnnnnnnnnnnnnnnnnnnnnnnnnnnnnnnnnnnnnnnnnnnnnnnnnnnnnnnnnnnnnnnnnnnnnnnnnnnnnnnnnnnnnnnnnnnnnnnnnnnnnnnnnnnnnnnnnnnnnnnnnnnnnnnnnnnnnnnnnnnnnnnnnnnnnnnnnnnnnnnnnnnnnnnnnnnnnnnnnnnnnnnnnnnnnnnnnnnnnnnnnnnnnnnnnnnnnnnnnnnnnnnnnnnnnnnnnnnnnnnnnnnnnnnnnnnnnnnnnnnnnnnnnnnnnnnnnnnnnnnnnnnnnnnnnnnnnnnnnnnnnnnnnnnnnnnnnnnnnnnnnnnnnnnnnnnnnnnnnnnnnnnnnnnnnnnnnnnnnnnnnnnnnnnnnnnnnnnnnnnnnnnnnnnnnnnnnnnnnnnnnnnnnnnnnnnnnnnnnnnnnnnnnnnnnnnnnnnnnnnnnnnnnnnnnnnnnnnnnnnnnnnnnnnnnnnnnnnnnnnnnnnnnnnnnnnnnnnnnnnnnnnnnnnnnnnnnnnnnnnnnnnnnnnnnnnnnnnnnnnnnnnnnnnnnnnnnnnnnnnnnnnnnnnnnnnnnnnnnnnnnnnnnnnnnnnnnnnnnnnnnnnnnnnnnnnnnnnnnnnnnnnnnnnnnnnnnnnnnnnnnnnnnnnnnnnnnnnnnnnnnnnnnnnnnnnnnnnnnnnnnnnnnnnnnnnnnnnnnnnnnnnnnnnnnnnnnnnnnnnnnnnnnnnnnnnnnnnnnnnnnnnnnnnnnnnnnnnnnnnnnnnnnnnnnnnnnnnnnnnnnnnnnnnnnnnnnnnnnnnnnnnnnnnnnnnnnnnnnnnnnnnnnnnnnnnnnnnnnnnnnnnnnnnnnnnnnnnnnnnnnnnnnnnnnnnnnnnnnnnnnnnnnnnnnnnnnnnnnnnnnnnnnnnnnnnnnnnnnnnnnnnnnnnnnnnnnnnnnnnnnnnnnnnnnnnnnnnnnnnnnnnnnnnnnnnnnnnnnnnnnnnnnnnnnnnnnnnnnnnnnnnnnnnnnnnnnnnnnnnnnnnnnnnnnnnnnnnnnnnnnnnnnnnnnnnnnnnnnnnnnnnnnnnnnnnnnnnnnnnnnnnnnnnnnnnnnnnnnnnnnnnnnnnnnnnnnnnnnnnnnnnnnnnnnnnnnnnnnnnnnnnnnnnnnnnnnnnnnnnnnnnnnnnnnnnnnnnnnnnnnnnnnnnnnnnnnnnnnnnnnnnnnnnnnnnnnnnnnnnnnnnnnnnnnnnnnnnnnnnnnnnnnnnnnnnnnnnnnnnnnnnnnnnnnnnnnnnnnnnnnnnnnnnnnnnnnnnnnnnnnnnnnnnnnnnnnnnnnnnnnnnnnnnnnnnnnnnnnnnnnnnnnnnnnnnnnnnnnnnnnnnnnnnnnnnnnnnnnnnnnnnnnnnnnnnnnnnnnnnnnnnnnnnnnnnnnnnnnnnnnnnnnnnnnnnnnnnnnnnnnnnnnnnnnnnnnnnnnnnnnnnnnnnnnnnnnnnnnnnnnnnnnnnnnnnnnnnnnnnnnnnnnnnnnnnnnnnnnnnnnnnnnnnnnnnnnnnnnnnnnnnnnnnnnnnnnnnnnnnnnnnnnnnnnnnnnnnnnnnnnnnnnnnnnnnnnnnnnnnnnnnnnnnnnnnnnnnnnnnnnnnnnnnnnnnnnnnnnnnnnnnnnnnnnnnnnnnnnnnnnnnnnnnnnnnnnnnnnnnnnnnnnnnnnnnnnnnnnnnnnnnnnnnnnnnnnnnnnnnnnnnnnnnnnnnnnnnnnnnnnnnnnnnnnnnnnnnnnnnnnnnnnnnnnnnnnnnnnnnnnnnnnnnnnnnnnnnnnnnnnnnnnnnnnnnnnnnnnnnnnnnnnnnnnnnnnnnnnnnnnnnnnnnnnnnnnnnnnnnnnnnnnnnnnnnnnnnnnnnnnnnnnnnnnnnnnnnnnnnnnnnnnnnnnnnnnnnnnnnnnnnnnnnnnnnnnnnnnnnnnnnnnnnnnnnnnnnnnnnnnnnnnnnnnnnnnnnnnnnnnnnnnnnnnnnnnnnnnnnnnnnnnnnnnnnnnnnnnnnnnnnnnnnnnnnnnnnnnnnnnnnnnnnnnnnnnnnnnnnnnnnnnnnnnnnnnnnnnnnnnnnnnnnnnnnnnnnnnnnnnnnnnnnnnnnnnnnnnnnnnnnnnnnnnnnnnnnnnnnnnnnnnnnnnnnnnnnnnnnnnnnnnnnnnnnnnnnnnnnnnnnnnnnnnnnnnnnnnnnnnnnnnnnnnnnnnnnnnnnnnnnnnnnnnnnnnnnnnnnnnnnnnnnnnnnnnnnnnnnnnnnnnnnnnnnnnnnnnnnnnnnnnnnnnnnnnnnnnnnnnnnnnnnnnnnnnnnnnnnnnnnnnnnnnnnnnnnnnnnnnnnnnnnnnnnnnnnnnnnnnnnnnnnnnnnnnnnnnnnnnnnnnnnnnnnnnnnnnnnnnnnnnnnnnnnnnnnnnnnnnnnnnnnnnnnnnnnnnnnnnnnnnnnnnnnnnnnnnnnnnnnnnnnnnnnnnnnnnnnnnnnnnnnnnnnnnnnnnnnnnnnnnnnnnnnnnnnnnnnnnnnnnnnnnnnnnnnnnnnnnnnnnnnnnnnnnnnnnnnnnnnnnnnnnnnnnnnnnnnnnnnnnnnnnnnnnnnnnnnnnnnnnnnnnnnnnnnnnnnnnnnnnnnnnnnnnnnnnnnnnnnnnnnnnnnnnnnnnnnnnnnnnnnnnnnnnnnnnnnnnnnnnnnnnnnnnnnnnnnnnnnnnnnnnnnnnnnnnnnnnnnnnnnnnnnnnnnnnnnnnnnnnnnnnnnnnnnnnnnnnnnnnnnnnnnnnnnnnnnnnnnnnnnnnnnnnnnnnnnnnnnnnnnnnnnnnnnnnnnnnnnnnnnnnnnnnnnnnnnnnnnnnnnnnnnnnnnnnnnnnnnnnnnnnnnnnnnnnnnnnnnnnnnnnnnnnnnnnnnnnnnnnnnnnnnnnnnnnnnnnnnnnnnnnnnnnnnnnnnnnnnnnnnnnnnnnnnnnnnnnnnnnnnnnnnnnnnnnnnnnnnnnnnnnnnnnnnnnnnnnnnnnnnnnnnnnnnnnnnnnnnnnnnnnnnnnnnnnnnnnnnnnnnnnnnnnnnnnnnnnnnnnnnnnnnnnnnnnnnnnnnnnnnnnnnnnnnnnnnnnnnnnnnnnnnnnnnnnnnnnnnnnnnnnnnnnnnnnnnnnnnnnnnnnnnnnnnnnnnnnnnnnnnnnnnnnnnnnnnnnnnnnnnnnnnnnnnnnnnnnnnnnnnnnnnnnnnnnnnnnnnnnnnnnnnnnnnnnnnnnnnnnnnnnnnnnnnnnnnnnnnnnnnnnnnnnnnnnnnnnnnnnnnnnnnnnnnnnnnnnnnnnnnnnnnnnnnnnnnnnnnnnnnnnnnnnnnnnnnnnnnnnnnnnnnnnnnnnnnnnnnnnnnnnnnnnnnnnnnnnnnnnnnnnnnnnnnnnnnnnnnnnnnnnnnnnnnnnnnnnnnnnnnnnnnnnnnnnnnnnnnnnnnnnnnnnnnnnnnnnnnnnnnnnnnnnnnnnnnnnnnnnnnnnnnnnnnnnnnnnnnnnnnnnnnnnnnnnnnnnnnnnnnnnnnnnnnnnnnnnnnnnnnnnnnnnnnnnnnnnnnnnnnnnnnnnnnnnnnnnnnnnnnnnnnnnnnnnnnnnnnnnnnnnnnnnnnnnnnnnnnnnnnnnnnnnnnnnnnnnnnnnnnnnnnnnnnnnnnnnnnnnnnnnnnnnnnnnnnnnnnnnnnnnnnnnnnnnnnnnnnnnnnnnnnnnnnnnnnnnnnnnnnnnnnnnnnnnnnnnnnnnnnnnnnnnnnnnnnnnnnnnnnnnnnnnnnnnnnnnnnnnnnnnnnnnnnnnnnnnnnnnnnnnnnnnnnnnnnnnnnnnnnnnnnnnnnnnnnnnnnnnnnnnnnnnnnnnnnnnnnnnnnnnnnnnnnnnnnnnnnnnnnnnnnnnnnnnnnnnnnnnnnnnnnnnnnnnnnnnnnnnnnnnnnnnnnnnnnnnnnnnnnnnnnnnnnnnnnnnnnnnnnnnnnnnnnnnnnnnnnnnnnnnnnnnnnnnnnnnnnnnnnnnnnnnnnnnnnnnnnnnnnnnnnnnnnnnnnnnnnnnnnnnnnnnnnnnnnnnnnnnnnnnnnnnnnnnnnnnnnnnnnnnnnnnnnnnnnnnnnnnnnnnnnnnnnnnnnnnnnnnnnnnnnnnnnnnnnnnnnnnnnnnnnnnnnnnnnnnnnnnnnnnnnnnnnnnnnnnnnnnnnnnnnnnnnnnnnnnnnnnnnnnnnnnnnnnnnnnnnnnnnnnnnnnnnnnnnnnnnnnnnnnnnnnnnnnnnnnnnnnnnnnnnnnnnnnnnnnnnnnnnnnnnnnnnnnnnnnnnnnnnnnnnnnnnnnnnnnnnnnnnnnnnnnnnnnnnnnnnnnnnnnnnnnnnnnnnnnnnnnnnnnnnnnnnnnnnnnnnnnnnnnnnnnnnnnnnnnnnnnnnnnnnnnnnnnnnnnnnnnnnnnnnnnnnnnnnnnnnnnnnnnnnnnnnnnnnnnnnnnnnnnnnnnnnnnnnnnnnnnnnnnnnnnnnnnnnnnnnnnnnnnnnnnnnnnnnnnnnnnnnnnnnnnnnnnnnnnnnnnnnnnnnnnnnnnnnnnnnnnnnnnnnnnnnnnnnnnnnnnnnnnnnnnnnnnnnnnnnnnnnnnnnnnnnnnnnnnnnnnnnnnnnnnnnnnnnnnnnnnnnnnnnnnnnnnnnnnnnnnnnnnnnnnnnnnnnnnnnnnnnnnnnnnnnnnnnnnnnnnnnnnnnnnnnnnnnnnnnnnnnnnnnnnnnnnnnnnnnnnnnnnnnnnnnnnnnnnnnnnnnnnnnnnnnnnnnnnnnnnnnnnnnnnnnnnnnnnnnnnnnnnnnnnnnnnnnnnnnnnnnnnnnnnnnnnnnnnnnnnnnnnnnnnnnnnnnnnnnnnnnnnnnnnnnnnnnnnnnnnnnnnnnnnnnnnnnnnnnnnnnnnnnnnnnnnnnnnnnnnnnnnnnnnnnnnnnnnnnnnnnnnnnnnnnnnnnnnnnnnnnnnnnnnnnnnnnnnnnnnnnnnnnnnnnnnnnnnnnnnnnnnnnnnnnnnnnnnnnnnnnnnnnnnnnnnnnnnnnnnnnnnnnnnnnnnnnnnnnnnnnnnnnnnnnnnnnnnnnnnnnnnnnnnnnnnnnnnnnnnnnnnnnnnnnnnnnnnnnnnnnnnnnnnnnnnnnnnnnnnnnnnnnnnnnnnnnnnnnnnnnnnnnnnnnnnnnnnnnnnnnnnnnnnnnnnnnnnnnnnnnnnnnnnnnnnnnnnnnnnnnnnnnnnnnnnnnnnnnnnnnnnnnnnnnnnnnnnnnnnnnnnnnnnnnnnnnnnnnnnnnnnnnnnnnnnnnnnnnnnnnnnnnnnnnnnnnnnnnnnnnnnnnnnnnnnnnnnnnnnnnnnnnnnnnnnnnnnnnnnnnnnnnnnnnnnnnnnnnnnnnnnnnnnnnnnnnnnnnnnnnnnnnnnnnnnnnnnnnnnnnnnnnnnnnnnnnnnnnnnnnnnnnnnnnnnnnnnnnnnnnnnnnnnnnnnnnnnnnnnnnnnnnnnnnnnnnnnnnnnnnnnnnnnnnnnnnnnnnnnnnnnnnnnnnnnnnnnnnnnnnnnnnnnnnnnnnnnnnnnnnnnnnnnnnnnnnnnnnnnnnnnnnnnnnnnnnnnnnnnnnnnnnnnnnnnnnnnnnnnnnnnnnnnnnnnnnnnnnnnnnnnnnnnnnnnnnnnnnnnnnnnnnnnnnnnnnnnnnnnnnnnnnnnnnnnnnnnnnnnnnnnnnnnnnnnnnnnnnnnnnnnnnnnnnnnnnnnnnnnnnnnnnnnnnnnnnnnnnnnnnnnnnnnnnnnnnnnnnnnnnnnnnnnnnnnnnnnnnnnnnnnnnnnnnnnnnnnnnnnnnnnnnnnnnnnnnnnnnnnnnnnnnnnnnnnnnnnnnnnnnnnnnnnnnnnnnnnnnnnnnnnnnnnnnnnnnnnnnnnnnnnnnnnnnnnnnnnnnnnnnnnnnnnnnnnnnnnnnnnnnnnnnnnnnnnnnnnnnnnnnnnnnnnnnnnnnnnnnnnnnnnnnnnnnnnnnnnnnnnnnnnnnnnnnnnnnnnnnnnnnnnnnnnnnnnnnnnnnnnnnnnnnnnnnnnnnnnnnnnnnnnnnnnnnnnnnnnnnnnnnnnnnnnnnnnnnnnnnnnnnnnnnnnnnnnnnnnnnnnnnnnnnnnnnnnnnnnnnnnnnnnnnnnnnnnnnnnnnnnnnnnnnnnnnnnnnnnnnnnnnnnnnnnnnnnnnnnnnnnnnnnnnnnnnnnnnnnnnnnnnnnnnnnnnnnnnnnnnnnnnnnnnnnnnnnnnnnnnnnnnnnnnnnnnnnnnnnnnnnnnnnnnnnnnnnnnnnnnnnnnnnnnnnnnnnnnnnnnnnnnnnnnnnnnnnnnnnnnnnnnnnnnnnnnnnnnnnnnnnnnnnnnnnnnnnnnnnnnnnnnnnnnnnnnnnnnnnnnnnnnnnnnnnnnnnnnnnnnnnnnnnnnnnnnnnnnnnnnnnnnnnnnnnnnnnnnnnnnnnnnnnnnnnnnnnnnnnnnnnnnnnnnnnnnnnnnnnnnnnnnnnnnnnnnnnnnnnnnnnnnnnnnnnnnnnnnnnnnnnnnnnnnnnnnnnnnnnnnnnnnnnnnnnnnnnnnnnnnnnnnnnnnnnnnnnnnnnnnnnnnnnnnnnnnnnnnnnnnnnnnnnnnnnnnnnnnnnnnnnnnnnnnnnnnnnnnnnnnnnnnnnnnnnnnnnnnnnnnnnnnnnnnnnnnnnnnnnnnnnnnnnnnnnnnnnnnnnnnnnnnnnnnnnnnnnnnnnnnnnnnnnnnnnnnnnnnnnnnnnnnnnnnnnnnnnnnnnnnnnnnnnnnnnnnnnnnnnnnnnnnnnnnnnnnnnnnnnnnnnnnnnnnnnnnnnnnnnnnnnnnnnnnnnnnnnnnnnnnnnnnnnnnnnnnnnnnnnnnnnnnnnnnnnnnnnnnnnnnnnnnnnnnnnnnnnnnnnnnnnnnnnnnnnnnnnnnnnnnnnnnnnnnnnnnnnnnnnnnnnnnnnnnnnnnnnnnnnnnnnnnnnnnnnnnnnnnnnnnnnnnnnnnnnnnnnnnnnnnnnnnnnnnnnnnnnnnnnnnnnnnnnnnnnnnnnnnnnnnnnnnnnnnnnnnnnnnnnnnnnnnnnnnnnnnnnnnnnnnnnnnnnnnnnnnnnnnnnnnnnnnnnnnnnnnnnnnnnnnnnnnnnnnnnnnnnnnnnnnnnnnnnnnnnnnnnnnnnnnnnnnnnnnnnnnnnnnnnnnnnnnnnnnnnnnnnnnnnnnnnnnnnnnnnnnnnnnnnnnnnnnnnnnnnnnnnnnnnnnnnnnnnnnnnnnnnnnnnnnnnnnnnnnnnnnnnnnnnnnnnnnnnnnnnnnnnnnnnnnnnnnnnnnnnnnnnnnnnnnnnnnnnnnnnnnnnnnnnnnnnnnnnnnnnnnnnnnnnnnnnnnnnnnnnnnnnnnnnnnnnnnnnnnnnnnnnnnnnnnnnnnnnnnnnnnnnnnnnnnnnnnnnnnnnnnnnnnnnnnnnnnnnnnnnnnnnnnnnnnnnnnnnnnnnnnnnnnnnnnnnnnnnnnnnnnnnnnnnnnnnnnnnnnnnnnnnnnnnnnnnnnnnnnnnnnnnnnnnnnnnnnnnnnnnnnnnnnnnnnnnnnnnnnnnnnnnnnnnnnnnnnnnnnnnnnnnnnnnnnnnnnnnnnnnnnnnnnnnnnnnnnnnnnnnnnnnnnnnnnnnnnnnnnnnnnnnnnnnnnnnnnnnnnnnnnnnnnnnnnnnnnnnnnnnnnnnnnnnnnnnnnnnnnnnnnnnnnnnnnnnnnnnnnnnnnnnnnnnnnnnnnnnnnnnnnnnnnnnnnnnnnnnnnnnnnnnnnnnnnnnnnnnnnnnnnnnnnnnnnnnnnnnnnnnnnnnnnnnnnnnnnnnnnnnnnnnnnnnnnnnnnnnnnnnnnnnnnnnnnnnnnnnnnnnnnnnnnnnnnnnnnnnnnnnnnnnnnnnnnnnnnnnnnnnnnnnnnnnnnnnnnnnnnnnnnnnnnnnnnnnnnnnnnnnnnnnnnnnnnnnnnnnnnnnnnnnnnnnnnnnnnnnnnnnnnnnnnnnnnnnnnnnnnnnnnnnnnnnnnnnnnnnnnnnnnnnnnnnnnnnnnnnnnnnnnnnnnnnnnnnnnnnnnnnnnnnnnnnnnnnnnnnnnnnnnnnnnnnnnnnnnnnnnnnnnnnnnnnnnnnnnnnnnnnnnnnnnnnnnnnnnnnnnnnnnnnnnnnnnnnnnnnnnnnnnnnnnnnnnnnnnnnnnnnnnnnnnnnnnnnnnnnnnnnnnnnnnnnnnnnnnnnnnnnnnnnnnnnnnnnnnnnnnnnnnnnnnnnnnnnnnnnnnnnnnnnnnnnnnnnnnnnnnnnnnnnnnnnnnnnnnnnnnnnnnnnnnnnnnnnnnnnnnnnnnnnnnnnnnnnnnnnnnnnnnnnnnnnnnnnnnnnnnnnnnnnnnnnnnnnnnnnnnnnnnnnnnnnnnnnnnnnnnnnnnnnnnnnnnnnnnnnnnnnnnnnnnnnnnnnnnnnnnnnnnnnnnnnnnnnnnnnnnnnnnnnnnnnnnnnnnnnnnnnnnnnnnnnnnnnnnnnnnnnnnnnnnnnnnnnnnnnnnnnnnnnnnnnnnnnnnnnnnnnnnnnnnnnnnnnnnnnnnnnnnnnnnnnnnnnnnnnnnnnnnnnnnnnnnnnnnnnnnnnnnnnnnnnnnnnnnnnnnnnnnnnnnnnnnnnnnnnnnnnnnnnnnnnnnnnnnnnnnnnnnnnnnnnnnnnnnnnnnnnnnnnnnnnnnnnnnnnnnnnnnnnnnnnnnnnnnnnnnnnnnnnnnnnnnnnnnnnnnnnnnnnnnnnnnnnnnnnnnnnnnnnnnnnnnnnnnnnnnnnnnnnnnnnnnnnnnnnnnnnnnnnnnnnnnnnnnnnnnnnnnnnnnnnnnnnnnnnnnnnnnnnnnnnnnnnnnnnnnnnnnnnnnnnnnnnnnnnnnnnnnnnnnnnnnnnnnnnnnnnnnnnnnnnnnnnnnnnnnnnnnnnnnnnnnnnnnnnnnnnnnnnnnnnnnnnnnnnnnnnnnnnnnnnnnnnnnnnnnnnnnnnnnnnnnnnnnnnnnnnnnnnnnnnnnnnnnnnnnnnnnnnnnnnnnnnnnnnnnnnnnnnnnnnnnnnnnnnnnnnnnnnnnnnnnnnnnnnnnnnnnnnnnnnnnnnnnnnnnnnnnnnnnnnnnnnnnnnnnnnnnnnnnnnnnnnnnnnnnnnnnnnnnnnnnnnnnnnnnnnnnnnnnnnnnnnnnnnnnnnnnnnnnnnnnnnnnnnnnnnnnnnnnnnnnnnnnnnnnnnnnnnnnnnnnnnnnnnnnnnnnnnnnnnnnnnnnnnnnnnnnnnnnnnnnnnnnnnnnnnnnnnnnnnnnnnnnnnnnnnnnnnnnnnnnnnnnnnnnnnnnnnnnnnnnnnnnnnnnnnnnnnnnnnnnnnnnnnnnnnnnnnnnnnnnnnnnnnnnnnnnnnnnnnnnnnnnnnnnnnnnnnnnnnnnnnnnnnnnnnnnnnnnnnnnnnnnnnnnnnnnnnnnnnnnnnnnnnnnnnnnnnnnnnnnnnnnnnnnnnnnnnnnnnnnnnnnnnnnnnnnnnnnnnnnnnnnnnnnnnnnnnnnnnnnnnnnnnnnnnnnnnnnnnnnnnnnnnnnnnnnnnnnnnnnnnnnnnnnnnnnnnnnnnnnnnnnnnnnnnnnnnnnnnnnnnnnnnnnnnnnnnnnnnnnnnnnnnnnnnnnnnnnnnnnnnnnnnnnnnnnnnnnnnnnnnnnnnnnnnnnnnnnnnnnnnnnnnnnnnnnnnnnnnnnnnnnnnnnnnnnnnnnnnnnnnnnnnnnnnnnnnnnnnnnnnnnnnnnnnnnnnnnnnnnnnnnnnnnnnnnnnnnnnnnnnnnnnnnnnnnnnnnnnnnnnnnnnnnnnnnnnnnnnnnnnnnnnnnnnnnnnnnnnnnnnnnnnnnnnnnnnnnnnnnnnnnnnnnnnnnnnnnnnnnnnnnnnnnnnnnnnnnnnnnnnnnnnnnnnnnnnnnnnnnnnnnnnnnnnnnnnnnnnnnnnnnnnnnnnnnnnnnnnnnnnnnnnnnnnnnnnnnnnnnnnnnnnnnnnnnnnnnnnnnnnnnnnnnnnnnnnnnnnnnnnnnnnnnnnnnnnnnnnnnnnnnnnnnnnnnnnnnnnnnnnnnnnnnnnnnnnnnnnnnnnnnnnnnnnnnnnnnnnnnnnnnnnnnnnnnnnnnnnnnnnnnnnnnnnnnnnnnnnnnnnnnnnnnnnnnnnnnnnnnnnnnnnnnnnnnnnnnnnnnnnnnnnnnnnnnnnnnnnnnnnnnnnnnnnnnnnnnnnnnnnnnnnnnnnnnnnnnnnnnnnnnnnnnnnnnnnnnnnnnnnnnnnnnnnnnnnnnnnnnnnnnnnnnnnnnnnnnnnnnnnnnnnnnnnnnnnnnnnnnnnnnnnnnnnnnnnnnnnnnnnnnnnnnnnnnnnnnnnnnnnnnnnnnnnnnnnnnnnnnnnnnnnnnnnnnnnnnnnnnnnnnnnnnnnnnnnnnnnnnnnnnnnnnnnnnnnnnnnnnnnnnnnnnnnnnnnnnnnnnnnnnnnnnnnnnnnnnnnnnnnnnnnnnnnnnnnnnnnnnnnnnnnnnnnnnnnnnnnnnnnnnnnnnnnnnnnnnnnnnnnnnnnnnnnnnnnnnnnnnnnnnnnnnnnnnnnnnnnnnnnnnnnnnnnnnnnnnnnnnnnnnnnnnnnnnnnnnnnnnnnnnnnnnnnnnnnnnnnnnnnnnnnnnnnnnnnnnnnnnnnnnnnnnnnnnnnnnnnnnnnnnnnnnnnnnnnnnnnnnnnnnnnnnnnnnnnnnnnnnnnnnnnnnnnnnnnnnnnnnnnnnnnnnnnnnnnnnnnnnnnnnnnnnnnnnnnnnnnnnnnnnnnnnnnnnnnnnnnnnnnnnnnnnnnnnnnnnnnnnnnnnnnnnnnnnnnnnnnnnnnnnnnnnnnnnnnnnnnnnnnnnnnnnnnnnnnnnnnnnnnnnnnnnnnnnnnnnnnnnnnnnnnnnnnnnnnnnnnnnnnnnnnnnnnnnnnnnnnnnnnnnnnnnnnnnnnnnnnnnnnnnnnnnnnnnnnnnnnnnnnnnnnnnnnnnnnnnnnnnnnnnnnnnnnnnnnnnnnnnnnnnnnnnnnnnnnnnnnnnnnnnnnnnnnnnnnnnnnnnnnnnnnnnnnnnnnnnnnnnnnnnnnnnnnnnnnnnnnnnnnnnnnnnnnnnnnnnnnnnnnnnnnnnnnnnnnnnnnnnnnnnnnnnnnnnnnnnnnnnnnnnnnnnnnnnnnnnnnnnnnnnnnnnnnnnnnnnnnnnnnnnnnnnnnnnnnnnnnnnnnnnnnnnnnnnnnnnnnnnnnnnnnnnnnnnnnnnnnnnnnnnnnnnnnnnnnnnnnnnnnnnnnnnnnnnnnnnnnnnnnnnnnnnnnnnnnnnnnnnnnnnnnnnnnnnnnnnnnnnnnnnnnnnnnnnnnnnnnnnnnnnnnnnnnnnnnnnnnnnnnnnnnnnnnnnnnnnnnnnnnnnnnnnnnnnnnnnnnnnnnnnnnnnnnnnnnnnnnnnnnnnnnnnnnnnnnnnnnnnnnnnnnnnnnnnnnnnnnnnnnnnnnnnnnnnnnnnnnnnnnnnnnnnnnnnnnnnnnnnnnnnnnnnnnnnnnnnnnnnnnnnnnnnnnnnnnnnnnnnnnnnnnnnnnnnnnnnnnnnnnnnnnnnnnnnnnnnnnnnnnnnnnnnnnnnnnnnnnnnnnnnnnnnnnnnnnnnnnnnnnnnnnnnnnnnnnnnnnnnnnnnnnnnnnnnnnnnnnnnnnnnnnnnnnnnnnnnnnnnnnnnnnnnnnnnnnnnnnnnnnnnnnnnnnnnnnnnnnnnnnnnnnnnnnnnnnnnnnnnnnnnnnnnnnnnnnnnnnnnnnnnnnnnnnnnnnnnnnnnnnnnnnnnnnnnnnnnnnnnnnnnnnnnnnnnnnnnnnnnnnnnnnnnnnnnnnnnnnnnnnnnnnnnnnnnnnnnnnnnnnnnnnnnnnnnnnnnnnnnnnnnnnnnnnnnnnnnnnnnnnnnnnnnnnnnnnnnnnnnnnnnnnnnnnnnnnnnnnnnnnnnnnnnnnnnnnnnnnnnnnnnnnnnnnnnnnnnnnnnnnnnnnnnnnnnnnnnnnnnnnnnnnnnnnnnnnnnnnnnnnnnnnnnnnnnnnnnnnnnnnnnnnnnnnnnnnnnnnnnnnnnnnnnnnnnnnnnnnnnnnnnnnnnnnnnnnnnnnnnnnnnnnnnnnnnnnnnnnnnnnnnnnnnnnnnnnnnnnnnnnnnnnnnnnnnnnnnnnnnnnnnnnnnnnnnnnnnnnnnnnnnnnnnnnnnnnnnnnnnnnnnnnnnnnnnnnnnnnnnnnnnnnnnnnnnnnnnnnnnnnnnnnnnnnnnnnnnnnnnnnnnnnnnnnnnnnnnnnnnnnnnnnnnnnnnnnnnnnnnnnnnnnnnnnnnnnnnnnnnnnnnnnnnnnnnnnnnnnnnnnnnnnnnnnnnnnnnnnnnnnnnnnnnnnnnnnnnnnnnnnnnnnnnnnnnnnnnnnnnnnnnnnnnnnnnnnnnnnnnnnnnnnnnnnnnnnnnnnnnnnnnnnnnnnnnnnnnnnnnnnnnnnnnnnnnnnnnnnnnnnnnnnnnnnnnnnnnnnnnnnnnnnnnnnnnnnnnnnnnnnnnnnnnnnnnnnnnnnnnnnnnnnnnnnnnnnnnnnnnnnnnnnnnnnnnnnnnnnnnnnnnnnnnnnnnnnnnnnnnnnnnnnnnnnnnnnnnnnnnnnnnnnnnnnnnnnnnnnnnnnnnnnnnnnnnnnnnnnnnnnnnnnnnnnnnnnnnnnnnnnnnnnnnnnnnnnnnnnnnnnnnnnnnnnnnnnnnnnnnnnnnnnnnnnnnnnnnnnnnnnnnnnnnnnnnnnnnnnnnnnnnnnnnnnnnnnnnnnnnnnnnnnnnnnnnnnnnnnnnnnnnnnnnnnnnnnnnnnnnnnnnnnnnnnnnnnnnnnnnnnnnnnnnnnnnnnnnnnnnnnnnnnnnnnnnnnnnnnnnnnnnnnnnnnnnnnnnnnnnnnnnnnnnnnnnnnnnnnnnnnnnnnnnnnnnnnnnnnnnnnnnnnnnnnnnnnnnnnnnnnnnnnnnnnnnnnnnnnnnnnnnnnnnnnnnnnnnnnnnnnnnnnnnnnnnnnnnnnnnnnnnnnnnnnnnnnnnnnnnnnnnnnnnnnnnnnnnnnnnnnnnnnnnnnnnnnnnnnnnnnnnnnnnnnnnnnnnnnnnnnnnnnnnnnnnnnnnnnnnnnnnnnnnnnnnnnnnnnnnnnnnnnnnnnnnnnnnnnnnnnnnnnnnnnnnnnnnnnnnnnnnnnnnnnnnnnnnnnnnnnnnnnnnnnnnnnnnnnnnnnnnnnnnnnnnnnnnnnnnnnnnnnnnnnnnnnnnnnnnnnnnnnnnnnnnnnnnnnnnnnnnnnnnnnnnnnnnnnnnnnnnnnnnnnnnnnnnnnnnnnnnnnnnnnnnnnnnnnnnnnnnnnnnnnnnnnnnnnnnnnnnnnnnnnnnnnnnnnnnnnnnnnnnnnnnnnnnnnnnnnnnnnnnnnnnnnnnnnnnnnnnnnnnnnnnnnnnnnnnnnnnnnnnnnnnnnnnnnnnnnnnnnnnnnnnnnnnnnnnnnnnnnnnnnnnnnnnnnnnnnnnnnnnnnnnnnnnnnnnnnnnnnnnnnnnnnnnnnnnnnnnnnnnnnnnnnnnnnnnnnnnnnnnnnnnnnnnnnnnnnnnnnnnnnnnnnnnnnnnnnnnnnnnnnnnnnnnnnnnnnnnnnnnnnnnnnnnnnnnnnnnnnnnnnnnnnnnnnnnnnnnnnnnnnnnnnnnnnnnnnnnnnnnnnnnnnnnnnnnnnnnnnnnnnnnnnnnnnnnnnnnnnnnnnnnnnnnnnnnnnnnnnnnnnnnnnnnnnnnnnnnnnnnnnnnnnnnnnnnnnnnnnnnnnnnnnnnnnnnnnnnnnnnnnnnnnnnnnnnnnnnnnnnnnnnnnnnnnnnnnnnnnnnnnnnnnnnnnnnnnnnnnnnnnnnnnnnnnnnnnnnnnnnnnnnnnnnnnnnnnnnnnnnnnnnnnnnnnnnnnnnnnnnnnnnnnnnnnnnnnnnnnnnnnnnnnnnnnnnnnnnnnnnnnnnnnnnnnnnnnnnnnnnnnnnnnnnnnnnnnnnnnnnnnnnnnnnnnnnnnnnnnnnnnnnnnnnnnnnnnnnnnnnnnnnnnnnnnnnnnnnnnnnnnnnnnnnnnnnnnnnnnnnnnnnnnnnnnnnnnnnnnnnnnnnnnnnnnnnnnnnnnnnnnnnnnnnnnnnnnnnnnnnnnnnnnnnnnnnnnnnnnnnnnnnnnnnnnnnnnnnnnnnnnnnnnnnnnnnnnnnnnnnnnnnnnnnnnnnnnnnnnnnnnnnnnnnnnnnnnnnnnnnnnnnnnnnnnnnnnnnnnnnnnnnnnnnnnnnnnnnnnnnnnnnnnnnnnnnnnnnnnnnnnnnnnnnnnnnnnnnnnnnnnnnnnnnnnnnnnnnnnnnnnnnnnnnnnnnnnnnnnnnnnnnnnnnnnnnnnnnnnnnnnnnnnnnnnnnnnnnnnnnnnnnnnnnnnnnnnnnnnnnnnnnnnnnnnnnnnnnnnnnnnnnnnnnnnnnnnnnnnnnnnnnnnnnnnnnnnnnnnnnnnnnnnnnnnnnnnnnnnnnnnnnnnnnnnnnnnnnnnnnnnnnnnnnnnnnnnnnnnnnnnnnnnnnnnnnnnnnnnnnnnnnnnnnnnnnnnnnnnnnnnnnnnnnnnnnnnnnnnnnnnnnnnnnnnnnnnnnnnnnnnnnnnnnnnnnnnnnnnnnnnnnnnnnnnnnnnnnnnnnnnnnnnnnnnnnnnnnnnnnnnnnnnnnnnnnnnnnnnnnnnnnnnnnnnnnnnnnnnnnnnnnnnnnnnnnnnnnnnnnnnnnnnnnnnnnnnnnnnnnnnnnnnnnnnnnnnnnnnnnnnnnnnnnnnnnnnnnnnnnnnnnnnnnnnnnnnnnnnnnnnnnnnnnnnnnnnnnnnnnnnnnnnnnnnnnnnnnnnnnnnnnnnnnnnnnnnnnnnnnnnnnnnnnnnnnnnnnnnnnnnnnnnnnnnnnnnnnnnnnnnnnnnnnnnnnnnnnnnnnnnnnnnnnnnnnnnnnnnnnnnnnnnnnnnnnnnnnnnnnnnnnnnnnnnnnnnnnnnnnnnnnnnnnnnnnnnnnnnnnnnnnnnnnnnnnnnnnnnnnnnnnnnnnnnnnnnnnnnnnnnnnnnnnnnnnnnnnnnnnnnnnnnnnnnnnnnnnnnnnnnnnnnnnnnnnnnnnnnnnnnnnnnnnnnnnnnnnnnnnnnnnnnnnnnnnnnnnnnnnnnnnnnnnnnnnnnnnnnnnnnnnnnnnnnnnnnnnnnnnnnnnnnnnnnnnnnnnnnnnnnnnnnnnnnnnnnnnnnnnnnnnnnnnnnnnnnnnnnnnnnnnnnnnnnnnnnnnnnnnnnnnnnnnnnnnnnnnnnnnnnnnnnnnnnnnnnnnnnnnnnnnnnnnnnnnnnnnnnnnnnnnnnnnnnnnnnnnnnnnnnnnnnnnnnnnnnnnnnnnnnnnnnnnnnnnnnnnnnnnnnnnnnnnnnnnnnnnnnnnnnnnnnnnnnnnnnnnnnnnnnnnnnnnnnnnnnnnnnnnnnnnnnnnnnnnnnnnnnnnnnnnnnnnnnnnnnnnnnnnnnnnnnnnnnnnnnnnnnnnnnnnnnnnnnnnnnnnnnnnnnnnnnnnnnnnnnnnnnnnnnnnnnnnnnnnnnnnnnnnnnnnnnnnnnnnnnnnnnnnnnnnnnnnnnnnnnnnnnnnnnnnnnnnnnnnnnnnnnnnnnnnnnnnnnnnnnnnnnnnnnnnnnnnnnnnnnnnnnnnnnnnnnnnnnnnnnnnnnnnnnnnnnnnnnnnnnnnnnnnnnnnnnnnnnnnnnnnnnnnnnnnnnnnnnnnnnnnnnnnnnnnnnnnnnnnnnnnnnnnnnnnnnnnnnnnnnnnnnnnnnnnnnnnnnnnnnnnnnnnnnnnnnnnnnnnnnnnnnnnnnnnnnnnnnnnnnnnnnnnnnnnnnnnnnnnnnnnnnnnnnnnnnnnnnnnnnnnnnnnnnnnnnnnnnnnnnnnnnnnnnnnnnnnnnnnnnnnnnnnnnnnnnnnnnnnnnnnnnnnnnnnnnnnnnnnnnnnnnnnnnnnnnnnnnnnnnnnnnnnnnnnnnnnnnnnnnnnnnnnnnnnnnnnnnnnnnnnnnnnnnnnnnnnnnnnnnnnnnnnnnnnnnnnnnnnnnnnnnnnnnnnnnnnnnnnnnnnnnnnnnnnnnnnnnnnnnnnnnnnnnnnnnnnnnnnnnnnnnnnnnnnnnnnnnnnnnnnnnnnnnnnnnnnnnnnnnnnnnnnnnnnnnnnnnnnnnnnnnnnnnnnnnnnnnnnnnnnnnnnnnnnnnnnnnnnnnnnnnnnnnnnnnnnnnnnnnnnnnnnnnnnnnnnnnnnnnnnnnnnnnnnnnnnnnnnnnnnnnnnnnnnnnnnnnnnnnnnnnnnnnnnnnnnnnnnnnnnnnnnnnnnnnnnnnnnnnnnnnnnnnnnnnnnnnnnnnnnnnnnnnnnnnnnnnnnnnnnnnnnnnnnnnnnnnnnnnnnnnnnnnnnnnnnnnnnnnnnnnnnnnnnnnnnnnnnnnnnnnnnnnnnnnnnnnnnnnnnnnnnnnnnnnnnnnnnnnnnnnnnnnnnnnnnnnnnnnnnnnnnnnnnnnnnnnnnnnnnnnnnnnnnnnnnnnnnnnnnnnnnnnnnnnnnnnnnnnnnnnnnnnnnnnnnnnnnnnnnnnnnnnnnnnnnnnnnnnnnnnnnnnnnnnnnnnnnnnnnnnnnnnnnnnnnnnnnnnnnnnnnnnnnnnnnnnnnnnnnnnnnnnnnnnnnnnnnnnnnnnnnnnnnnnnnnnnnnnnnnnnnnnnnnnnnnnnnnnnnnnnnnnnnnnnnnnnnnnnnnnnnnnnnnnnnnnnnnnnnnnnnnnnnnnnnnnnnnnnnnnnnnnnnnnnnnnnnnnnnnnnnnnnnnnnnnnnnnnnnnnnnnnnnnnnnnnnnnnnnnnnnnnnnnnnnnnnnnnnnnnnnnnnnnnnnnnnnnnnnnnnnnnnnnnnnnnnnnnnnnnnnnnnnnnnnnnnnnnnnnnnnnnnnnnnnnnnnnnnnnnnnnnnnnnnnnnnnnnnnnnnnnnnnnnnnnnnnnnnnnnnnnnnnnnnnnnnnnnnnnnnnnnnnnnnnnnnnnnnnnnnnnnnnnnnnnnnnnnnnnnnnnnnnnnnnnnnnnnnnnnnnnnnnnnnnnnnnnnnnnnnnnnnnnnnnnnnnnnnnnnnnnnnnnnnnnnnnnnnnnnnnnnnnnnnnnnnnnnnnnnnnnnnnnnnnnnnnnnnnnnnnnnnnnnnnnnnnnnnnnnnnnnnnnnnnnnnnnnnnnnnnnnnnnnnnnnnnnnnnnnnnnnnnnnnnnnnnnnnnnnnnnnnnnnnnnnnnnnnnnnnnnnnnnnnnnnnnnnnnnnnnnnnnnnnnnnnnnnnnnnnnnnnnnnnnnnnnnnnnnnnnnnnnnnnnnnnnnnnnnnnnnnnnnnnnnnnnnnnnnnnnnnnnnnnnnnnnnnnnnnnnnnnnnnnnnnnnnnnnnnnnnnnnnnnnnnnnnnnnnnnnnnnnnnnnnnnnnnnnnnnnnnnnnnnnnnnnnnnnnnnnnnnnnnnnnnnnnnnnnnnnnnnnnnnnnnnnnnnnnnnnnnnnnnnnnnnnnnnnnnnnnnnnnnnnnnnnnnnnnnnnnnnnnnnnnnnnnnnnnnnnnnnnnnnnnnnnnnnnnnnnnnnnnnnnnnnnnnnnnnnnnnnnnnnnnnnnnnnnnnnnnnnnnnnnnnnnnnnnnnnnnnnnnnnnnnnnnnnnnnnnnnnnnnnnnnnnnnnnnnnnnnnnnnnnnnnnnnnnnnnnnnnnnnnnnnnnnnnnnnnnnnnnnnnnnnnnnnnnnnnnnnnnnnnnnnnnnnnnnnnnnnnnnnnnnnnnnnnnnnnnnnnnnnnnnnnnnnnnnnnnnnnnnnnnnnnnnnnnnnnnnnnnnnnnnnnnnnnnnnnnnnnnnnnnnnnnnnnnnnnnnnnnnnnnnnnnnnnnnnnnnnnnnnnnnnnnnnnnnnnnnnnnnnnnnnnnnnnnnnnnnnnnnnnnnnnnnnnnnnnnnnnnnnnnnnnnnnnnnnnnnnnnnnnnnnnnnnnnnnnnnnnnnnnnnnnnnnnnnnnnnnnnnnnnnnnnnnnnnnnnnnnnnnnnnnnnnnnnnnnnnnnnnnnnnnnnnnnnnnnnnnnnnnnnnnnnnnnnnnnnnnnnnnnnnnnnnnnnnnnnnnnnnnnnnnnnnnnnnnnnnnnnnnnnnnnnnnnnnnnnnnnnnnnnnnnnnnnnnnnnnnnnnnnnnnnnnnnnnnnnnnnnnnnnnnnnnnnnnnnnnnnnnnnnnnnnnnnnnnnnnnnnnnnnnnnnnnnnnnnnnnnnnnnnnnnnnnnnnnnnnnnnnnnnnnnnnnnnnnnnnnnnnnnnnnnnnnnnnnnnnnnnnnnnnnnnnnnnnnnnnnnnnnnnnnnnnnnnnnnnnnnnnnnnnnnnnnnnnnnnnnnnnnnnnnnnnnnnnnnnnnnnnnnnnnnnnnnnnnnnnnnnnnnnnnnnnnnnnnnnnnnnnnnnnnnnnnnnnnnnnnnnnnnnnnnnnnnnnnnnnnnnnnnnnnnnnnnnnnnnnnnnnnnnnnnnnnnnnnnnnnnnnnnnnnnnnnnnnnnnnnnnnnnnnnnnnnnnnnnnnnnnnnnnnnnnnnnnnnnnnnnnnnnnnnnnnnnnnnnnnnnnnnnnnnnnnnnnnnnnnnnnnnnnnnnnnnnnnnnnnnnnnnnnnnnnnnnnnnnnnnnnnnnnnnnnnnnnnnnnnnnnnnnnnnnnnnnnnnnnnnnnnnnnnnnnnnnnnnnnnnnnnnnnnnnnnnnnnnnnnnnnnnnnnnnnnnnnnnnnnnnnnnnnnnnnnnnnnnnnnnnnnnnnnnnnnnnnnnnnnnnnnnnnnnnnnnnnnnnnnnnnnnnnnnnnnnnnnnnnnnnnnnnnnnnnnnnnnnnnnnnnnnnnnnnnnnnnnnnnnnnnnnnnnnnnnnnnnnnnnnnnnnnnnnnnnnnnnnnnnnnnnnnnnnnnnnnnnnnnnnnnnnnnnnnnnnnnnnnnnnnnnnnnnnnnnnnnnnnnnnnnnnnnnnnnnnnnnnnnnnnnnnnnnnnnnnnnnnnnnnnnnnnnnnnnnnnnnnnnnnnnnnnnnnnnnnnnnnnnnnnnnnnnnnnnnnnnnnnnnnnnnnnnnnnnnnnnnnnnnnnnnnnnnnnnnnnnnnnnnnnnnnnnnnnnnnnnnnnnnnnnnnnnnnnnnnnnnnnnnnnnnnnnnnnnnnnnnnnnnnnnnnnnnnnnnnnnnnnnnnnnnnnnnnnnnnnnnnnnnnnnnnnnnnnnnnnnnnnnnnnnnnnnnnnnnnnnnnnnnnnnnnnnnnnnnnnnnnnnnnnnnnnnnnnnnnnnnnnnnnnnnnnnnnnnnnnnnnnnnnnnnnnnnnnnnnnnnnnnnnnnnnnnnnnnnnnnnnnnnnnnnnnnnnnnnnnnnnnnnnnnnnnnnnnnnnnnnnnnnnnnnnnnnnnnnnnnnnnnnnnnnnnnnnnnnnnnnnnnnnnnnnnnnnnnnnnnnnnnnnnnnnnnnnnnnnnnnnnnnnnnnnnnnnnnnnnnnnnnnnnnnnnnnnnnnnnnnnnnnnnnnnnnnnnnnnnnnnnnnnnnnnnnnnnnnnnnnnnnnnnnnnnnnnnnnnnnnnnnnnnnnnnnnnnnnnnnnnnnnnnnnnnnnnnnnnnnnnnnnnnnnnnnnnnnnnnnnnnnnnnnnnnnnnnnnnnnnnnnnnnnnnnnnnnnnnnnnnnnnnnnnnnnnnnnnnnnnnnnnnnnnnnnnnnnnnnnnnnnnnnnnnnnnnnnnnnnnnnnnnnnnnnnnnnnnnnnnnnnnnnnnnnnnnnnnnnnnnnnnnnnnnnnnnnnnnnnnnnnnnnnnnnnnnnnnnnnnnnnnnnnnnnnnnnnnnnnnnnnnnnnnnnnnnnnnnnnnnnnnnnnnnnnnnnnnnnnnnnnnnnnnnnnnnnnnnnnnnnnnnnnnnnnnnnnnnnnnnnnnnnnnnnnnnnnnnnnnnnnnnnnnnnnnnnnnnnnnnnnnnnnnnnnnnnnnnnnnnnnnnnnnnnnnnnnnnnnnnnnnnnnnnnnnnnnnnnnnnnnnnnnnnnnnnnnnnnnnnnnnnnnnnnnnnnnnnnnnnnnnnnnnnnnnnnnnnnnnnnnnnnnnnnnnnnnnnnnnnnnnnnnnnnnnnnnnnnnnnnnnnnnnnnnnnnnnnnnnnnnnnnnnnnnnnnnnnnnnnnnnnnnnnnnnnnnnnnnnnnnnnnnnnnnnnnnnnnnnnnnnnnnnnnnnnnnnnnnnnnnnnnnnnnnnnnnnnnnnnnnnnnnnnnnnnnnnnnnnnnnnnnnnnnnnnnnnnnnnnnnnnnnnnnnnnnnnnnnnnnnnnnnnnnnnnnnnnnnnnnnnnnnnnnnnnnnnnnnnnnnnnnnnnnnnnnnnnnnnnnnnnnnnnnnnnnnnnnnnnnnnnnnnnnnnnnnnnnnnnnnnnnnnnnnnnnnnnnnnnnnnnnnnnnnnnnnnnnnnnnnnnnnnnnnnnnnnnnnnnnnnnnnnnnnnnnnnnnnnnnnnnnnnnnnnnnnnnnnnnnnnnnnnnnnnnnnnnnnnnnnnnnnnnnnnnnnnnnnnnnnnnnnnnnnnnnnnnnnnnnnnnnnnnnnnnnnnnnnnnnnnnnnnnnnnnnnnnnnnnnnnnnnnnnnnnnnnnnnnnnnnnnnnnnnnnnnnnnnnnnnnnnnnnnnnnnnnnnnnnnnnnnnnnnnnnnnnnnnnnnnnnnnnnnnnnnnnnnnnnnnnnnnnnnnnnnnnnnnnnnnnnnnnnnnnnnnnnnnnnnnnnnnnnnnnnnnnnnnnnnnnnnnnnnnnnnnnnnnnnnnnnnnnnnnnnnnnnnnnnnnnnnnnnnnnnnnnnnnnnnnnnnnnnnnnnnnnnnnnnnnnnnnnnnnnnnnnnnnnnnnnnnnnnnnnnnnnnnnnnnnnnnnnnnnnnnnnnnnnnnnnnnnnnnnnnnnnnnnnnnnnnnnnnnnnnnnnnnnnnnnnnnnnnnnnnnnnnnnnnnnnnnnnnnnnnnnnnnnnnnnnnnnnnnnnnnnnnnnnnnnnnnnnnnnnnnnnnnnnnnnnnnnnnnnnnnnnnnnnnnnnnnnnnnnnnnnnnnnnnnnnnnnnnnnnnnnnnnnnnnnnnnnnnnnnnnnnnnnnnnnnnnnnnnnnnnnnnnnnnnnnnnnnnnnnnnnnnnnnnnnnnnnnnnnnnnnnnnnnnnnnnnnnnnnnnnnnnnnnnnnnnnnnnnnnnnnnnnnnnnnnnnnnnnnnnnnnnnnnnnnnnnnnnnnnnnnnnnnnnnnnnnnnnnnnnnnnnnnnnnnnnnnnnnnnnnnnnnnnnnnnnnnnnnnnnnnnnnnnnnnnnnnnnnnnnnnnnnnnnnnnnnnnnnnnnnnnnnnnnnnnnnnnnnnnnnnnnnnnnnnnnnnnnnnnnnnnnnnnnnnnnnnnnnnnnnnnnnnnnnnnnnnnnnnnnnnnnnnnnnnnnnnnnnnnnnnnnnnnnnnnnnnnnnnnnnnnnnnnnnnnnnnnnnnnnnnnnnnnnnnnnnnnnnnnnnnnnnnnnnnnnnnnnnnnnnnnnnnnnnnnnnnnnnnnnnnnnnnnnnnnnnnnnnnnnnnnnnnnnnnnnnnnnnnnnnnnnnnnnnnnnnnnnnnnnnnnnnnnnnnnnnnnnnnnnnnnnnnnnnnnnnnnnnnnnnnnnnnnnnnnnnnnnnnnnnnnnnnnnnnnnnnnnnnnnnnnnnnnnnnnnnnnnnnnnnnnnnnnnnnnnnnnnnnnnnnnnnnnnnnnnnnnnnnnnnnnnnnnnnnnnnnnnnnnnnnnnnnnnnnnnnnnnnnnnnnnnnnnnnnnnnnnnnnnnnnnnnnnnnnnnnnnnnnnnnnnnnnnnnnnnnnnnnnnnnnnnnnnnnnnnnnnnnnnnnnnnnnnnnnnnnnnnnnnnnnnnnnnnnnnnnnnnnnnnnnnnnnnnnnnnnnnnnnnnnnnnnnnnnnnnnnnnnnnnnnnnnnnnnnnnnnnnnnnnnnnnnnnnnnnnnnnnnnnnnnnnnnnnnnnnnnnnnnnnnnnnnnnnnnnnnnnnnnnnnnnnnnnnnnnnnnnnnnnnnnnnnnnnnnnnnnnnnnnnnnnnnnnnnnnnnnnnnnnnnnnnnnnnnnnnnnnnnnnnnnnnnnnnnnnnnnnnnnnnnnnnnnnnnnnnnnnnnnnnnnnnnnnnnnnnnnnnnnnnnnnnnnnnnnnnnnnnnnnnnnnnnnnnnnnnnnnnnnnnnnnnnnnnnnnnnnnnnnnnnnnnnnnnnnnnnnnnnnnnnnnnnnnnnnnnnnnnnnnnnnnnnnnnnnnnnnnnnnnnnnnnnnnnnnnnnnnnnnnnnnnnnnnnnnnnnnnnnnnnnnnnnnnnnnnnnnnnnnnnnnnnnnnnnnnnnnnnnnnnnnnnnnnnnnnnnnnnnnnnnnnnnnnnnnnnnnnnnnnnnnnnnnnnnnnnnnnnnnnnnnnnnnnnnnnnnnnnnnnnnnnnnnnnnnnnnnnnnnnnnnnnnnnnnnnnnnnnnnnnnnnnnnnnnnnnnnnnnnnnnnnnnnnnnnnnnnnnnnnnnnnnnnnnnnnnnnnnnnnnnnnnnnnnnnnnnnnnnnnnnnnnnnnnnnnnnnnnnnnnnnnnnnnnnnnnnnnnnnnnnnnnnnnnnnnnnnnnnnnnnnnnnnnnnnnnnnnnnnnnnnnnnnnnnnnnnnnnnnnnnnnnnnnnnnnnnnnnnnnnnnnnnnnnnnnnnnnnnnnnnnnnnnnnnnnnnnnnnnnnnnnnnnnnnnnnnnnnnnnnnnnnnnnnnnnnnnnnnnnnnnnnnnnnnnnnnnnnnnnnnnnnnnnnnnnnnnnnnnnnnnnnnnnnnnnnnnnnnnnnnnnnnnnnnnnnnnnnnnnnnnnnnnnnnnnnnnnnnnnnnnnnnnnnnnnnnnnnnnnnnnnnnnnnnnnnnnnnnnnnnnnnnnnnnnnnnnnnnnnnnnnnnnnnnnnnnnnnnnnnnnnnnnnnnnnnnnnnnnnnnnnnnnnnnnnnnnnnnnnnnnnnnnnnnnnnnnnnnnnnnnnnnnnnnnnnnnnnnnnnnnnnnnnnnnnnnnnnnnnnnnnnnnnnnnnnnnnnnnnnnnnnnnnnnnnnnnnnnnnnnnnnnnnnnnnnnnnnnnnnnnnnnnnnnnnnnnnnnnnnnnnnnnnnnnnnnnnnnnnnnnnnnnnnnnnnnnnnnnnnnnnnnnnnnnnnnnnnnnnnnnnnnnnnnnnnnnnnnnnnnnnnnnnnnnnnnnnnnnnnnnnnnnnnnnnnnnnnnnnnnnnnnnnnnnnnnnnnnnnnnnnnnnnnnnnnnnnnnnnnnnnnnnnnnnnnnnnnnnnnnnnnnnnnnnnnnnnnnnnnnnnnnnnnnnnnnnnnnnnnnnnnnnnnnnnnnnnnnnnnnnnnnnnnnnnnnnnnnnnnnnnnnnnnnnnnnnnnnnnnnnnnnnnnnnnnnnnnnnnnnnnnnnnnnnnnnnnnnnnnnnnnnnnnnnnnnnnnnnnnnnnnnnnnnnnnnnnnnnnnnnnnnnnnnnnnnnnnnnnnnnnnnnnnnnnnnnnnnnnnnnnnnnnnnnnnnnnnnnnnnnnnnnnnnnnnnnnnnnnnnnnnnnnnnnnnnnnnnnnnnnnnnnnnnnnnnnnnnnnnnnnnnnnnnnnnnnnnnnnnnnnnnnnnnnnnnnnnnnnnnnnnnnnnnnnnnnnnnnnnnnnnnnnnnnnnnnnnnnnnnnnnnnnnnnnnnnnnnnnnnnnnnnnnnnnnnnnnnnnnnnnnnnnnnnnnnnnnnnnnnnnnnnnnnnnnnnnnnnnnnnnnnnnnnnnnnnnnnnnnnnnnnnnnnnnnnnnnnnnnnnnnnnnnnnnnnnnnnnnnnnnnnnnnnnnnnnnnnnnnnnnnnnnnnnnnnnnnnnnnnnnnnnnnnnnnnnnnnnnnnnnnnnnnnnnnnnnnnnnnnnnnnnnnnnnnnnnnnnnnnnnnnnnnnnnnnnnnnnnnnnnnnnnnnnnnnnnnnnnnnnnnnnnnnnnnnnnnnnnnnnnnnnnnnnnnnnnnnnnnnnnnnnnnnnnnnnnnnnnnnnnnnnnnnnnnnnnnnnnnnnnnnnnnnnnnnnnnnnnnnnnnnnnnnnnnnnnnnnnnnnnnnnnnnnnnnnnnnnnnnnnnnnnnnnnnnnnnnnnnnnnnnnnnnnnnnnnnnnnnnnnnnnnnnnnnnnnnnnnnnnnnnnnnnnnnnnnnnnnnnnnnnnnnnnnnnnnnnnnnnnnnnnnnnnnnnnnnnnnnnnnnnnnnnnnnnnnnnnnnnnnnnnnnnnnnnnnnnnnnnnnnnnnnnnnnnnnnnnnnnnnnnnnnnnnnnnnnnnnnnnnnnnnnnnnnnnnnnnnnnnnnnnnnnnnnnnnnnnnnnnnnnnnnnnnnnnnnnnnnnnnnnnnnnnnnnnnnnnnnnnnnnnnnnnnnnnnnnnnnnnnnnnnnnnnnnnnnnnnnnnnnnnnnnnnnnnnnnnnnnnnnnnnnnnnnnnnnnnnnnnnnnnnnnnnnnnnnnnnnnnnnnnnnnnnnnnnnnnnnnnnnnnnnnnnnnnnnnnnnnnnnnnnnnnnnnnnnnnnnnnnnnnnnnnnnnnnnnnnnnnnnnnnnnnnnnnnnnnnnnnnnnnnnnnnnnnnnnnnnnnnnnnnnnnnnnnnnnnnnnnnnnnnnnnnnnnnnnnnnnnnnnnnnnnnnnnnnnnnnnnnnnnnnnnnnnnnnnnnnnnnnnnnnnnnnnnnnnnnnnnnnnnnnnnnnnnnnnnnnnnnnnnnnnnnnnnnnnnnnnnnnnnnnnnnnnnnnnnnnnnnnnnnnnnnnnnnnnnnnnnnnnnnnnnnnnnnnnnnnnnnnnnnnnnnnnnnnnnnnnnnnnnnnnnnnnnnnnnnnnnnnnnnnnnnnnnnnnnnnnnnnnnnnnnnnnnnnnnnnnnnnnnnnnnnnnnnnnnnnnnnnnnnnnnnnnnnnnnnnnnnnnnnnnnnnnnnnnnnnnnnnnnnnnnnnnnnnnnnnnnnnnnnnnnnnnnnnnnnnnnnnnnnnnnnnnnnnnnnnnnnnnnnnnnnnnnnnnnnnnnnnnnnnnnnnnnnnnnnnnnnnnnnnnnnnnnnnnnnnnnnnnnnnnnnnnnnnnnnnnnnnnnnnnnnnnnnnnnnnnnnnnnnnnnnnnnnnnnnnnnnnnnnnnnnnnnnnnnnnnnnnnnnnnnnnnnnnnnnnnnnnnnnnnnnnnnnnnnnnnnnnnnnnnnnnnnnnnnnnnnnnnnnnnnnnnnnnnnnnnnnnnnnnnnnnnnnnnnnnnnnnnnnnnnnnnnnnnnnnnnnnnnnnnnnnnnnnnnnnnnnnnnnnnnnnnnnnnnnnnnnnnnnnnnnnnnnnnnnnnnnnnnnnnnnnnnnnnnnnnnnnnnnnnnnnnnnnnnnnnnnnnnnnnnnnnnnnnnnnnnnnnnnnnnnnnnnnnnnnnnnnnnnnnnnnnnnnnnnnnnnnnnnnnnnnnnnnnnnnnnnnnnnnnnnnnnnnnnnnnnnnnnnnnnnnnnnnnnnnnnnnnnnnnnnnnnnnnnnnnnnnnnnnnnnnnnnnnnnnnnnnnnnnnnnnnnnnnnnnnnnnnnnnnnnnnnnnnnnnnnnnnnnnnnnnnnnnnnnnnnnnnnnnnnnnnnnnnnnnnnnnnnnnnnnnnnnnnnnnnnnnnnnnnnnnnnnnnnnnnnnnnnnnnnnnnnnnnnnnnnnnnnnnnnnnnnnnnnnnnnnnnnnnnnnnnnnnnnnnnnnnnnnnnnnnnnnnnnnnnnnnnnnnnnnnnnnnnnnnnnnnnnnnnnnnnnnnnnnnnnnnnnnnnnnnnnnnnnnnnnnnnnnnnnnnnnnnnnnnnnnnnnnnnnnnnnnnnnnnnnnnnnnnnnnnnnnnnnnnnnnnnnnnnnnnnnnnnnnnnnnnnnnnnnnnnnnnnnnnnnnnnnnnnnnnnnnnnnnnnnnnnnnnnnnnnnnnnnnnnnnnnnnnnnnnnnnnnnnnnnnnnnnnnnnnnnnnnnnnnnnnnnnnnnnnnnnnnnnnnnnnnnnnnnnnnnnnnnnnnnnnnnnnnnnnnnnnnnnnnnnnnnnnnnnnnnnnnnnnnnnnnnnnnnnnnnnnnnnnnnnnnnnnnnnnnnnnnnnnnnnnnnnnnnnnnnnnnnnnnnnnnnnnnnnnnnnnnnnnnnnnnnnnnnnnnnnnnnnnnnnnnnnnnnnnnnnnnnnnnnnnnnnnnnnnnnnnnnnnnnnnnnnnnnnnnnnnnnnnnnnnnnnnnnnnnnnnnnnnnnnnnnnnnnnnnnnnnnnnnnnnnnnnnnnnnnnnnnnnnnnnnnnnnnnnnnnnnnnnnnnnnnnnnnnnnnnnnnnnnnnnnnnnnnnnnnnnnnnnnnnnnnnnnnnnnnnnnnnnnnnnnnnnnnnnnnnnnnnnnnnnnnnnnnnnnnnnnnnnnnnnnnnnnnnnnnnnnnnnnnnnnnnnnnnnnnnnnnnnnnnnnnnnnnnnnnnnnnnnnnnnnnnnnnnnnnnnnnnnnnnnnnnnnnnnnnnnnnnnnnnnnnnnnnnnnnnnnnnnnnnnnnnnnnnnnnnnnnnnnnnnnnnnnnnnnnnnnnnnnnnnnnnnnnnnnnnnnnnnnnnnnnnnnnnnnnnnnnnnnnnnnnnnnnnnnnnnnnnnnnnnnnnnnnnnnnnnnnnnnnnnnnnnnnnnnnnnnnnnnnnnnnnnnnnnnnnnnnnnnnnnnnnnnnnnnnnnnnnnnnnnnnnnnnnnnnnnnnnnnnnnnnnnnnnnnnnnnnnnnnnnnnnnnnnnnnnnnnnnnnnnnnnnnnnnnnnnnnnnnnnnnnnnnnnnnnnnnnnnnnnnnnnnnnnnnnnnnnnnnnnnnnnnnnnnnnnnnnnnnnnnnnnnnnnnnnnnnnnnnnnnnnnnnnnnnnnnnnnnnnnnnnnnnnnnnnnnnnnnnnnnnnnnnnnnnnnnnnnnnnnnnnnnnnnnnnnnnnnnnnnnnnnnnnnnnnnnnnnnnnnnnnnnnnnnnnnnnnnnnnnnnnnnnnnnnnnnnnnnnnnnnnnnnnnnnnnnnnnnnnnnnnnnnnnnnnnnnnnnnnnnnnnnnnnnnnnnnnnnnnnnnnnnnnnnnnnnnnnnnnnnnnnnnnnnnnnnnnnnnnnnnnnnnnnnnnnnnnnnnnnnnnnnnnnnnnnnnnnnnnnnnnnnnnnnnnnnnnnnnnnnnnnnnnnnnnnnnnnnnnnnnnnnnnnnnnnnnnnnnnnnnnnnnnnnnnnnnnnnnnnnnnnnnnnnnnnnnnnnnnnnnnnnnnnnnnnnnnnnnnnnnnnnnnnnnnnnnnnnnnnnnnnnnnnnnnnnnnnnnnnnnnnnnnnnnnnnnnnnnnnnnnnnnnnnnnnnnnnnnnnnnnnnnnnnnnnnnnnnnnnnnnnnnnnnnnnnnnnnnnnnnnnnnnnnnnnnnnnnnnnnnnnnnnnnnnnnnnnnnnnnnnnnnnnnnnnnnnnnnnnnnnnnnnnnnnnnnnnnnnnnnnnnnnnnnnnnnnnnnnnnnnnnnnnnnnnnnnnnnnnnnnnnnnnnnnnnnnnnnnnnnnnnnnnnnnnnnnnnnnnnnnnnnnnnnnnnnnnnnnnnnnnnnnnnnnnnnnnnnnnnnnnnnnnnnnnnnnnnnnnnnnnnnnnnnnnnnnnnnnnnnnnnnnnnnnnnnnnnnnnnnnnnnnnnnnnnnnnnnnnnnnnnnnnnnnnnnnnnnnnnnnnnnnnnnnnnnnnnnnnnnnnnnnnnnnnnnnnnnnnnnnnnnnnnnnnnnnnnnnnnnnnnnnnnnnnnnnnnnnnnnnnnnnnnnnnnnnnnnnnnnnnnnnnnnnnnnnnnnnnnnnnnnnnnnnnnnnnnnnnnnnnnnnnnnnnnnnnnnnnnnnnnnnnnnnnnnnnnnnnnnnnnnnnnnnnnnnnnnnnnnnnnnnnnnnnnnnnnnnnnnnnnnnnnnnnnnnnnnnnnnnnnnnnnnnnnnnnnnnnnnnnnnnnnnnnnnnnnnnnnnnnnnnnnnnnnnnnnnnnnnnnnnnnnnnnnnnnnnnnnnnnnnnnnnnnnnnnnnnnnnnnnnnnnnnnnnnnnnnnnnnnnnnnnnnnnnnnnnnnnnnnnnnnnnnnnnnnnnnnnnnnnnnnnnnnnnnnnnnnnnnnnnnnnnnnnnnnnnnnnnnnnnnnnnnnnnnnnnnnnnnnnnnnnnnnnnnnnnnnnnnnnnnnnnnnnnnnnnnnnnnnnnnnnnnnnnnnnnnnnnnnnnnnnnnnnnnnnnnnnnnnnnnnnnnnnnnnnnnnnnnnnnnnnnnnnnnnnnnnnnnnnnnnnnnnnnnnnnnnnnnnnnnnnnnnnnnnnnnnnnnnnnnnnnnnnnnnnnnnnnnnnnnnnnnnnnnnnnnnnnnnnnnnnnnnnnnnnnnnnnnnnnnnnnnnnnnnnnnnnnnnnnnnnnnnnnnnnnnnnnnnnnnnnnnnnnnnnnnnnnnnnnnnnnnnnnnnnnnnnnnnnnnnnnnnnnnnnnnnnnnnnnnnnnnnnnnnnnnnnnnnnnnnnnnnnnnnnnnnnnnnnnnnnnnnnnnnnnnnnnnnnnnnnnnnnnnnnnnnnnnnnnnnnnnnnnnnnnnnnnnnnnnnnnnnnnnnnnnnnnnnnnnnnnnnnnnnnnnnnnnnnnnnnnnnnnnnnnnnnnnnnnnnnnnnnnnnnnnnnnnnnnnnnnnnnnnnnnnnnnnnnnnnnnnnnnnnnnnnnnnnnnnnnnnnnnnnnnnnnnnnnnnnnnnnnnnnnnnnnnnnnnnnnnnnnnnnnnnnnnnnnnnnnnnnnnnnnnnnnnnnnnnnnnnnnnnnnnnnnnnnnnnnnnnnnnnnnnnnnnnnnnnnnnnnnnnnnnnnnnnnnnnnnnnnnnnnnnnnnnnnnnnnnnnnnnnnnnnnnnnnnnnnnnnnnnnnnnnnnnnnnnnnnnnnnnnnnnnnnnnnnnnnnnnnnnnnnnnnnnnnnnnnnnnnnnnnnnnnnnnnnnnnnnnnnnnnnnnnnnnnnnnnnnnnnnnnnnnnnnnnnnnnnnnnnnnnnnnnnnnnnnnnnnnnnnnnnnnnnnnnnnnnnnnnnnnnnnnnnnnnnnnnnnnnnnnnnnnnnnnnnnnnnnnnnnnnnnnnnnnnnnnnnnnnnnnnnnnnnnnnnnnnnnnnnnnnnnnnnnnnnnnnnnnnnnnnnnnnnnnnnnnnnnnnnnnnnnnnnnnnnnnnnnnnnnnnnnnnnnnnnnnnnnnnnnnnnnnnnnnnnnnnnnnnnnnnnnnnnnnnnnnnnnnnnnnnnnnnnnnnnnnnnnnnnnnnnnnnnnnnnnnnnnnnnnnnnnnnnnnnnnnnnnnnnnnnnnnnnnnnnnnnnnnnnnnnnnnnnnnnnnnnnnnnnnnnnnnnnnnnnnnnnnnnnnnnnnnnnnnnnnnnnnnnnnnnnnnnnnnnnnnnnnnnnnnnnnnnnnnnnnnnnnnnnnnnnnnnnnnnnnnnnnnnnnnnnnnnnnnnnnnnnnnnnnnnnnnnnnnnnnnnnnnnnnnnnnnnnnnnnnnnnnnnnnnnnnnnnnnnnnnnnnnnnnnnnnnnnnnnnnnnnnnnnnnnnnnnnnnnnnnnnnnnnnnnnnnnnnnnnnnnnnnnnnnnnnnnnnnnnnnnnnnnnnnnnnnnnnnnnnnnnnnnnnnnnnnnnnnnnnnnnnnnnnnnnnnnnnnnnnnnnnnnnnnnnnnnnnnnnnnnnnnnnnnnnnnnnnnnnnnnnnnnnnnnnnnnnnnnnnnnnnnnnnnnnnnnnnnnnnnnnnnnnnnnnnnnnnnnnnnnnnnnnnnnnnnnnnnnnnnnnnnnnnnnnnnnnnnnnnnnnnnnnnnnnnnnnnnnnnnnnnnnnnnnnnnnnnnnnnnnnnnnnnnnnnnnnnnnnnnnnnnnnnnnnnnnnnnnnnnnnnnnnnnnnnnnnnnnnnnnnnnnnnnnnnnnnnnnnnnnnnnnnnnnnnnnnnnnnnnnnnnnnnnnnnnnnnnnnnnnnnnnnnnnnnnnnnnnnnnnnnnnnnnnnnnnnnnnnnnnnnnnnnnnnnnnnnnnnnnnnnnnnnnnnnnnnnnnnnnnnnnnnnnnnnnnnnnnnnnnnnnnnnnnnnnnnnnnnnnnnnnnnnnnnnnnnnnnnnnnnnnnnnnnnnnnnnnnnnnnnnnnnnnnnnnnnnnnnnnnnnnnnnnnnnnnnnnnnnnnnnnnnnnnnnnnnnnnnnnnnnnnnnnnnnnnnnnnnnnnnnnnnnnnnnnnnnnnnnnnnnnnnnnnnnnnnnnnnnnnnnnnnnnnnnnnnnnnnnnnnnnnnnnnnnnnnnnnnnnnnnnnnnnnnnnnnnnnnnnnnnnnnnnnnnnnnnnnnnnnnnnnnnnnnnnnnnnnnnnnnnnnnnnnnnnnnnnnnnnnnnnnnnnnnnnnnnnnnnnnnnnnnnnnnnnnnnnnnnnnnnnnnnnnnnnnnnnnnnnnnnnnnnnnnnnnnnnnnnnnnnnnnnnnnnnnnnnnnnnnnnnnnnnnnnnnnnnnnnnnnnnnnnnnnnnnnnnnnnnnnnnnnnnnnnnnnnnnnnnnnnnnnnnnnnnnnnnnnnnnnnnnnnnnnnnnnnnnnnnnnnnnnnnnnnnnnnnnnnnnnnnnnnnnnnnnnnnnnnnnnnnnnnnnnnnnnnnnnnnnnnnnnnnnnnnnnnnnnnnnnnnnnnnnnnnnnnnnnnnnnnnnnnnnnnnnnnnnnnnnnnnnnnnnnnnnnnnnnnnnnnnnnnnnnnnnnnnnnnnnnnnnnnnnnnnnnnnnnnnnnnnnnnnnnnnnnnnnnnnnnnnnnnnnnnnnnnnnnnnnnnnnnnnnnnnnnnnnnnnnnnnnnnnnnnnnnnnnnnnnnnnnnnnnnnnnnnnnnnnnnnnnnnnnnnnnnnnnnnnnnnnnnnnnnnnnnnnnnnnnnnnnnnnnnnnnnnnnnnnnnnnnnnnnnnnnnnnnnnnnnnnnnnnnnnnnnnnnnnnnnnnnnnnnnnnnnnnnnnnnnnnnnnnnnnnnnnnnnnnnnnnnnnnnnnnnnnnnnnnnnnnnnnnnnnnnnnnnnnnnnnnnnnnnnnnnnnnnnnnnnnnnnnnnnnnnnnnnnnnnnnnnnnnnnnnnnnnnnnnnnnnnnnnnnnnnnnnnnnnnnnnnnnnnnnnnnnnnnnnnnnnnnnnnnnnnnnnnnnnnnnnnnnnnnnnnnnnnnnnnnnnnnnnnnnnnnnnnnnnnnnnnnnnnnnnnnnnnnnnnnnnnnnnnnnnnnnnnnnnnnnnnnnnnnnnnnnnnnnnnnnnnnnnnnnnnnnnnnnnnnnnnnnnnnnnnnnnnnnnnnnnnnnnnnnnnnnnnnnnnnnnnnnnnnnnnnnnnnnnnnnnnnnnnnnnnnnnnnnnnnnnnnnnnnnnnnnnnnnnnnnnnnnnnnnnnnnnnnnnnnnnnnnnnnnnnnnnnnnnnnnnnnnnnnnnnnnnnnnnnnnnnnnnnnnnnnnnnnnnnnnnnnnnnnnnnnnnnnnnnnnnnnnnnnnnnnnnnnnnnnnnnnnnnnnnnnnnnnnnnnnnnnnnnnnnnnnnnnnnnnnnnnnnnnnnnnnnnnnnnnnnnnnnnnnnnnnnnnnnnnnnnnnnnnnnnnnnnnnnnnnnnnnnnnnnnnnnnnnnnnnnnnnnnnnnnnnnnnnnnnnnnnnnnnnnnnnnnnnnnnnnnnnnnnnnnnnnnnnnnnnnnnnnnnnnnnnnnnnnnnnnnnnnnnnnnnnnnnnnnnnnnnnnnnnnnnnnnnnnnnnnnnnnnnnnnnnnnnnnnnnnnnnnnnnnnnnnnnnnnnnnnnnnnnnnnnnnnnnnnnnnnnnnnnnnnnnnnnnnnnnnnnnnnnnnnnnnnnnnnnnnnnnnnnnnnnnnnnnnnnnnnnnnnnnnnnnnnnnnnnnnnnnnnnnnnnnnnnnnnnnnnnnnnnnnnnnnnnnnnnnnnnnnnnnnnnnnnnnnnnnnnnnnnnnnnnnnnnnnnnnnnnnnnnnnnnnnnnnnnnnnnnnnnnnnnnnnnnnnnnnnnnnnnnnnnnnnnnnnnnnnnnnnnnnnnnnnnnnnnnnnnnnnnnnnnnnnnnnnnnnnnnnnnnnnnnnnnnnnnnnnnnnnnnnnnnnnnnnnnnnnnnnnnnnnnnnnnnnnnnnnnnnnnnnnnnnnnnnnnnnnnnnnnnnnnnnnnnnnnnnnnnnnnnnnnnnnnnnnnnnnnnnnnnnnnnnnnnnnnnnnnnnnnnnnnnnnnnnnnnnnnnnnnnnnnnnnnnnnnnnnnnnnnnnnnnnnnnnnnnnnnnnnnnnnnnnnnnnnnnnnnnnnnnnnnnnnnnnnnnnnnnnnnnnnnnnnnnnnnnnnnnnnnnnnnnnnnnnnnnnnnnnnnnnnnnnnnnnnnnnnnnnnnnnnnnnnnnnnnnnnnnnnnnnnnnnnnnnnnnnnnnnnnnnnnnnnnnnnnnnnnnnnnnnnnnnnnnnnnnnnnnnnnnnnnnnnnnnnnnnnnnnnnnnnnnnnnnnnnnnnnnnnnnnnnnnnnnnnnnnnnnnnnnnnnnnnnnnnnnnnnnnnnnnnnnnnnnnnnnnnnnnnnnnnnnnnnnnnnnnnnnnnnnnnnnnnnnnnnnnnnnnnnnnnnnnnnnnnnnnnnnnnnnnnnnnnnnnnnnnnnnnnnnnnnnnnnnnnnnnnnnnnnnnnnnnnnnnnnnnnnnnnnnnnnnnnnnnnnnnnnnnnnnnnnnnnnnnnnnnnnnnnnnnnnnnnnnnnnnnnnnnnnnnnnnnnnnnnnnnnnnnnnnnnnnnnnnnnnnnnnnnnnnnnnnnnnnnnnnnnnnnnnnnnnnnnnnnnnnnnnnnnnnnnnnnnnnnnnnnnnnnnnnnnnnnnnnnnnnnnnnnnnnnnnnnnnnnnnnnnnnnnnnnnnnnnnnnnnnnnnnnnnnnnnnnnnnnnnnnnnnnnnnnnnnnnnnnnnnnnnnnnnnnnnnnnnnnnnnnnnnnnnnnnnnnnnnnnnnnnnnnnnnnnnnnnnnnnnnnnnnnnnnnnnnnnnnnnnnnnnnnnnnnnnnnnnnnnnnnnnnnnnnnnnnnnnnnnnnnnnnnnnnnnnnnnnnnnnnnnnnnnnnnnnnnnnnnnnnnnnnnnnnnnnnnnnnnnnnnnnnnnnnnnnnnnnnnnnnnnnnnnnnnnnnnnnnnnnnnnnnnnnnnnnnnnnnnnnnnnnnnnnnnnnnnnnnnnnnnnnnnnnnnnnnnnnnnnnnnnnnnnnnnnnnnnnnnnnnnnnnnnnnnnnnnnnnnnnnnnnnnnnnnnnnnnnnnnnnnnnnnnnnnnnnnnnnnnnnnnnnnnnnnnnnnnnnnnnnnnnnnnnnnnnnnnnnnnnnnnnnnnnnnnnnnnnnnnnnnnnnnnnnnnnnnnnnnnnnnnnnnnnnnnnnnnnnnnnnnnnnnnnnnnnnnnnnnnnnnnnnnnnnnnnnnnnnnnnnnnnnnnnnnnnnnnnnnnnnnnnnnnnnnnnnnnnnnnnnnnnnnnnnnnnnnnnnnnnnnnnnnnnnnnnnnnnnnnnnnnnnnnnnnnnnnnnnnnnnnnnnnnnnnnnnnnnnnnnnnnnnnnnnnnnnnnnnnnnnnnnnnnnnnnnnnnnnnnnnnnnnnnnnnnnnnnnnnnnnnnnnnnnnnnnnnnnnnnnnnnnnnnnnnnnnnnnnnnnnnnnnnnnnnnnnnnnnnnnnnnnnnnnnnnnnnnnnnnnnnnnnnnnnnnnnnnnnnnnnnnnnnnnnnnnnnnnnnnnnnnnnnnnnnnnnnnnnnnnnnnnnnnnnnnnnnnnnnnnnnnnnnnnnnnnnnnnnnnnnnnnnnnnnnnnnnnnnnnnnnnnnnnnnnnnnnnnnnnnnnnnnnnnnnnnnnnnnnnnnnnnnnnnnnnnnnnnnnnnnnnnnnnnnnnnnnnnnnnnnnnnnnnnnnnnnnnnnnnnnnnnnnnnnnnnnnnnnnnnnnnnnnnnnnnnnnnnnnnnnnnnnnnnnnnnnnnnnnnnnnnnnnnnnnnnnnnnnnnnnnnnnnnnnnnnnnnnnnnnnnnnnnnnnnnnnnnnnnnnnnnnnnnnnnnnnnnnnnnnnnnnnnnnnnnnnnnnnnnnnnnnnnnnnnnnnnnnnnnnnnnnnnnnnnnnnnnnnnnnnnnnnnnnnnnnnnnnnnnnnnnnnnnnnnnnnnnnnnnnnnnnnnnnnnnnnnnnnnnnnnnnnnnnnnnnnnnnnnnnnnnnnnnnnnnnnnnnnnnnnnnnnnnnnnnnnnnnnnnnnnnnnnnnnnnnnnnnnnnnnnnnnnnnnnnnnnnnnnnnnnnnnnnnnnnnnnnnnnnnnnnnnnnnnnnnnnnnnnnnnnnnnnnnnnnnnnnnnnnnnnnnnnnnnnnnnnnnnnnnnnnnnnnnnnnnnnnnnnnnnnnnnnnnnnnnnnnnnnnnnnnnnnnnnnnnnnnnnnnnnnnnnnnnnnnnnnnnnnnnnnnnnnnnnnnnnnnnnnnnnnnnnnnnnnnnnnnnnnnnnnnnnnnnnnnnnnnnnnnnnnnnnnnnnnnnnnnnnnnnnnnnnnnnnnnnnnnnnnnnnnnnnnnnnnnnnnnnnnnnnnnnnnnnnnnnnnnnnnnnnnnnnnnnnnnnnnnnnnnnnnnnnnnnnnnnnnnnnnnnnnnnnnnnnnnnnnnnnnnnnnnnnnnnnnnnnnnnnnnnnnnnnnnnnnnnnnnnnnnnnnnnnnnnnnnnnnnnnnnnnnnnnnnnnnnnnnnnnnnnnnnnnnnnnnnnnnnnnnnnnnnnnnnnnnnnnnnnnnnnnnnnnnnnnnnnnnnnnnnnnnnnnnnnnnnnnnnnnnnnnnnnnnnnnnnnnnnnnnnnnnnnnnnnnnnnnnnnnnnnnnnnnnnnnnnnnnnnnnnnnnnnnnnnnnnnnnnnnnnnnnnnnnnnnnnnnnnnnnnnnnnnnnnnnnnnnnnnnnnnnnnnnnnnnnnnnnnnnnnnnnnnnnnnnnnnnnnnnnnnnnnnnnnnnnnnnnnnnnnnnnnnnnnnnnnnnnnnnnnnnnnnnnnnnnnnnnnnnnnnnnnnnnnnnnnnnnnnnnnnnnnnnnnnnnnnnnnnnnnnnnnnnnnnnnnnnnnnnnnnnnnnnnnnnnnnnnnnnnnnnnnnnnnnnnnnnnnnnnnnnnnnnnnnnnnnnnnnnnnnnnnnnnnnnnnnnnnnnnnnnnnnnnnnnnnnnnnnnnnnnnnnnnnnnnnnnnnnnnnnnnnnnnnnnnnnnnnnnnnnnnnnnnnnnnnnnnnnnnnnnnnnnnnnnnnnnnnnnnnnnnnnnnnnnnnnnnnnnnnnnnnnnnnnnnnnnnnnnnnnnnnnnnnnnnnnnnnnnnnnnnnnnnnnnnnnnnnnnnnnnnnnnnnnnnnnnnnnnnnnnnnnnnnnnnnnnnnnnnnnnnnnnnnnnnnnnnnnnnnnnnnnnnnnnnnnnnnnnnnnnnnnnnnnnnnnnnnnnnnnnnnnnnnnnnnnnnnnnnnnnnnnnnnnnnnnnnnnnnnnnnnnnnnnnnnnnnnnnnnnnnnnnnnnnnnnnnnnnnnnnnnnnnnnnnnnnnnnnnnnnnnnnnnnnnnnnnnnnnnnnnnnnnnnnnnnnnnnnnnnnnnnnnnnnnnnnnnnnnnnnnnnnnnnnnnnnnnnnnnnnnnnnnnnnnnnnnnnnnnnnnnnnnnnnnnnnnnnnnnnnnnnnnnnnnnnnnnnnnnnnnnnnnnnnnnnnnnnnnnnnnnnnnnnnnnnnnnnnnnnnnnnnnnnnnnnnnnnnnnnnnnnnnnnnnnnnnnnnnnnnnnnnnnnnnnnnnnnnnnnnnnnnnnnnnnnnnnnnnnnnnnnnnnnnnnnnnnnnnnnnnnnnnnnnnnnnnnnnnnnnnnnnnnnnnnnnnnnnnnnnnnnnnnnnnnnnnnnnnnnnnnnnnnnnnnnnnnnnnnnnnnnnnnnnnnnnnnnnnnnnnnnnnnnnnnnnnnnnnnnnnnnnnnnnnnnnnnnnnnnnnnnnnnnnnnnnnnnnnnnnnnnnnnnnnnnnnnnnnnnnnnnnnnnnnnnnnnnnnnnnnnnnnnnnnnnnnnnnnnnnnnnnnnnnnnnnnnnnnnnnnnnnnnnnnnnnnnnnnnnnnnnnnnnnnnnnnnnnnnnnnnnnnnnnnnnnnnnnnnnnnnnnnnnnnnnnnnnnnnnnnnnnnnnnnnnnnnnnnnnnnnnnnnnnnnnnnnnnnnnnnnnnnnnnnnnnnnnnnnnnnnnnnnnnnnnnnnnnnnnnnnnnnnnnnnnnnnnnnnnnnnnnnnnnnnnnnnnnnnnnnnnnnnnnnnnnnnnnnnnnnnnnnnnnnnnnnnnnnnnnnnnnnnnnnnnnnnnnnnnnnnnnnnnnnnnnnnnnnnnnnnnnnnnnnnnnnnnnnnnnnnnnnnnnnnnnnnnnnnnnnnnnnnnnnnnnnnnnnnnnnnnnnnnnnnnnnnnnnnnnnnnnnnnnnnnnnnnnnnnnnnnnnnnnnnnnnnnnnnnnnnnnnnnnnnnnnnnnnnnnnnnnnnnnnnnnnnnnnnnnnnnnnnnnnnnnnnnnnnnnnnnnnnnnnnnnnnnnnnnnnnnnnnnnnnnnnnnnnnnnnnnnnnnnnnnnnnnnnnnnnnnnnnnnnnnnnnnnnnnnnnnnnnnnnnnnnnnnnnnnnnnnnnnnnnnnnnnnnnnnnnnnnnnnnnnnnnnnnnnnnnnnnnnnnnnnnnnnnnnnnnnnnnnnnnnnnnnnnnnnnnnnnnnnnnnnnnnnnnnnnnnnnnnnnnnnnnnnnnnnnnnnnnnnnnnnnnnnnnnnnnnnnnnnnnnnnnnnnnnnnnnnnnnnnnnnnnnnnnnnnnnnnnnnnnnnnnnnnnnnnnnnnnnnnnnnnnnnnnnnnnnnnnnnnnnnnnnnnnnnnnnnnnnnnnnnnnnnnnnnnnnnnnnnnnnnnnnnnnnnnnnnnnnnnnnnnnnnnnnnnnnnnnnnnnnnnnnnnnnnnnnnnnnnnnnnnnnnnnnnnnnnnnnnnnnnnnnnnnnnnnnnnnnnnnnnnnnnnnnnnnnnnnnnnnnnnnnnnnnnnnnnnnnnnnnnnnnnnnnnnnnnnnnnnnnnnnnnnnnnnnnnnnnnnnnnnnnnnnnnnnnnnnnnnnnnnnnnnnnnnnnnnnnnnnnnnnnnnnnnnnnnnnnnnnnnnnnnnnnnnnnnnnnnnnnnnnnnnnnnnnnnnnnnnnnnnnnnnnnnnnnnnnnnnnnnnnnnnnnnnnnnnnnnnnnnnnnnnnnnnnnnnnnnnnnnnnnnnnnnnnnnnnnnnnnnnnnnnnnnnnnnnnnnnnnnnnnnnnnnnnnnnnnnnnnnnnnnnnnnnnnnnnnnnnnnnnnnnnnnnnnnnnnnnnnnnnnnnnnnnnnnnnnnnnnnnnnnnnnnnnnnnnnnnnnnnnnnnnnnnnnnnnnnnnnnnnnnnnnnnnnnnnnnnnnnnnnnnnnnnnnnnnnnnnnnnnnnnnnnnnnnnnnnnnnnnnnnnnnnnnnnnnnnnnnnnnnnnnnnnnnnnnnnnnnnnnnnnnnnnnnnnnnnnnnnnnnnnnnnnnnnnnnnnnnnnnnnnnnnnnnnnnnnnnnnnnnnnnnnnnnnnnnnnnnnnnnnnnnnnnnnnnnnnnnnnnnnnnnnnnnnnnnnnnnnnnnnnnnnnnnnnnnnnnnnnnnnnnnnnnnnnnnnnnnnnnnnnnnnnnnnnnnnnnnnnnnnnnnnnnnnnnnnnnnnnnnnnnnnnnnnnnnnnnnnnnnnnnnnnnnnnnnnnnnnnnnnnnnnnnnnnnnnnnnnnnnnnnnnnnnnnnnnnnnnnnnnnnnnnnnnnnnnnnnnnnnnnnnnnnnnnnnnnnnnnnnnnnnnnnnnnnnnnnnnnnnnnnnnnnnnnnnnnnnnnnnnnnnnnnnnnnnnnnnnnnnnnnnnnnnnnnnnnnnnnnnnnnnnnnnnnnnnnnnnnnnnnnnnnnnnnnnnnnnnnnnnnnnnnnnnnnnnnnnnnnnnnnnnnnnnnnnnnnnnnnnnnnnnnnnnnnnnnnnnnnnnnnnnnnnnnnnnnnnnnnnnnnnnnnnnnnnnnnnnnnnnnnnnnnnnnnnnnnnnnnnnnnnnnnnnnnnnnnnnnnnnnnnnnnnnnnnnnnnnnnnnnnnnnnnnnnnnnnnnnnnnnnnnnnnnnnnnnnnnnnnnnnnnnnnnnnnnnnnnnnnnnnnnnnnnnnnnnnnnnnnnnnnnnnnnnnnnnnnnnnnnnnnnnnnnnnnnnnnnnnnnnnnnnnnnnnnnnnnnnnnnnnnnnnnnnnnnnnnnnnnnnnnnnnnnnnnnnnnnnnnnnnnnnnnnnnnnnnnnnnnnnnnnnnnnnnnnnnnnnnnnnnnnnnnnnnnnnnnnnnnnnnnnnnnnnnnnnnnnnnnnnnnnnnnnnnnnnnnnnnnnnnnnnnnnnnnnnnnnnnnnnnnnnnnnnnnnnnnnnnnnnnnnnnnnnnnnnnnnnnnnnnnnnnnnnnnnnnnnnnnnnnnnnnnnnnnnnnnnnnnnnnnnnnnnnnnnnnnnnnnnnnnnnnnnnnnnnnnnnnnnnnnnnnnnnnnnnnnnnnnnnnnnnnnnnnnnnnnnnnnnnnnnnnnnnnnnnnnnnnnnnnnnnnnnnnnnnnnnnnnnnnnnnnnnnnnnnnnnnnnnnnnnnnnnnnnnnnnnnnnnnnnnnnnnnnnnnnnnnnnnnnnnnnnnnnnnnnnnnnnnnnnnnnnnnnnnnnnnnnnnnnnnnnnnnnnnnnnnnnnnnnnnnnnnnnnnnnnnnnnnnnnnnnnnnnnnnnnnnnnnnnnnnnnnnnnnnnnnnnnnnnnnnnnnnnnnnnnnnnnnnnnnnnnnnnnnnnnnnnnnnnnnnnnnnnnnnnnnnnnnnnnnnnnnnnnnnnnnnnnnnnnnnnnnnnnnnnnnnnnnnnnnnnnnnnnnnnnnnnnnnnnnnnnnnnnnnnnnnnnnnnnnnnnnnnnnnnnnnnnnnnnnnnnnnnnnnnnnnnnnnnnnnnnnnnnnnnnnnnnnnnnnnnnnnnnnnnnnnnnnnnnnnnnnnnnnnnnnnnnnnnnnnnnnnnnnnnnnnnnnnnnnnnnnnnnnnnnnnnnnnnnnnnnnnnnnnnnnnnnnnnnnnnnnnnnnnnnnnnnnnnnnnnnnnnnnnnnnnnnnnnnnnnnnnnnnnnnnnnnnnnnnnnnnnnnnnnnnnnnnnnnnnnnnnnnnnnnnnnnnnnnnnnnnnnnnnnnnnnnnnnnnnnnnnnnnnnnnnnnnnnnnnnnnnnnnnnnnnnnnnnnnnnnnnnnnnnnnnnnnnnnnnnnnnnnnnnnnnnnnnnnnnnnnnnnnnnnnnnnnnnnnnnnnnnnnnnnnnnnnnnnnnnnnnnnnnnnnnnnnnnnnnnnnnnnnnnnnnnnnnnnnnnnnnnnnnnnnnnnnnnnnnnnnnnnnnnnnnnnnnnnnnnnnnnnnnnnnnnnnnnnnnnnnnnnnnnnnnnnnnnnnnnnnnnnnnnnnnnnnnnnnnnnnnnnnnnnnnnnnnnnnnnnnnnnnnnnnnnnnnnnnnnnnnnnnnnnnnnnnnnnnnnnnnnnnnnnnnnnnnnnnnnnnnnnnnnnnnnnnnnnnnnnnnnnnnnnnnnnnnnnnnnnnnnnnnnnnnnnnnnnnnnnnnnnnnnnnnnnnnnnnnnnnnnnnnnnnnnnnnnnnnnnnnnnnnnnnnnnnnnnnnnnnnnnnnnnnnnnnnnnnnnnnnnnnnnnnnnnnnnnnnnnnnnnnnnnnnnnnnnnnnnnnnnnnnnnnnnnnnnnnnnnnnnnnnnnnnnnnnnnnnnnnnnnnnnnnnnnnnnnnnnnnnnnnnnnnnnnnnnnnnnnnnnnnnnnnnnnnnnnnnnnnnnnnnnnnnnnnnnnnnnnnnnnnnnnnnnnnnnnnnnnnnnnnnnnnnnnnnnnnnnnnnnnnnnnnnnnnnnnnnnnnnnnnnnnnnnnnnnnnnnnnnnnnnnnnnnnnnnnnnnnnnnnnnnnnnnnnnnnnnnnnnnnnnnnnnnnnnnnnnnnnnnnnnnnnnnnnnnnnnnnnnnnnnnnnnnnnnnnnnnnnnnnnnnnnnnnnnnnnnnnnnnnnnnnnnnnnnnnnnnnnnnnnnnnnnnnnnnnnnnnnnnnnnnnnnnnnnnnnnnnnnnnnnnnnnnnnnnnnnnnnnnnnnnnnnnnnnnnnnnnnnnnnnnnnnnnnnnnnnnnnnnnnnnnnnnnnnnnnnnnnnnnnnnnnnnnnnnnnnnnnnnnnnnnnnnnnnnnnnnnnnnnnnnnnnnnnnnnnnnnnnnnnnnnnnnnnnnnnnnnnnnnnnnnnnnnnnnnnnnnnnnnnnnnnnnnnnnnnnnnnnnnnnnnnnnnnnnnnnnnnnnnnnnnnnnnnnnnnnnnnnnnnnnnnnnnnnnnnnnnnnnnnnnnnnnnnnnnnnnnnnnnnnnnnnnnnnnnnnnnnnnnnnnnnnnnnnnnnnnnnnnnnnnnnnnnnnnnnnnnnnnnnnnnnnnnnnnnnnnnnnnnnnnnnnnnnnnnnnnnnnnnnnnnnnnnnnnnnnnnnnnnnnnnnnnnnnnnnnnnnnnnnnnnnnnnnnnnnnnnnnnnnnnnnnnnnnnnnnnnnnnnnnnnnnnnnnnnnnnnnnnnnnnnnnnnnnnnnnnnnnnnnnnnnnnnnnnnnnnnnnnnnnnnnnnnnnnnnnnnnnnnnnnnnnnnnnnnnnnnnnnnnnnnnnnnnnnnnnnnnnnnnnnnnnnnnnnnnnnnnnnnnnnnnnnnnnnnnnnnnnnnnnnnnnnnnnnnnnnnnnnnnnnnnnnnnnnnnnnnnnnnnnnnnnnnnnnnnnnnnnnnnnnnnnnnnnnnnnnnnnnnnnnnnnnnnnnnnnnnnnnnnnnnnnnnnnnnnnnnnnnnnnnnnnnnnnnnnnnnnnnnnnnnnnnnnnnnnnnnnnnnnnnnnnnnnnnnnnnnnnnnnnnnnnnnnnnnnnnnnnnnnnnnnnnnnnnnnnnnnnnnnnnnnnnnnnnnnnnnnnnnnnnnnnnnnnnnnnnnnnnnnnnnnnnnnnnnnnnnnnnnnnnnnnnnnnnnnnnnnnnnnnnnnnnnnnnnnnnnnnnnnnnnnnnnnnnnnnnnnnnnnnnnnnnnnnnnnnnnnnnnnnnnnnnnnnnnnnnnnnnnnnnnnnnnnnnnnnnnnnnnnnnnnnnnnnnnnnnnnnnnnnnnnnnnnnnnnnnnnnnnnnnnnnnnnnnnnnnnnnnnnnnnnnnnnnnnnnnnnnnnnnnnnnnnnnnnnnnnnnnnnnnnnnnnnnnnnnnnnnnnnnnnnnnnnnnnnnnnnnnnnnnnnnnnnnnnnnnnnnnnnnnnnnnnnnnnnnnnnnnnnnnnnnnnnnnnnnnnnnnnnnnnnnnnnnnnnnnnnnnnnnnnnnnnnnnnnnnnnnnnnnnnnnnnnnnnnnnnnnnnnnnnnnnnnnnnnnnnnnnnnnnnnnnnnnnnnnnnnnnnnnnnnnnnnnnnnnnnnnnnnnnnnnnnnnnnnnnnnnnnnnnnnnnnnnnnnnnnnnnnnnnnnnnnnnnnnnnnnnnnnnnnnnnnnnnnnnnnnnnnnnnnnnnnnnnnnnnnnnnnnnnnnnnnnnnnnnnnnnnnnnnnnnnnnnnnnnnnnnnnnnnnnnnnnnnnnnnnnnnnnnnnnnnnnnnnnnnnnnnnnnnnnnnnnnnnnnnnnnnnnnnnnnnnnnnnnnnnnnnnnnnnnnnnnnnnnnnnnnnnnnnnnnnnnnnnnnnnnnnnnnnnnnnnnnnnnnnnnnnnnnnnnnnnnnnnnnnnnnnnnnnnnnnnnnnnnnnnnnnnnnnnnnnnnnnnnnnnnnnnnnnnnnnnnnnnnnnnnnnnnnnnnnnnnnnnnnnnnnnnnnnnnnnnnnnnnnnnnnnnnnnnnnnnnnnnnnnnnnnnnnnnnnnnnnnnnnnnnnnnnnnnnnnnnnnnnnnnnnnnnnnnnnnnnnnnnnnnnnnnnnnnnnnnnnnnnnnnnnnnnnnnnnnnnnnnnnnnnnnnnnnnnnnnnnnnnnnnnnnnnnnnnnnnnnnnnnnnnnnnnnnnnnnnnnnnnnnnnnnnnnnnnnnnnnnnnnnnnnnnnnnnnnnnnnnnnnnnnnnnnnnnnnnnnnnnnnnnnnnnnnnnnnnnnnnnnnnnnnnnnnnnnnnnnnnnnnnnnnnnnnnnnnnnnnnnnnnnnnnnnnnnnnnnnnnnnnnnnnnnnnnnnnnnnnnnnnnnnnnnnnnnnnnnnnnnnnnnnnnnnnnnnnnnnnnnnnnnnnnnnnnnnnnnnnnnnnnnnnnnnnnnnnnnnnnnnnnnnnnnnnnnnnnnnnnnnnnnnnnnnnnnnnnnnnnnnnnnnnnnnnnnnnnnnnnnnnnnnnnnnnnnnnnnnnnnnnnnnnnnnnnnnnnnnnnnnnnnnnnnnnnnnnnnnnnnnnnnnnnnnnnnnnnnnnnnnnnnnnnnnnnnnnnnnnnnnnnnnnnnnnnnnnnnnnnnnnnnnnnnnnnnnnnnnnnnnnnnnnnnnnnnnnnnnnnnnnnnnnnnnnnnnnnnnnnnnnnnnnnnnnnnnnnnnnnnnnnnnnnnnnnnnnnnnnnnnnnnnnnnnnnnnnnnnnnnnnnnnnnnnnnnnnnnnnnnnnnnnnnnnnnnnnnnnnnnnnnnnnnnnnnnnnnnnnnnnnnnnnnnnnnnnnnnnnnnnnnnnnnnnnnnnnnnnnnnnnnnnnnnnnnnnnnnnnnnnnnnnnnnnnnnnnnnnnnnnnnnnnnnnnnnnnnnnnnnnnnnnnnnnnnnnnnnnnnnnnnnnnnnnnnnnnnnnnnnnnnnnnnnnnnnnnnnnnnnnnnnnnnnnnnnnnnnnnnnnnnnnnnnnnnnnnnnnnnnnnnnnnnnnnnnnnnnnnnnnnnnnnnnnnnnnnnnnnnnnnnnnnnnnnnnnnnnnnnnnnnnnnnnnnnnnnnnnnnnnnnnnnnnnnnnnnnnnnnnnnnnnnnnnnnnnnnnnnnnnnnnnnnnnnnnnnnnnnnnnnnnnnnnnnnnnnnnnnnnnnnnnnnnnnnnnnnnnnnnnnnnnnnnnnnnnnnnnnnnnnnnnnnnnnnnnnnnnnnnnnnnnnnnnnnnnnnnnnnnnnnnnnnnnnnnnnnnnnnnnnnnnnnnnnnnnnnnnnnnnnnnnnnnnnnnnnnnnnnnnnnnnnnnnnnnnnnnnnnnnnnnnnnnnnnnnnnnnnnnnnnnnnnnnnnnnnnnnnnnnnnnnnnnnnnnnnnnnnnnnnnnnnnnnnnnnnnnnnnnnnnnnnnnnnnnnnnnnnnnnnnnnnnnnnnnnnnnnnnnnnnnnnnnnnnnnnnnnnnnnnnnnnnnnnnnnnnnnnnnnnnnnnnnnnnnnnnnnnnnnnnnnnnnnnnnnnnnnnnnnnnnnnnnnnnnnnnnnnnnnnnnnnnnnnnnnnnnnnnnnnnnnnnnnnnnnnnnnnnnnnnnnnnnnnnnnnnnnnnnnnnnnnnnnnnnnnnnnnnnnnnnnnnnnnnnnnnnnnnnnnnnnnnnnnnnnnnnnnnnnnnnnnnnnnnnnnnnnnnnnnnnnnnnnnnnnnnnnnnnnnnnnnnnnnnnnnnnnnnnnnnnnnnnnnnnnnnnnnnnnnnnnnnnnnnnnnnnnnnnnnnnnnnnnnnnnnnnnnnnnnnnnnnnnnnnnnnnnnnnnnnnnnnnnnnnnnnnnnnnnnnnnnnnnnnnnnnnnnnnnnnnnnnnnnnnnnnnnnnnnnnnnnnnnnnnnnnnnnnnnnnnnnnnnnnnnnnnnnnnnnnnnnnnnnnnnnnnnnnnnnnnnnnnnnnnnnnnnnnnnnnnnnnnnnnnnnnnnnnnnnnnnnnnnnnnnnnnnnnnnnnnnnnnnnnnnnnnnnnnnnnnnnnnnnnnnnnnnnnnnnnnnnnnnnnnnnnnnnnnnnnnnnnnnnnnnnnnnnnnnnnnnnnnnnnnnnnnnnnnnnnnnnnnnnnnnnnnnnnnnnnnnnnnnnnnnnnnnnnnnnnnnnnnnnnnnnnnnnnnnnnnnnnnnnnnnnnnnnnnnnnnnnnnnnnnnnnnnnnnnnnnnnnnnnnnnnnnnnnnnnnnnnnnnnnnnnnnnnnnnnnnnnnnnnnnnnnnnnnnnnnnnnnnnnnnnnnnnnnnnnnnnnnnnnnnnnnnnnnnnnnnnnnnnnnnnnnnnnnnnnnnnnnnnnnnnnnnnnnnnnnnnnnnnnnnnnnnnnnnnnnnnnnnnnnnnnnnnnnnnnnnnnnnnnnnnnnnnnnnnnnnnnnnnnnnnnnnnnnnnnnnnnnnnnnnnnnnnnnnnnnnnnnnnnnnnnnnnnnnnnnnnnnnnnnnnnnnnnnnnnnnnnnnnnnnnnnnnnnnnnnnnnnnnnnnnnnnnnnnnnnnnnnnnnnnnnnnnnnnnnnnnnnnnnnnnnnnnnnnnnnnnnnnnnnnnnnnnnnnnnnnnnnnnnnnnnnnnnnnnnnnnnnnnnnnnnnnnnnnnnnnnnnnnnnnnnnnnnnnnnnnnnnnnnnnnnnnnnnnnnnnnnnnnnnnnnnnnnnnnnnnnnnnnnnnnnnnnnnnnnnnnnnnnnnnnnnnnnnnnnnnnnnnnnnnnnnnnnnnnnnnnnnnnnnnnnnnnnnnnnnnnnnnnnnnnnnnnnnnnnnnnnnnnnnnnnnnnnnnnnnnnnnnnnnnnnnnnnnnnnnnnnnnnnnnnnnnnnnnnnnnnnnnnnnnnnnnnnnnnnnnnnnnnnnnnnnnnnnnnnnnnnnnnnnnnnnnnnnnnnnnnnnnnnnnnnnnnnnnnnnnnnnnnnnnnnnnnnnnnnnnnnnnnnnnnnnnnnnnnnnnnnnnnnnnnnnnnnnnnnnnnnnnnnnnnnnnnnnnnnnnnnnnnnnnnnnnnnnnnnnnnnnnnnnnnnnnnnnnnnnnnnnnnnnnnnnnnnnnnnnnnnnnnnnnnnnnnnnnnnnnnnnnnnnnnnnnnnnnnnnnnnnnnnnnnnnnnnnnnnnnnnnnnnnnnnnnnnnnnnnnnnnnnnnnnnnnnnnnnnnnnnnnnnnnnnnnnnnnnnnnnnnnnnnnnnnnnnnnnnnnnnnnnnnnnnnnnnnnnnnnnnnnnnnnnnnnnnnnnnnnnnnnnnnnnnnnnnnnnnnnnnnnnnnnnnnnnnnnnnnnnnnnnnnnnnnnnnnnnnnnnnnnnnnnnnnnnnnnnnnnnnnnnnnnnnnnnnnnnnnnnnnnnnnnnnnnnnnnnnnnnnnnnnnnnnnnnnnnnnnnnnnnnnnnnnnnnnnnnnnnnnnnnnnnnnnnnnnnnnnnnnnnnnnnnnnnnnnnnnnnnnnnnnnnnnnnnnnnnnnnnnnnnnnnnnnnnnnnnnnnnnnnnnnnnnnnnnnnnnnnnnnnnnnnnnnnnnnnnnnnnnnnnnnnnnnnnnnnnnnnnnnnnnnnnnnnnnnnnnnnnnnnnnnnnnnnnnnnnnnnnnnnnnnnnnnnnnnnnnnnnnnnnnnnnnnnnnnnnnnnnnnnnnnnnnnnnnnnnnnnnnnnnnnnnnnnnnnnnnnnnnnnnnnnnnnnnnnnnnnnnnnnnnnnnnnnnnnnnnnnnnnnnnnnnnnnnnnnnnnnnnnnnnnnnnnnnnnnnnnnnnnnnnnnnnnnnnnnnnnnnnnnnnnnnnnnnnnnnnnnnnnnnnnnnnnnnnnnnnnnnnnnnnnnnnnnnnnnnnnnnnnnnnnnnnnnnnnnnnnnnnnnnnnnnnnnnnnnnnnnnnnnnnnnnnnnnnnnnnnnnnnnnnnnnnnnnnnnnnnnnnnnnnnnnnnnnnnnnnnnnnnnnnnnnnnnnnnnnnnnnnnnnnnnnnnnnnnnnnnnnnnnnnnnnnnnnnnnnnnnnnnnnnnnnnnnnnnnnnnnnnnnnnnnnnnnnnnnnnnnnnnnnnnnnnnnnnnnnnnnnnnnnnnnnnnnnnnnnnnnnnnnnnnnnnnnnnnnnnnnnnnnnnnnnnnnnnnnnnnnnnnnnnnnnnnnnnnnnnnnnnnnnnnnnnnnnnnnnnnnnnnnnnnnnnnnnnnnnnnnnnnnnnnnnnnnnnnnnnnnnnnnnnnnnnnnnnnnnnnnnnnnnnnnnnnnnnnnnnnnnnnnnnnnnnnnnnnnnnnnnnnnnnnnnnnnnnnnnnnnnnnnnnnnnnnnnnnnnnnnnnnnnnnnnnnnnnnnnnnnnnnnnnnnnnnnnnnnnnnnnnnnnnnnnnnnnnnnnnnnnnnnnnnnnnnnnnnnnnnnnnnnnnnnnnnnnnnnnnnnnnnnnnnnnnnnnnnnnnnnnnnnnnnnnnnnnnnnnnnnnnnnnnnnnnnnnnnnnnnnnnnnnnnnnnnnnnnnnnnnnnnnnnnnnnnnnnnnnnnnnnnnnnnnnnnnnnnnnnnnnnnnnnnnnnnnnnnnnnnnnnnnnnnnnnnnnnnnnnnnnnnnnnnnnnnnnnnnnnnnnnnnnnnnnnnnnnnnnnnnnnnnnnnnnnnnnnnnnnnnnnnnnnnnnnnnnnnnnnnnnnnnnnnnnnnnnnnnnnnnnnnnnnnnnnnnnnnnnnnnnnnnnnnnnnnnnnnnnnnnnnnnnnnnnnnnnnnnnnnnnnnnnnnnnnnnnnnnnnnnnnnnnnnnnnnnnnnnnnnnnnnnnnnnnnnnnnnnnnnnnnnnnnnnnnnnnnnnnnnnnnnnnnnnnnnnnnnnnnnnnnnnnnnnnnnnnnnnnnnnnnnnnnnnnnnnnnnnnnnnnnnnnnnnnnnnnnnnnnnnnnnnnnnnnnnnnnnnnnnnnnnnnnnnnnnnnnnnnnnnnnnnnnnnnnnnnnnnnnnnnnnnnnnnnnnnnnnnnnnnnnnnnnnnnnnnnnnnnnnnnnnnnnnnnnnnnnnnnnnnnnnnnnnnnnnnnnnnnnnnnnnnnnnnnnnnnnnnnnnnnnnnnnnnnnnnnnnnnnnnnnnnnnnnnnnnnnnnnnnnnnnnnnnnnnnnnnnnnnnnnnnnnnnnnnnnnnnnnnnnnnnnnnnnnnnnnnnnnnnnnnnnnnnnnnnnnnnnnnnnnnnnnnnnnnnnnnnnnnnnnnnnnnnnnnnnnnnnnnnnnnnnnnnnnnnnnnnnnnnnnnnnnnnnnnnnnnnnnnnnnnnnnnnnnnnnnnnnnnnnnnnnnnnnnnnnnnnnnnnnnnnnnnnnnnnnnnnnnnnnnnnnnnnnnnnnnnnnnnnnnnnnnnnnnnnnnnnnnnnnnnnnnnnnnnnnnnnnnnnnnnnnnnnnnnnnnnnnnnnnnnnnnnnnnnnnnnnnnnnnnnnnnnnnnnnnnnnnnnnnnnnnnnnnnnnnnnnnnnnnnnnnnnnnnnnnnnnnnnnnnnnnnnnnnnnnnnnnnnnnnnnnnnnnnnnnnnnnnnnnnnnnnnnnnnnnnnnnnnnnnnnnnnnnnnnnnnnnnnnnnnnnnnnnnnnnnnnnnnnnnnnnnnnnnnnnnnnnnnnnnnnnnnnnnnnnnnnnnnnnnnnnnnnnnnnnnnnnnnnnnnnnnnnnnnnnnnnnnnnnnnnnnnnnnnnnnnnnnnnnnnnnnnnnnnnnnnnnnnnnnnnnnnnnnnnnnnnnnnnnnnnnnnnnnnnnnnnnnnnnnnnnnnnnnnnnnnnnnnnnnnnnnnnnnnnnnnnnnnnnnnnnnnnnnnnnnnnnnnnnnnnnnnnnnnnnnnnnnnnnnnnnnnnnnnnnnnnnnnnnnnnnnnnnnnnnnnnnnnnnnnnnnnnnnnnnnnnnnnnnnnnnnnnnnnnnnnnnnnnnnnnnnnnnnnnnnnnnnnnnnnnnnnnnnnnnnnnnnnnnnnnnnnnnnnnnnnnnnnnnnnnnnnnnnnnnnnnnnnnnnnnnnnnnnnnnnnnnnnnnnnnnnnnnnnnnnnnnnnnnnnnnnnnnnnnnnnnnnnnnnnnnnnnnnnnnnnnnnnnnnnnnnnnnnnnnnnnnnnnnnnnnnnnnnnnnnnnnnnnnnnnnnnnnnnnnnnnnnnnnnnnnnnnnnnnnnnnnnnnnnnnnnnnnnnnnnnnnnnnnnnnnnnnnnnnnnnnnnnnnnnnnnnnnnnnnnnnnnnnnnnnnnnnnnnnnnnnnnnnnnnnnnnnnnnnnnnnnnnnnnnnnnnnnnnnnnnnnnnnnnnnnnnnnnnnnnnnnnnnnnnnnnnnnnnnnnnnnnnnnnnnnnnnnnnnnnnnnnnnnnnnnnnnnnnnnnnnnnnnnnnnnnnnnnnnnnnnnnnnnnnnnnnnnnnnnnnnnnnnnnnnnnnnnnnnnnnnnnnnnnnnnnnnnnnnnnnnnnnnnnnnnnnnnnnnnnnnnnnnnnnnnnnnnnnnnnnnnnnnnnnnnnnnnnnnnnnnnnnnnnnnnnnnnnnnnnnnnnnnnnnnnnnnnnnnnnnnnnnnnnnnnnnnnnnnnnnnnnnnnnnnnnnnnnnnnnnnnnnnnnnnnnnnnnnnnnnnnnnnnnnnnnnnnnnnnnnnnnnnnnnnnnnnnnnnnnnnnnnnnnnnnnnnnnnnnnnnnnnnnnnnnnnnnnnnnnnnnnnnnnnnnnnnnnnnnnnnnnnnnnnnnnnnnnnnnnnnnnnnnnnnnnnnnnnnnnnnnnnnnnnnnnnnnnnnnnnnnnnnnnnnnnnnnnnnnnnnnnnnnnnnnnnnnnnnnnnnnnnnnnnnnnnnnnnnnnnnnnnnnnnnnnnnnnnnnnnnnnnnnnnnnnnnnnnnnnnnnnnnnnnnnnnnnnnnnnnnnnnnnnnnnnnnnnnnnnnnnnnnnnnnnnnnnnnnnnnnnnnnnnnnnnnnnnnnnnnnnnnnnnnnnnnnnnnnnnnnnnnnnnnnnnnnnnnnnnnnnnnnnnnnnnnnnnnnnnnnnnnnnnnnnnnnnnnnnnnnnnnnnnnnnnnnnnnnnnnnnnnnnnnnnnnnnnnnnnnnnnnnnnnnnnnnnnnnnnnnnnnnnnnnnnnnnnnnnnnnnnnnnnnnnnnnnnnnnnnnnnnnnnnnnnnnnnnnnnnnnnnnnnnnnnnnnnnnnnnnnnnnnnnnnnnnnnnnnnnnnnnnnnnnnnnnnnnnnnnnnnnnnnnnnnnnnnnnnnnnnnnnnnnnnnnnnnnnnnnnnnnnnnnnnnnnnnnnnnnnnnnnnnnnnnnnnnnnnnnnnnnnnnnnnnnnnnnnnnnnnnnnnnnnnnnnnnnnnnnnnnnnnnnnnnnnnnnnnnnnnnnnnnnnnnnnnnnnnnnnnnnnnnnnnnnnnnnnnnnnnnnnnnnnnnnnnnnnnnnnnnnnnnnnnnnnnnnnnnnnnnnnnnnnnnnnnnnnnnnnnnnnnnnnnnnnnnnnnnnnnnnnnnnnnnnnnnnnnnnnnnnnnnnnnnnnnnnnnnnnnnnnnnnnnnnnnnnnnnnnnnnnnnnnnnnnnnnnnnnnnnnnnnnnnnnnnnnnnnnnnnnnnnnnnnnnnnnnnnnnnnnnnnnnnnnnnnnnnnnnnnnnnnnnnnnnnnnnnnnnnnnnnnnnnnnnnnnnnnnnnnnnnnnnnnnnnnnnnnnnnnnnnnnnnnnnnnnnnnnnnnnnnnnnnnnnnnnnnnnnnnnnnnnnnnnnnnnnnnnnnnnnnnnnnnnnnnnnnnnnnnnnnnnnnnnnnnnnnnnnnnnnnnnnnnnnnnnnnnnnnnnnnnnnnnnnnnnnnnnnnnnnnnnnnnnnnnnnnnnnnnnnnnnnnnnnnnnnnnnnnnnnnnnnnnnnnnnnnnnnnnnnnnnnnnnnnnnnnnnnnnnnnnnnnnnnnnnnnnnnnnnnnnnnnnnnnnnnnnnnnnnnnnnnnnnnnnnnnnnnnnnnnnnnnnnnnnnnnnnnnnnnnnnnnnnnnnnnnnnnnnnnnnnnnnnnnnnnnnnnnnnnnnnnnnnnnnnnnnnnnnnnnnnnnnnnnnnnnnnnnnnnnnnnnnnnnnnnnnnnnnnnnnnnnnnnnnnnnnnnnnnnnnnnnnnnnnnnnnnnnnnnnnnnnnnnnnnnnnnnnnnnnnnnnnnnnnnnnnnnnnnnnnnnnnnnnnnnnnnnnnnnnnnnnnnnnnnnnnnnnnnnnnnnnnnnnnnnnnnnnnnnnnnnnnnnnnnnnnnnnnnnnnnnnnnnnnnnnnnnnnnnnnnnnnnnnnnnnnnnnnnnnnnnnnnnnnnnnnnnnnnnnnnnnnnnnnnnnnnnnnnnnnnnnnnnnnnnnnnnnnnnnnnnnnnnnnnnnnnnnnnnnnnnnnnnnnnnnnnnnnnnnnnnnnnnnnnnnnnnnnnnnnnnnnnnnnnnnnnnnnnnnnnnnnnnnnnnnnnnnnnnnnnnnnnnnnnnnnnnnnnnnnnnnnnnnnnnnnnnnnnnnnnnnnnnnnnnnnnnnnnnnnnnnnnnnnnnnnnnnnnnnnnnnnnnnnnnnnnnnnnnnnnnnnnnnnnnnnnnnnnnnnnnnnnnnnnnnnnnnnnnnnnnnnnnnnnnnnnnnnnnnnnnnnnnnnnnnnnnnnnnnnnnnnnnnnnnnnnnnnnnnnnnnnnnnnnnnnnnnnnnnnnnnnnnnnnnnnnnnnnnnnnnnnnnnnnnnnnnnnnnnnnnnnnnnnnnnnnnnnnnnnnnnnnnnnnnnnnnnnnnnnnnnnnnnnnnnnnnnnnnnnnnnnnnnnnnnnnnnnnnnnnnnnnnnnnnnnnnnnnnnnnnnnnnnnnnnnnnnnnnnnnnnnnnnnnnnnnnnnnnnnnnnnnnnnnnnnnnnnnnnnnnnnnnnnnnnnnnnnnnnnnnnnnnnnnnnnnnnnnnnnnnnnnnnnnnnnnnnnnnnnnnnnnnnnnnnnnnnnnnnnnnnnnnnnnnnnnnnnnnnnnnnnnnnnnnnnnnnnnnnnnnnnnnnnnnnnnnnnnnnnnnnnnnnnnnnnnnnnnnnnnnnnnnnnnnnnnnnnnnnnnnnnnnnnnnnnnnnnnnnnnnnnnnnnnnnnnnnnnnnnnnnnnnnnnnnnnnnnnnnnnnnnnnnnnnnnnnnnnnnnnnnnnnnnnnnnnnnnnnnnnnnnnnnnnnnnnnnnnnnnnnnnnnnnnnnnnnnnnnnnnnnnnnnnnnnnnnnnnnnnnnnnnnnnnnnnnnnnnnnnnnnnnnnnnnnnnnnnnnnnnnnnnnnnnnnnnnnnnnnnnnnnnnnnnnnnnnnnnnnnnnnnnnnnnnnnnnnnnnnnnnnnnnnnnnnnnnnnnnnnnnnnnnnnnnnnnnnnnnnnnnnnnnnnnnnnnnnnnnnnnnnnnnnnnnnnnnnnnnnnnnnnnnnnnnnnnnnnnnnnnnnnnnnnnnnnnnnnnnnnnnnnnnnnnnnnnnnnnnnnnnnnnnnnnnnnnnnnnnnnnnnnnnnnnnnnnnnnnnnnnnnnnnnnnnnnnnnnnnnnnnnnnnnnnnnnnnnnnnnnnnnnnnnnnnnnnnnnnnnnnnnnnnnnnnnnnnnnnnnnnnnnnnnnnnnnnnnnnnnnnnnnnnnnnnnnnnnnnnnnnnnnnnnnnnnnnnnnnnnnnnnnnnnnnnnnnnnnnnnnnnnnnnnnnnnnnnnnnnnnnnnnnnnnnnnnnnnnnnnnnnnnnnnnnnnnnnnnnnnnnnnnnnnnnnnnnnnnnnnnnnnnnnnnnnnnnnnnnnnnnnnnnnnnnnnnnnnnnnnnnnnnnnnnnnnnnnnnnnnnnnnnnnnnnnnnnnnnnnnnnnnnnnnnnnnnnnnnnnnnnnnnnnnnnnnnnnnnnnnnnnnnnnnnnnnnnnnnnnnnnnnnnnnnnnnnnnnnnnnnnnnnnnnnnnnnnnnnnnnnnnnnnnnnnnnnnnnnnnnnnnnnnnnnnnnnnnnnnnnnnnnnnnnnnnnnnnnnnnnnnnnnnnnnnnnnnnnnnnnnnnnnnnnnnnnnnnnnnnnnnnnnnnnnnnnnnnnnnnnnnnnnnnnnnnnnnnnnnnnnnnnnnnnnnnnnnnnnnnnnnnnnnnnnnnnnnnnnnnnnnnnnnnnnnnnnnnnnnnnnnnnnnnnnnnnnnnnnnnnnnnnnnnnnnnnnnnnnnnnnnnnnnnnnnnnnnnnnnnnnnnnnnnnnnnnnnnnnnnnnnnnnnnnnnnnnnnnnnnnnnnnnnnnnnnnnnnnnnnnnnnnnnnnnnnnnnnnnnnnnnnnnnnnnnnnnnnnnnnnnnnnnnnnnnnnnnnnnnnnnnnnnnnnnnnnnnnnnnnnnnnnnnnnnnnnnnnnnnnnnnnnnnnnnnnnnnnnnnnnnnnnnnnnnnnnnnnnnnnnnnnnnnnnnnnnnnnnnnnnnnnnnnnnnnnnnnnnnnnnnnnnnnnnnnnnnnnnnnnnnnnnnnnnnnnnnnnnnnnnnnnnnnnnnnnnnnnnnnnnnnnnnnnnnnnnnnnnnnnnnnnnnnnnnnnnnnnnnnnnnnnnnnnnnnnnnnnnnnnnnnnnnnnnnnnnnnnnnnnnnnnnnnnnnnnnnnnnnnnnnnnnnnnnnnnnnnnnnnnnnnnnnnnnnnnnnnnnnnnnnnnnnnnnnnnnnnnnnnnnnnnnnnnnnnnnnnnnnnnnnnnnnnnnnnnnnnnnnnnnnnnnnnnnnnnnnnnnnnnnnnnnnnnnnnnnnnnnnnnnnnnnnnnnnnnnnnnnnnnnnnnnnnnnnnnnnnnnnnnnnnnnnnnnnnnnnnnnnnnnnnnnnnnnnnnnnnnnnnnnnnnnnnnnnnnnnnnnnnnnnnnnnnnnnnnnnnnnnnnnnnnnnnnnnnnnnnnnnnnnnnnnnnnnnnnnnnnnnnnnnnnnnnnnnnnnnnnnnnnnnnnnnnnnnnnnnnnnnnnnnnnnnnnnnnnnnnnnnnnnnnnnnnnnnnnnnnnnnnnnnnnnnnnnnnnnnnnnnnnnnnnnnnnnnnnnnnnnnnnnnnnnnnnnnnnnnnnnnnnnnnnnnnnnnnnnnnnnnnnnnnnnnnnnnnnnnnnnnnnnnnnnnnnnnnnnnnnnnnnnnnnnnnnnnnnnnnnnnnnnnnnnnnnnnnnnnnnnnnnnnnnnnnnnnnnnnnnnnnnnnnnnnnnnnnnnnnnnnnnnnnnnnnnnnnnnnnnnnnnnnnnnnnnnnnnnnnnnnnnnnnnnnnnnnnnnnnnnnnnnnnnnnnnnnnnnnnnnnnnnnnnnnnnnnnnnnnnnnnnnnnnnnnnnnnnnnnnnnnnnnnnnnnnnnnnnnnnnnnnnnnnnnnnnnnnnnnnnnnnnnnnnnnnnnnnnnnnnnnnnnnnnnnnnnnnnnnnnnnnnnnnnnnnnnnnnnnnnnnnnnnnnnnnnnnnnnnnnnnnnnnnnnnnnnnnnnnnnnnnnnnnnnnnnnnnnnnnnnnnnnnnnnnnnnnnnnnnnnnnnnnnnnnnnnnnnnnnnnnnnnnnnnnnnnnnnnnnnnnnnnnnnnnnnnnnnnnnnnnnnnnnnnnnnnnnnnnnnnnnnnnnnnnnnnnnnnnnnnnnnnnnnnnnnnnnnnnnnnnnnnnnnnnnnnnnnnnnnnnnnnnnnnnnnnnnnnnnnnnnnnnnnnnnnnnnnnnnnnnnnnnnnnnnnnnnnnnnnnnnnnnnnnnnnnnnnnnnnnnnnnnnnnnnnnnnnnnnnnnnnnnnnnnnnnnnnnnnnnnnnnnnnnnnnnnnnnnnnnnnnnnnnnnnnnnnnnnnnnnnnnnnnnnnnnnnnnnnnnnnnnnnnnnnnnnnnnnnnnnnnnnnnnnnnnnnnnnnnnnnnnnnnnnnnnnnnnnnnnnnnnnnnnnnnnnnnnnnnnnnnnnnnnnnnnnnnnnnnnnnnnnnnnnnnnnnnnnnnnnnnnnnnnnnnnnnnnnnnnnnnnnnnnnnnnnnnnnnnnnnnnnnnnnnnnnnnnnnnnnnnnnnnnnnnnnnnnnnnnnnnnnnnnnnnnnnnnnnnnnnnnnnnnnnnnnnnnnnnnnnnnnnnnnnnnnnnnnnnnnnnnnnnnnnnnnnnnnnnnnnnnnnnnnnnnnnnnnnnnnnnnnnnnnnnnnnnnnnnnnnnnnnnnnnnnnnnnnnnnnnnnnnnnnnnnnnnnnnnnnnnnnnnnnnnnnnnnnnnnnnnnnnnnnnnnnnnnnnnnnnnnnnnnnnnnnnnnnnnnnnnnnnnnnnnnnnnnnnnnnnnnnnnnnnnnnnnnnnnnnnnnnnnnnnnnnnnnnnnnnnnnnnnnnnnnnnnnnnnnnnnnnnnnnnnnnnnnnnnnnnnnnnnnnnnnnnnnnnnnnnnnnnnnnnnnnnnnnnnnnnnnnnnnnnnnnnnnnnnnnnnnnnnnnnnnnnnnnnnnnnnnnnnnnnnnnnnnnnnnnnnnnnnnnnnnnnnnnnnnnnnnnnnnnnnnnnnnnnnnnnnnnnnnnnnnnnnnnnnnnnnnnnnnnnnnnnnnnnnnnnnnnnnnnnnnnnnnnnnnnnnnnnnnnnnnnnnnnnnnnnnnnnnnnnnnnnnnnnnnnnnnnnnnnnnnnnnnnnnnnnnnnnnnnnnnnnnnnnnnnnnnnnnnnnnnnnnnnnnnnnnnnnnnnnnnnnnnnnnnnnnnnnnnnnnnnnnnnnnnnnnnnnnnnnnnnnnnnnnnnnnnnnnnnnnnnnnnnnnnnnnnnnnnnnnnnnnnnnnnnnnnnnnnnnnnnnnnnnnnnnnnnnnnnnnnnnnnnnnnnnnnnnnnnnnnnnnnnnnnnnnnnnnnnnnnnnnnnnnnnnnnnnnnnnnnnnnnnnnnnnnnnnnnnnnnnnnnnnnnnnnnnnnnnnnnnnnnnnnnnnnnnnnnnnnnnnnnnnnnnnnnnnnnnnnnnnnnnnnnnnnnnnnnnnnnnnnnnnnnnnnnnnnnnnnnnnnnnnnnnnnnnnnnnnnnnnnnnnnnnnnnnnnnnnnnnnnnnnnnnnnnnnnnnnnnnnnnnnnnnnnnnnnnnnnnnnnnnnnnnnnnnnnnnnnnnnnnnnnnnnnnnnnnnnnnnnnnnnnnnnnnnnnnnnnnnnnnnnnnnnnnnnnnnnnnnnnnnnnnnnnnnnnnnnnnnnnnnnnnnnnnnnnnnnnnnnnnnnnnnnnnnnnnnnnnnnnnnnnnnnnnnnnnnnnnnnnnnnnnnnnnnnnnnnnnnnnnnnnnnnnnnnnnnnnnnnnnnnnnnnnnnnnnnnnnnnnnnnnnnnnnnnnnnnnnnnnnnnnnnnnnnnnnnnnnnnnnnnnnnnnnnnnnnnnnnnnnnnnnnnnnnnnnnnnnnnnnnnnnnnnnnnnnnnnnnnnnnnnnnnnnnnnnnnnnnnnnnnnnnnnnnnnnnnnnnnnnnnnnnnnnnnnnnnnnnnnnnnnnnnnnnnnnnnnnnnnnnnnnnnnnnnnnnnnnnnnnnnnnnnnnnnnnnnnnnnnnnnnnnnnnnnnnnnnnnnnnnnnnnnnnnnnnnnnnnnnnnnnnnnnnnnnnnnnnnnnnnnnnnnnnnnnnnnnnnnnnnnnnnnnnnnnnnnnnnnnnnnnnnnnnnnnnnnnnnnnnnnnnnnnnnnnnnnnnnnnnnnnnnnnnnnnnnnnnnnnnnnnnnnnnnnnnnnnnnnnnnnnnnnnnnnnnnnnnnnnnnnnnnnnnnnnnnnnnnnnnnnnnnnnnnnnnnnnnnnnnnnnnnnnnnnnnnnnnnnnnnnnnnnnnnnnnnnnnnnnnnnnnnnnnnnnnnnnnnnnnnnnnnnnnnnnnnnnnnnnnnnnnnnnnnnnnnnnnnnnnnnnnnnnnnnnnnnnnnnnnnnnnnnnnnnnnnnnnnnnnnnnnnnnnnnnnnnnnnnnnnnnnnnnnnnnnnnnnnnnnnnnnnnnnnnnnnnnnnnnnnnnnnnnnnnnnnnnnnnnnnnnnnnnnnnnnnnnnnnnnnnnnnnnnnnnnnnnnnnnnnnnnnnnnnnnnnnnnnnnnnnnnnnnnnnnnnnnnnnnnnnnnnnnnnnnnnnnnnnnnnnnnnnnnnnnnnnnnnnnnnnnnnnnnnnnnnnnnnnnnnnnnnnnnnnnnnnnnnnnnnnnnnnnnnnnnnnnnnnnnnnnnnnnnnnnnnnnnnnnnnnnnnnnnnnnnnnnnnnnnnnnnnnnnnnnnnnnnnnnnnnnnnnnnnnnnnnnnnnnnnnnnnnnnnnnnnnnnnnnnnnnnnnnnnnnnnnnnnnnnnnnnnnnnnnnnnnnnnnnnnnnnnnnnnnnnnnnnnnnnnnnnnnnnnnnnnnnnnnnnnnnnnnnnnnnnnnnnnnnnnnnnnnnnnnnnnnnnnnnnnnnnnnnnnnnnnnnnnnnnnnnnnnnnnnnnnnnnnnnnnnnnnnnnnnnnnnnnnnnnnnnnnnnnnnnnnnnnnnnnnnnnnnnnnnnnnnnnnnnnnnnnnnnnnnnnnnnnnnnnnnnnnnnnnnnnnnnnnnnnnnnnnnnnnnnnnnnnnnnnnnnnnnnnnnnnnnnnnnnnnnnnnnnnnnnnnnnnnnnnnnnnnnnnnnnnnnnnnnnnnnnnnnnnnnnnnnnnnnnnnnnnnnnnnnnnnnnnnnnnnnnnnnnnnnnnnnnnnnnnnnnnnnnnnnnnnnnnnnnnnnnnnnnnnnnnnnnnnnnnnnnnnnnnnnnnnnnnnnnnnnnnnnnnnnnnnnnnnnnnnnnnnnnnnnnnnnnnnnnnnnnnnnnnnnnnnnnnnnnnnnnnnnnnnnnnnnnnnnnnnnnnnnnnnnnnnnnnnnnnnnnnnnnnnnnnnnnnnnnnnnnnnnnnnnnnnnnnnnnnnnnnnnnnnnnnnnnnnnnnnnnnnnnnnnnnnnnnnnnnnnnnnnnnnnnnnnnnnnnnnnnnnnnnnnnnnnnnnnnnnnnnnnnnnnnnnnnnnnnnnnnnnnnnnnnnnnnnnnnnnnnnnnnnnnnnnnnnnnnnnnnnnnnnnnnnnnnnnnnnnnnnnnnnnnnnnnnnnnnnnnnnnnnnnnnnnnnnnnnnnnnnnnnnnnnnnnnnnnnnnnnnnnnnnnnnnnnnnnnnnnnnnnnnnnnnnnnnnnnnnnnnnnnnnnnnnnnnnnnnnnnnnnnnnnnnnnnnnnnnnnnnnnnnnnnnnnnnnnnnnnnnnnnnnnnnnnnnnnnnnnnnnnnnnnnnnnnnnnnnnnnnnnnnnnnnnnnnnnnnnnnnnnnnnnnnnnnnnnnnnnnnnnnnnnnnnnnnnnnnnnnnnnnnnnnnnnnnnnnnnnnnnnnnnnnnnnnnnnnnnnnnnnnnnnnnnnnnnnnnnnnnnnnnnnnnnnnnnnnnnnnnnnnnnnnnnnnnnnnnnnnnnnnnnnnnnnnnnnnnnnnnnnnnnnnnnnnnnnnnnnnnnnnnnnnnnnnnnnnnnnnnnnnnnnnnnnnnnnnnnnnnnnnnnnnnnnnnnnnnnnnnnnnnnnnnnnnnnnnnnnnnnnnnnnnnnnnnnnnnnnnnnnnnnnnnnnnnnnnnnnnnnnnnnnnnnnnnnnnnnnnnnnnnnnnnnnnnnnnnnnnnnnnnnnnnnnnnnnnnnnnnnnnnnnnnnnnnnnnnnnnnnnnnnnnnnnnnnnnnnnnnnnnnnnnnnnnnnnnnnnnnnnnnnnnnnnnnnnnnnnnnnnnnnnnnnnnnnnnnnnnnnnnnnnnnnnnnnnnnnnnnnnnnnnnnnnnnnnnnnnnnnnnnnnnnnnnnnnnnnnnnnnnnnnnnnnnnnnnnnnnnnnnnnnnnnnnnnnnnnnnnnnnnnnnnnnnnnnnnnnnnnnnnnnnnnnnnnnnnnnnnnnnnnnnnnnnnnnnnnnnnnnnnnnnnnnnnnnnnnnnnnnnnnnnnnnnnnnnnnnnnnnnnnnnnnnnnnnnnnnnnnnnnnnnnnnnnnnnnnnnnnnnnnnnnnnnnnnnnnnnnnnnnnnnnnnnnnnnnnnnnnnnnnnnnnnnnnnnnnnnnnnnnnnnnnnnnnnnnnnnnnnnnnnnnnnnnnnnnnnnnnnnnnnnnnnnnnnnnnnnnnnnnnnnnnnnnnnnnnnnnnnnnnnnnnnnnnnnnnnnnnnnnnnnnnnnnnnnnnnnnnnnnnnnnnnnnnnnnnnnnnnnnnnnnnnnnnnnnnnnnnnnnnnnnnnnnnnnnnnnnnnnnnnnnnnnnnnnnnnnnnnnnnnnnnnnnnnnnnnnnnnnnnnnnnnnnnnnnnnnnnnnnnnnnnnnnnnnnnnnnnnnnnnnnnnnnnnnnnnnnnnnnnnnnnnnnnnnnnnnnnnnnnnnnnnnnnnnnnnnnnnnnnnnnnnnnnnnnnnnnnnnnnnnnnnnnnnnnnnnnnnnnnnnnnnnnnnnnnnnnnnnnnnnnnnnnnnnnnnnnnnnnnnnnnnnnnnnnnnnnnnnnnnnnnnnnnnnnnnnnnnnnnnnnnnnnnnnnnnnnnnnnnnnnnnnnnnnnnnnnnnnnnnnnnnnnnnnnnnnnnnnnnnnnnnnnnnnnnnnnnnnnnnnnnnnnnnnnnnnnnnnnnnnnnnnnnnnnnnnnnnnnnnnnnnnnnnnnnnnnnnnnnnnnnnnnnnnnnnnnnnnnnnnnnnnnnnnnnnnnnnnnnnnnnnnnnnnnnnnnnnnnnnnnnnnnnnnnnnnnnnnnnnnnnnnnnnnnnnnnnnnnnnnnnnnnnnnnnnnnnnnnnnnnnnnnnnnnnnnnnnnnnnnnnnnnnnnnnnnnnnnnnnnnnnnnnnnnnnnnnnnnnnnnnnnnnnnnnnnnnnnnnnnnnnnnnnnnnnnnnnnnnnnnnnnnnnnnnnnnnnnnnnnnnnnnnnnnnnnnnnnnnnnnnnnnnnnnnnnnnnnnnnnnnnnnnnnnnnnnnnnnnnnnnnnnnnnnnnnnnnnnnnnnnnnnnnnnnnnnnnnnnnnnnnnnnnnnnnnnnnnnnnnnnnnnnnnnnnnnnnnnnnnnnnnnnnnnnnnnnnnnnnnnnnnnnnnnnnnnnnnnnnnnnnnnnnnnnnnnnnnnnnnnnnnnnnnnnnnnnnnnnnnnnnnnnnnnnnnnnnnnnnnnnnnnnnnnnnnnnnnnnnnnnnnnnnnnnnnnnnnnnnnnnnnnnnnnnnnnnnnnnnnnnnnnnnnnnnnnnnnnnnnnnnnnnnnnnnnnnnnnnnnnnnnnnnnnnnnnnnnnnnnnnnnnnnnnnnnnnnnnnnnnnnnnnnnnnnnnnnnnnnnnnnnnnnnnnnnnnnnnnnnnnnnnnnnnnnnnnnnnnnnnnnnnnnnnnnnnnnnnnnnnnnnnnnnnnnnnnnnnnnnnnnnnnnnnnnnnnnnnnnnnnnnnnnnnnnnnnnnnnnnnnnnnnnnnnnnnnnnnnnnnnnnnnnnnnnnnnnnnnnnnnnnnnnnnnnnnnnnnnnnnnnnnnnnnnnnnnnnnnnnnnnnnnnnnnnnnnnnnnnnnnnnnnnnnnnnnnnnnnnnnnnnnnnnnnnnnnnnnnnnnnnnnnnnnnnnnnnnnnnnnnnnnnnnnnnnnnnnnnnnnnnnnnnnnnnnnnnnnnnnnnnnnnnnnnnnnnnnnnnnnnnnnnnnnnnnnnnnnnnnnnnnnnnnnnnnnnnnnnnnnnnnnnnnnnnnnnnnnnnnnnnnnnnnnnnnnnnnnnnnnnnnnnnnnnnnnnnnnnnnnnnnnnnnnnnnnnnnnnnnnnnnnnnnnnnnnnnnnnnnnnnnnnnnnnnnnnnnnnnnnnnnnnnnnnnnnnnnnnnnnnnnnnnnnnnnnnnnnnnnnnnnnnnnnnnnnnnnnnnnnnnnnnnnnnnnnnnnnnnnnnnnnnnnnnnnnnnnnnnnnnnnnnnnnnnnnnnnnnnnnnnnnnnnnnnnnnnnnnnnnnnnnnnnnnnnnnnnnnnnnnnnnnnnnnnnnnnnnnnnnnnnnnnnnnnnnnnnnnnnnnnnnnnnnnnnnnnnnnnnnnnnnnnnnnnnnnnnnnnnnnnnnnnnnnnnnnnnnnnnnnnnnnnnnnnnnnnnnnnnnnnnnnnnnnnnnnnnnnnnnnnnnnnnnnnnnnnnnnnnnnnnnnnnnnnnnnnnnnnnnnnnnnnnnnnnnnnnnnnnnnnnnnnnnnnnnnnnnnnnnnnnnnnnnnnnnnnnnnnnnnnnnnnnnnnnnnnnnnnnnnnnnnnnnnnnnnnnnnnnnnnnnnnnnnnnnnnnnnnnnnnnnnnnnnnnnnnnnnnnnnnnnnnnnnnnnnnnnnnnnnnnnnnnnnnnnnnnnnnnnnnnnnnnnnnnnnnnnnnnnnnnnnnnnnnnnnnnnnnnnnnnnnnnnnnnnnnnnnnnnnnnnnnnnnnnnnnnnnnnnnnnnnnnnnnnnnnnnnnnnnnnnnnnnnnnnnnnnnnnnnnnnnnnnnnnnnnnnnnnnnnnnnnnnnnnnnnnnnnnnnnnnnnnnnnnnnnnnnnnnnnnnnnnnnnnnnnnnnnnnnnnnnnnnnnnnnnnnnnnnnnnnnnnnnnnnnnnnnnnnnnnnnnnnnnnnnnnnnnnnnnnnnnnnnnnnnnnnnnnnnnnnnnnnnnnnnnnnnnnnnnnnnnnnnnnnnnnnnnnnnnnnnnnnnnnnnnnnnnnnnnnnnnnnnnnnnnnnnnnnnnnnnnnnnnnnnnnnnnnnnnnnnnnnnnnnnnnnnnnnnnnnnnnnnnnnnnnnnnnnnnnnnnnnnnnnnnnnnnnnnnnnnnnnnnnnnnnnnnnnnnnnnnnnnnnnnnnnnnnnnnnnnnnnnnnnnnnnnnnnnnnnnnnnnnnnnnnnnnnnnnnnnnnnnnnnnnnnnnnnnnnnnnnnnnnnnnnnnnnnnnnnnnnnnnnnnnnnnnnnnnnnnnnnnnnnnnnnnnnnnnnnnnnnnnnnnnnnnnnnnnnnnnnnnnnnnnnnnnnnnnnnnnnnnnnnnnnnnnnnnnnnnnnnnnnnnnnnnnnnnnnnnnnnnnnnnnnnnnnnnnnnnnnnnnnnnnnnnnnnnnnnnnnnnnnnnnnnnnnnnnnnnnnnnnnnnnnnnnnnnnnnnnnnnnnnnnnnnnnnnnnnnnnnnnnnnnnnnnnnnnnnnnnnnnnnnnnnnnnnnnnnnnnnnnnnnnnnnnnnnnnnnnnnnnnnnnnnnnnnnnnnnnnnnnnnnnnnnnnnnnnnnnnnnnnnnnnnnnnnnnnnnnnnnnnnnnnnnnnnnnnnnnnnnnnnnnnnnnnnnnnnnnnnnnnnnnnnnnnnnnnnnnnnnnnnnnnnnnnnnnnnnnnnnnnnnnnnnnnnnnnnnnnnnnnnnnnnnnnnnnnnnnnnnnnnnnnnnnnnnnnnnnnnnnnnnnnnnnnnnnnnnnnnnnnnnnnnnnnnnnnnnnnnnnnnnnnnnnnnnnnnnnnnnnnnnnnnnnnnnnnnnnnnnnnnnnnnnnnnnnnnnnnnnnnnnnnnnnnnnnnnnnnnnnnnnnnnnnnnnnnnnnnnnnnnnnnnnnnnnnnnnnnnnnnnnnnnnnnnnnnnnnnnnnnnnnnnnnnnnnnnnnnnnnnnnnnnnnnnnnnnnnnnnnnnnnnnnnnnnnnnnnnnnnnnnnnnnnnnnnnnnnnnnnnnnnnnnnnnnnnnnnnnnnnnnnnnnnnnnnnnnnnnnnnnnnnnnnnnnnnnnnnnnnnnnnnnnnnnnnnnnnnnnnnnnnnnnnnnnnnnnnnnnnnnnnnnnnnnnnnnnnnnnnnnnnnnnnnnnnnnnnnnnnnnnnnnnnnnnnnnnnnnnnnnnnnnnnnnnnnnnnnnnnnnnnnnnnnnnnnnnnnnnnnnnnnnnnnnnnnnnnnnnnnnnnnnnnnnnnnnnnnnnnnnnnnnnnnnnnnnnnnnnnnnnnnnnnnnnnnnnnnnnnnnnnnnnnnnnnnnnnnnnnnnnnnnnnnnnnnnnnnnnnnnnnnnnnnnnnnnnnnnnnnnnnnnnnnnnnnnnnnnnnnnnnnnnnnnnnnnnnnnnnnnnnnnnnnnnnnnnnnnnnnnnnnnnnnnnnnnnnnnnnnnnnnnnnnnnnnnnnnnnnnnnnnnnnnnnnnnnnnnnnnnnnnnnnnnnnnnnnnnnnnnnnnnnnnnnnnnnnnnnnnnnnnnnnnnnnnnnnnnnnnnnnnnnnnnnnnnnnnnnnnnnnnnnnnnnnnnnnnnnnnnnnnnnnnnnnnnnnnnnnnnnnnnnnnnnnnnnnnnnnnnnnnnnnnnnnnnnnnnnnnnnnnnnnnnnnnnnnnnnnnnnnnnnnnnnnnnnnnnnnnnnnnnnnnnnnnnnnnnnnnnnnnnnnnnnnnnnnnnnnnnnnnnnnnnnnnnnnnnnnnnnnnnnnnnnnnnnnnnnnnnnnnnnnnnnnnnnnnnnnnnnnnnnnnnnnnnnnnnnnnnnnnnnnnnnnnnnnnnnnnnnnnnnnnnnnnnnnnnnnnnnnnnnnnnnnnnnnnnnnnnnnnnnnnnnnnnnnnnnnnnnnnnnnnnnnnnnnnnnnnnnnnnnnnnnnnnnnnnnnnnnnnnnnnnnnnnnnnnnnnnnnnnnnnnnnnnnnnnnnnnnnnnnnnnnnnnnnnnnnnnnnnnnnnnnnnnnnnnnnnnnnnnnnnnnnnnnnnnnnnnnnnnnnnnnnnnnnnnnnnnnnnnnnnnnnnnnnnnnnnnnnnnnnnnnnnnnnnnnnnnnnnnnnnnnnnnnnnnnnnnnnnnnnnnnnnnnnnnnnnnnnnnnnnnnnnnnnnnnnnnnnnnnnnnnnnnnnnnnnnnnnnnnnnnnnnnnnnnnnnnnnnnnnnnnnnnnnnnnnnnnnnnnnnnnnnnnnnnnnnnnnnnnnnnnnnnnnnnnnnnnnnnnnnnnnnnnnnnnnnnnnnnnnnnnnnnnnnnnnnnnnnnnnnnnnnnnnnnnnnnnnnnnnnnnnnnnnnnnnnnnnnnnnnnnnnnnnnnnnnnnnnnnnnnnnnnnnnnnnnnnnnnnnnnnnnnnnnnnnnnnnnnnnnnnnnnnnnnnnnnnnnnnnnnnnnnnnnnnnnnnnnnnnnnnnnnnnnnnnnnnnnnnnnnnnnnnnnnnnnnnnnnnnnnnnnnnnnnnnnnnnnnnnnnnnnnnnnnnnnnnnnnnnnnnnnnnnnnnnnnnnnnnnnnnnnnnnnnnnnnnnnnnnnnnnnnnnnnnnnnnnnnnnnnnnnnnnnnnnnnnnnnnnnnnnnnnnnnnnnnnnnnnnnnnnnnnnnnnnnnnnnnnnnnnnnnnnnnnnnnnnnnnnnnnnnnnnnnnnnnnnnnnnnnnnnnnnnnnnnnnnnnnnnnnnnnnnnnnnnnnnnnnnnnnnnnnnnnnnnnnnnnnnnnnnnnnnnnnnnnnnnnnnnnnnnnnnnnnnnnnnnnnnnnnnnnnnnnnnnnnnnnnnnnnnnnnnnnnnnnnnnnnnnnnnnnnnnnnnnnnnnnnnnnnnnnnnnnnnnnnnnnnnnnnnnnnnnnnnnnnnnnnnnnnnnnnnnnnnnnnnnnnnnnnnnnnnnnnnnnnnnnnnnnnnnnnnnnnnnnnnnnnnnnnnnnnnnnnnnnnnnnnnnnnnnnnnnnnnnnnnnnnnnnnnnnnnnnnnnnnnnnnnnnnnnnnnnnnnnnnnnnnnnnnnnnnnnnnnnnnnnnnnnnnnnnnnnnnnnnnnnnnnnnnnnnnnnnnnnnnnnnnnnnnnnnnnnnnnnnnnnnnnnnnnnnnnnnnnnnnnnnnnnnnnnnnnnnnnnnnnnnnnnnnnnnnnnnnnnnnnnnnnnnnnnnnnnnnnnnnnnnnnnnnnnnnnnnnnnnnnnnnnnnnnnnnnnnnnnnnnnnnnnnnnnnnnnnnnnnnnnnnnnnnnnnnnnnnnnnnnnnnnnnnnnnnnnnnnnnnnnnnnnnnnnnnnnnnnnnnnnnnnnnnnnnnnnnnnnnnnnnnnnnnnnnnnnnnnnnnnnnnnnnnnnnnnnnnnnnnnnnnnnnnnnnnnnnnnnnnnnnnnnnnnnnnnnnnnnnnnnnnnnnnnnnnnnnnnnnnnnnnnnnnnnnnnnnnnnnnnnnnnnnnnnnnnnnnnnnnnnnnnnnnnnnnnnnnnnnnnnnnnnnnnnnnnnnnnnnnnnnnnnnnnnnnnnnnnnnnnnnnnnnnnnnnnnnnnnnnnnnnnnnnnnnnnnnnnnnnnnnnnnnnnnnnnnnnnnnnnnnnnnnnnnnnnnnnnnnnnnnnnnnnnnnnnnnnnnnnnnnnnnnnnnnnnnnnnnnnnnnnnnnnnnnnnnnnnnnnnnnnnnnnnnnnnnnnnnnnnnnnnnnnnnnnnnnnnnnnnnnnnnnnnnnnnnnnnnnnnnnnnnnnnnnnnnnnnnnnnnnnnnnnnnnnnnnnnnnnnnnnnnnnnnnnnnnnnnnnnnnnnnnnnnnnnnnnnnnnnnnnnnnnnnnnnnnnnnnnnnnnnnnnnnnnnnnnnnnnnnnnnnnnnnnnnnnnnnnnnnnnnnnnnnnnnnnnnnnnnnnnnnnnnnnnnnnnnnnnnnnnnnnnnnnnnnnnnnnnnnnnnnnnnnnnnnnnnnnnnnnnnnnnnnnnnnnnnnnnnnnnnnnnnnnnnnnnnnnnnnnnnnnnnnnnnnnnnnnnnnnnnnnnnnnnnnnnnnnnnnnnnnnnnnnnnnnnnnnnnnnnnnnnnnnnnnnnnnnnnnnnnnnnnnnnnnnnnnnnnnnnnnnnnnnnnnnnnnnnnnnnnnnnnnnnnnnnnnnnnnnnnnnnnnnnnnnnnnnnnnnnnnnnnnnnnnnnnnnnnnnnnnnnnnnnnnnnnnnnnnnnnnnnnnnnnnnnnnnnnnnnnnnnnnnnnnnnnnnnnnnnnnnnnnnnnnnnnnnnnnnnnnnnnnnnnnnnnnnnnnnnnnnnnnnnnnnnnnnnnnnnnnnnnnnnnnnnnnnnnnnnnnnnnnnnnnnnnnnnnnnnnnnnnnnnnnnnnnnnnnnnnnnnnnnnnnnnnnnnnnnnnnnnnnnnnnnnnnnnnnnnnnnnnnnnnnnnnnnnnnnnnnnnnnnnnnnnnnnnnnnnnnnnnnnnnnnnnnnnnnnnnnnnnnnnnnnnnnnnnnnnnnnnnnnnnnnnnnnnnnnnnnnnnnnnnnnnnnnnnnnnnnnnnnnnnnnnnnnnnnnnnnnnnnnnnnnnnnnnnnnnnnnnnnnnnnnnnnnnnnnnnnnnnnnnnnnnnnnnnnnnnnnnnnnnnnnnnnnnnnnnnnnnnnnnnnnnnnnnnnnnnnnnnnnnnnnnnnnnnnnnnnnnnnnnnnnnnnnnnnnnnnnnnnnnnnnnnnnnnnnnnnnnnnnnnnnnnnnnnnnnnnnnnnnnnnnnnnnnnnnnnnnnnnnnnnnnnnnnnnnnnnnnnnnnnnnnnnnnnnnnnnnnnnnnnnnnnnnnnnnnnnnnnnnnnnnnnnnnnnnnnnnnnnnnnnnnnnnnnnnnnnnnnnnnnnnnnnnnnnnnnnnnnnnnnnnnnnnnnnnnnnnnnnnnnnnnnnnnnnnnnnnnnnnnnnnnnnnnnnnnnnnnnnnnnnnnnnnnnnnnnnnnnnnnnnnnnnnnnnnnnnnnnnnnnnnnnnnnnnnnnnnnnnnnnnnnnnnnnnnnnnnnnnnnnnnnnnnnnnnnnnnnnnnnnnnnnnnnnnnnnnnnnnnnnnnnnnnnnnnnnnnnnnnnnnnnnnnnnnnnnnnnnnnnnnnnnnnnnnnnnnnnnnnnnnnnnnnnnnnnnnnnnnnnnnnnnnnnnnnnnnnnnnnnnnnnnnnnnnnnnnnnnnnnnnnnnnnnnnnnnnnnnnnnnnnnnnnnnnnnnnnnnnnnnnnnnnnnnnnnnnnnnnnnnnnnnnnnnnnnnnnnnnnnnnnnnnnnnnnnnnnnnnnnnnnnnnnnnnnnnnnnnnnnnnnnnnnnnnnnnnnnnnnnnnnnnnnnnnnnnnnnnnnnnnnnnnnnnnnnnnnnnnnnnnnnnnnnnnnnnnnnnnnnnnnnnnnnnnnnnnnnnnnnnnnnnnnnnnnnnnnnnnnnnnnnnnnnnnnnnnnnnnnnnnnnnnnnnnnnnnnnnnnnnnnnnnnnnnnnnnnnnnnnnnnnnnnnnnnnnnnnnnnnnnnnnnnnnnnnnnnnnnnnnnnnnnnnnnnnnnnnnnnnnnnnnnnnnnnnnnnnnnnnnnnnnnnnnnnnnnnnnnnnnnnnnnnnnnnnnnnnnnnnnnnnnnnnnnnnnnnnnnnnnnnnnnnnnnnnnnnnnnnnnnnnnnnnnnnnnnnnnnnnnnnnnnnnnnnnnnnnnnnnnnnnnnnnnnnnnnnnnnnnnnnnnnnnnnnnnnnnnnnnnnnnnnnnnnnnnnnnnnnnnnnnnnnnnnnnnnnnnnnnnnnnnnnnnnnnnnnnnnnnnnnnnnnnnnnnnnnnnnnnnnnnnnnnnnnnnnnnnnnnnnnnnnnnnnnnnnnnnnnnnnnnnnnnnnnnnnnnnnnnnnnnnnnnnnnnnnnnnnnnnnnnnnnnnnnnnnnnnnnnnnnnnnnnnnnnnnnnnnnnnnnnnnnnnnnnnnnnnnnnnnnnnnnnnnnnnnnnnnnnnnnnnnnnnnnnnnnnnnnnnnnnnnnnnnnnnnnnnnnnnnnnnnnnnnnnnnnnnnnnnnnnnnnnnnnnnnnnnnnnnnnnnnnnnnnnnnnnnnnnnnnnnnnnnnnnnnnnnnnnnnnnnnnnnnnnnnnnnnnnnnnnnnnnnnnnnnnnnnnnnnnnnnnnnnnnnnnnnnnnnnnnnnnnnnnnnnnnnnnnnnnnnnnnnnnnnnnnnnnnnnnnnnnnnnnnnnnnnnnnnnnnnnnnnnnnnnnnnnnnnnnnnnnnnnnnnnnnnnnnnnnnnnnnnnnnnnnnnnnnnnnnnnnnnnnnnnnnnnnnnnnnnnnnnnnnnnnnnnnnnnnnnnnnnnnnnnnnnnnnnnnnnnnnnnnnnnnnnnnnnnnnnnnnnnnnnnnnnnnnnnnnnnnnnnnnnnnnnnnnnnnnnnnnnnnnnnnnnnnnnnnnnnnnnnnnnnnnnnnnnnnnnnnnnnnnnnnnnnnnnnnnnnnnnnnnnnnnnnnnnnnnnnnnnnnnnnnnnnnnnnnnnnnnnnnnnnnnnnnnnnnnnnnnnnnnnnnnnnnnnnnnnnnnnnnnnnnnnnnnnnnnnnnnnnnnnnnnnnnnnnnnnnnnnnnnnnnnnnnnnnnnnnnnnnnnnnnnnnnnnnnnnnnnnnnnnnnnnnnnnnnnnnnnnnnnnnnnnnnnnnnnnnnnnnnnnnnnnnnnnnnnnnnnnnnnnnnnnnnnnnnnnnnnnnnnnnnnnnnnnnnnnnnnnnnnnnnnnnnnnnnnnnnnnnnnnnnnnnnnnnnnnnnnnnnnnnnnnnnnnnnnnnnnnnnnnnnnnnnnnnnnnnnnnnnnnnnnnnnnnnnnnnnnnnnnnnnnnnnnnnnnnnnnnnnnnnnnnnnnnnnnnnnnnnnnnnnnnnnnnnnnnnnnnnnnnnnnnnnnnnnnnnnnnnnnnnnnnnnnnnnnnnnnnnnnnnnnnnnnnnnnnnnnnnnnnnnnnnnnnnnnnnnnnnnnnnnnnnnnnnnnnnnnnnnnnnnnnnnnnnnnnnnnnnnnnnnnnnnnnnnnnnnnnnnnnnnnnnnnnnnnnnnnnnnnnnnnnnnnnnnnnnnnnnnnnnnnnnnnnnnnnnnnnnnnnnnnnnnnnnnnnnnnnnnnnnnnnnnnnnnnnnnnnnnnnnnnnnnnnnnnnnnnnnnnnnnnnnnnnnnnnnnnnnnnnnnnnnnnnnnnnnnnnnnnnnnnnnnnnnnnnnnnnnnnnnnnnnnnnnnnnnnnnnnnnnnnnnnnnnnnnnnnnnnnnnnnnnnnnnnnnnnnnnnnnnnnnnnnnnnnnnnnnnnnnnnnnnnnnnnnnnnnnnnnnnnnnnnnnnnnnnnnnnnnnnnnnnnnnnnnnnnnnnnnnnnnnnnnnnnnnnnnnnnnnnnnnnnnnnnnnnnnnnnnnnnnnnnnnnnnnnnnnnnnnnnnnnnnnnnnnnnnnnnnnnnnnnnnnnnnnnnnnnnnnnnnnnnnnnnnnnnnnnnnnnnnnnnnnnnnnnnnnnnnnnnnnnnnnnnnnnnnnnnnnnnnnnnnnnnnnnnnnnnnnnnnnnnnnnnnnnnnnnnnnnnnnnnnnnnnnnnnnnnnnnnnnnnnnnnnnnnnnnnnnnnnnnnnnnnnnnnnnnnnnnnnnnnnnnnnnnnnnnnnnnnnnnnnnnnnnnnnnnnnnnnnnnnnnnnnnnnnnnnnnnnnnnnnnnnnnnnnnnnnnnnnnnnnnnnnnnnnnnnnnnnnnnnnnnnnnnnnnnnnnnnnnnnnnnnnnnnnnnnnnnnnnnnnnnnnnnnnnnnnnnnnnnnnnnnnnnnnnnnnnnnnnnnnnnnnnnnnnnnnnnnnnnnnnnnnnnnnnnnnnnnnnnnnnnnnnnnnnnnnnnnnnnnnnnnnnnnnnnnnnnnnnnnnnnnnnnnnnnnnnnnnnnnnnnnnnnnnnnnnnnnnnnnnnnnnnnnnnnnnnnnnnnnnnnnnnnnnnnnnnnnnnnnnnnnnnnnnnnnnnnnnnnnnnnnnnnnnnnnnnnnnnnnnnnnnnnnnnnnnnnnnnnnnnnnnnnnnnnnnnnnnnnnnnnnnnnnnnnnnnnnnnnnnnnnnnnnnnnnnnnnnnnnnnnnnnnnnnnnnnnnnnnnnnnnnnnnnnnnnnnnnnnnnnnnnnnnnnnnnnnnnnnnnnnnnnnnnnnnnnnnnnnnnnnnnnnnnnnnnnnnnnnnnnnnnnnnnnnnnnnnnnnnnnnnnnnnnnnnnnnnnnnnnnnnnnnnnnnnnnnnnnnnnnnnnnnnnnnnnnnnnnnnnnnnnnnnnnnnnnnnnnnnnnnnnnnnnnnnnnnnnnnnnnnnnnnnnnnnnnnnnnnnnnnnnnnnnnnnnnnnnnnnnnnnnnnnnnnnnnnnnnnnnnnnnnnnnnnnnnnnnnnnnnnnnnnnnnnnnnnnnnnnnnnnnnnnnnnnnnnnnnnnnnnnnnnnnnnnnnnnnnnnnnnnnnnnnnnnnnnnnnnnnnnnnnnnnnnnnnnnnnnnnnnnnnnnnnnnnnnnnnnnnnnnnnnnnnnnnnnnnnnnnnnnnnnnnnnnnnnnnnnnnnnnnnnnnnnnnnnnnnnnnnnnnnnnnnnnnnnnnnnnnnnnnnnnnnnnnnnnnnnnnnnnnnnnnnnnnnnnnnnnnnnnnnnnnnnnnnnnnnnnnnnnnnnnnnnnnnnnnnnnnnnnnnnnnnnnnnnnnnnnnnnnnnnnnnnnnnnnnnnnnnnnnnnnnnnnnnnnnnnnnnnnnnnnnnnnnnnnnnnnnnnnnnnnnnnnnnnnnnnnnnnnnnnnnnnnnnnnnnnnnnnnnnnnnnnnnnnnnnnnnnnnnnnnnnnnnnnnnnnnnnnnnnnnnnnnnnnnnnnnnnnnnnnnnnnnnnnnnnnnnnnnnnnnnnnnnnnnnnnnnnnnnnnnnnnnnnnnnnnnnnnnnnnnnnnnnnnnnnnnnnnnnnnnnnnnnnnnnnnnnnnnnnnnnnnnnnnnnnnnnnnnnnnnnnnnnnnnnnnnnnnnnnnnnnnnnnnnnnnnnnnnnnnnnnnnnnnnnnnnnnnnnnnnnnnnnnnnnnnnnnnnnnnnnnnnnnnnnnnnnnnnnnnnnnnnnnnnnnnnnnnnnnnnnnnnnnnnnnnnnnnnnnnnnnnnnnnnnnnnnnnnnnnnnnnnnnnnnnnnnnnnnnnnnnnnnnnnnnnnnnnnnnnnnnnnnnnnnnnnnnnnnnnnnnnnnnnnnnnnnnnnnnnnnnnnnnnnnnnnnnnnnnnnnnnnnnnnnnnnnnnnnnnnnnnnnnnnnnnnnnnnnnnnnnnnnnnnnnnnnnnnnnnnnnnnnnnnnnnnnnnnnnnnnnnnnnnnnnnnnnnnnnnnnnnnnnnnnnnnnnnnnnnnnnnnnnnnnnnnnnnnnnnnnnnnnnnnnnnnnnnnnnnnnnnnnnnnnnnnnnnnnnnnnnnnnnnnnnnnnnnnnnnnnnnnnnnnnnnnnnnnnnnnnnnnnnnnnnnnnnnnnnnnnnncatatagtagatgcaagaatcgttccgaatctgccacaataactgcggattcctttcccaaagcctttttcgcccacggacaggccgtttgccccttcccactaacatcccgtaaacctccccttaaattcccgcccggccaatgggaactcagcgggaagtattttagatgtgtatgggatggggcaaatggggcttctattgatagtgggtatcaaaatgggaggaagtccacaaattgcgcgaattcatacgaattgcttttccagttacgctaccaactgtggtagataacctaaaataaaggacttacttcccaatcgggcaagtaatccatatgtttggagcccgaaggtcccagaacgattggccgacggggacatcgaccttcctgacgctggcgtcgagcgaggcacgagcatggacgccagcaacatctcctgtagtccatactcgcaagctcgctgcactccaggctcaccaacgttggaaggcaaattcacaaattcacaaccggtaaatatggcttgtgaatttgcaacctgctgatagacgggtaattatgaggctaattcacaaaaaaggggtctcttatacatccgcggaagccgattgtaaacaggatatgatgtatccacgctaccagtctataatacatatagaaatagtatatataatatataatagtattatatattattatatattgatattatatcatctctaccttcccttcatctcttgtttgcggcatgagccactgcaaaccggcattctcccctggtccggctggatataagagataagcgtattttgtgaatttgtcccccaactcactgtgccacaataacacacggattcacaagccatatttaccggttgtgaatttgtgaatctgaccttgccggccttaaggaagtttgaaattagagccctattttggacttgacaaattattccttggtaaatttggtgtataatagctatggggcataatgatgttagcctgtggaacggcctctgtaaaggatcaacaagctatcaaccctccccatgcgacaggagcttcaatgtattataatttgacagacaaaccctggatcagtgtgctacagcttgacgggcattctgccaggctcggcctggctgaggtcctgcgaaaagcacacacactgcgtttggcttacggcaatccgatggaccgcatgtccgttttccgtttcctcctcgccctgggctattggtgttttgccaatacaaaacaagcgccggtatcagataagccactgcctcaggcatggacggactggcttgaacaaaaccaagaatatttcgaattgttcggtgatggccccagattctaccaatccccaggaacatccagaatacgccccagcacggaccttatccacgagcttcccacggcaaacaatttctggcacttccgccatgtgaccgatttcatcgatggcatttgcccagcttgctgcgttaccggtctgctgcgcctgccactctttaccaccgtaggcggcagcggaatcggagccggcatcaacagaactcctcccttctatgccatctggcagggtgatagtctgtcggaatcgatattcctgaattgggaacccacttcccggttgggtgttcctgcctggctgaacccgtttggatcccaaaacgagaaggatgtagccttgctgactggcctcacctggctgccccgcaaggtattcctgcttggcccggtgtcagacggagcaaaatgcagcgcctgcggagaagagcatgagcctctggtctatgcctgcaacaatgaggcggtgaaagtgcctccgaaccttgtctggaacgaccctcacgcgatttaccgggatgacaataatggcctgactgcccaggtggctctgatgtccggggacaaatacactttcgctaacagggattggcataaacccctggtcggcttcttacgggcgaaaggcatgtctcggaccgccacgctgtttttagtgggcttcacaagcgttcaagccaaatgtgtggacgtttgggaaaagaccattgccctatccggaaaaacaagctccgaggaactgctggaccagatatccgaaagagcctactccctgcacaggatgaggaaacaagaccgccggggcgattacaaggaatccgtgggaatcaccgccgtggcggacatcatcccgcacgtagagcatcgggttgacgtccattcgggcgagatggtggaaaacagcggcaatgtctggcaggaagcggatgaagattacggattcttcatgaagcgttttgccgtttctctagtgccggaaattacggttgccgccaagcttgaacgagaacaactggctcggcgcaagccctggcccctaaaaccaaaatcaattaaaaaaccttcatccggaggcgataatgaatgagagcaccgtgaaatttgttcggagcctgggcgaactcaaagagggcgacctgggcttgctcagaaagctcaggggtcgccgtctggatgaatccctgccgggtttcgacctgttttccggcctgtggtggccactccgcagtataagccccaaaacccccaggcggaaggtggtctggctagtcaccaagcttttcgcggaattccgctttgagcaaaagaaaggcgccagcctgccttggctcatgggcagaatatgccgtggacttaaagaagaaaaagagttcccacgtgttttagccaggttcgaccgcttgctcacgctcgagttgaaccaactggaggaaccgctggcgcaagtgctcgcgattttaaaaagacatgacattgccagtctggactgggttgccctcatcgatgacctctccgcttgggaacgggaatcaaacagagcgatatggtcagacacatttatttcagcatttaataatcagcaaggaggaatcaaatgttgattgaaatacacatgatccaaaaccacagcccggccaacctgaaccgggacgacctgggcgcgcccaagacctgttatttcggtggggtgttgcggtcccgcatctccagccagtgcctaaagcggagcatcaggatgagcgatgaattcaaaaacttgctcgggggtatccgtacccgtcggttggccgagttgattacaaaagctacaggacaggactgcaggaatcaggcagaggaagttctgaacaaagccggtttgaaacacgaaaacggacatagtaagatgctggtgttcatgacccggaacaagatcgatgcccttgctcaaattgtcaccagcgaaggcctgagtgttgcagagaaagccaagaaagcggcagatgtaatatcgggggcaatacattcccctgacatcgctctgtgcggaagaatgctcgagcccgataccaaggacaagaacacagacaaggtcaagtgggaaaataccactgttgaagcagccctgcaggtgtcgcacgccatttcaacccacatcgcccgcccagaaatagattactatgtagcagctgatgacgagcctggcgacgacacaggtgctggattcatagacgaggcgatgtttgcttcggcctgtttctacaaatattactcaattgattggaataccttgataatcaacctccagggtaatgaaaagttggcagctcatactgtcggagcctttatccaggccgctgcactcactaatcccagcggaaagcagaacagctttgccgcacataaccttcccgatggaatattggtagaaataaaagagacacctgtcagctatgcaaatgcctttgtgcgaccggtgggaatcgttaaggattctgacttggtagaacaaagcattggccaactggccaactatgtgaaggatataagtgccggtttcttccctggacagatgaaaggcaacgctctgtggttctcgcccaatggacgttatcccctaaagcctcaacagggcacgctggacataaagccagtttgcaacctgctagaacttgttcgcgaagcagttgagatgttgggttttgaatgggatgatgtaaaaaacgagaaagtagagagttgaaatgtcttctccgcctaataccctgttcctgagattggaggctccccttcaggcctggggaagcaatgaggccaaattcgccgtgcgcaggacagccgacgcgcccaccaaatccggagtggcaggcctgctctgcgctgccctgggaatcagccgggccgaagccggacagtattggctgggtgaaattgccaaattgcgcatgggggtgcggatagaccgcccgggcatccgctggtgggattaccatactgtgggagcggagcagaagctgcgcatttctgacctgaaaatgcccaacggcctagttctggttggcactgccctggccaaaaacctgggcgcggacaagatcaaatccaaacccggggctttgctctcccgacgcgagtatttggctgatgccagcttcctggttgcgctccagggtgaaccggatatcgtggcacaactggctgaagcgctgaaaaaaccagtctggacgctttatctggggcgaaaatcctgtcccccctcccgtccggtggatgaacacccgccagggttttatgccagtctgaaagaggctttgcggtcgatcccggcgcaactgagggaaaaaggcgaaccgatacctgacagtgttccctgtgtgctcgactgggttccggcccatgatgacgtgcacgctccgccgaacgccgaagcgcattacgacgtgccggtgtcctttgagcctccccaccacttgccccggctggtgatccgctgtaacctgccattggaccgcaacttcgaggcagagaccgtgctttccggcaaagcctggcaaccgccccgcaaccgggcaaattacgacaatcctgaatacaaaagggtccgcgctgagcgtttggtgatggacaatgccgcctgcatgttctgcaaggcacccgccactactgtgcagcacgtgaattaccgacgcgccggaggcagcgagaagccggaggacttgcgcgccctctgccgcctctgccacgatgcctgcaccatgctggaatatggcagcggcatgaccatggaccgcatagatccctgtgaccccgcctggcgtgagcgcatcttggccaaacgcgaggaaataatcaaattccgctcgctggagcagcgcaggcgcaaactcgatccgaaggaggagaacggatgatgtatctatcccaactgctcatcgacacaggcggcaaccctgaccggccaaggcccgggcgcttgtggctgaacaatatctataatgtccaccggcggctcagcatggctttccccatgcgcaagcgcaaggaaggagacccgaggtttctgcagccctttgaccccgcagattttgaaaagcgccagttcctctttcgggtggacaacaacaccgatggagaaaatcaaagggcgatggttttggtgcagtcgtccctgccgccggattgggactgggctttccagaatgccacgggatttttggcagcccctccccaggttaaggaatacgatccccagttctcagcaggtcagcggctgcgcttccgcatcctcgtgaatgccagtgtcaaacgcaaaatcgacgagttgcgggaaggacccggaggaaaggaaaaaacgggaagggttctgcacaaacgggtcgcccttacctgggacacaaattccaacccaaaggatgcggtggcgcaatggtttgccgccaaggctggcagactgggcttcacgcccggggagaccgaactggtaagcctgggctgggtatacggttccaaaccggagccccggggaaattcgccccggcgtgagaacgaataccgtcccctgagataccgttccgccctgctggaaggttatctgacagtggatgatgcctttctgttccgggaagccttggaaaaaggtatcggcagcgccaaaggaatgggcttcggcctcctttccgtggttccggcaagtgatgcgtaacagagaccttcacctaatgccaaaaatgcgggaccgcttcacctatctctatgtggagcatgccaaaatagacaaagaacaacaggcaatcgcctttcacgatgccatgggctccactcctgttccctgcgctggactggccctgctgatgctggggccaggcgtatccatcacccatgcggccatccttgttttagcagaatgcggctgtttggtggcttgggtgggggaacagggagtccgcttttactcatccgggacagggaccacccgtagttccgccaaccttatgcgtcaggctgccgcctggtcaaatcgagatacgcatctgcggatagttcgcagaatgtatgaattgaggttcaaggaaaaactggacccaaccctctctcttgaacagataaggggaaaagagggagcgagagtacgggatacctatttcagactttcaaaagaattcgatgtgcccatgagtgcgaggaattacgacaggagcaactggaataaaaccgaccccatcaacagagccctgtccgttgccaattcctgtctctatggcatctgccacgccgcgatagtggccgctggctattcacctgccctgggtttcgttcatactggcaaacaactgtcatttgtttatgacattgccgatctttataaaatggaaacctccgtgcccgcggctttcatagccacagccgcaggggtcgataacctggacagaaggacacgcattgcctgccgtgaccagttctatcaatttggtctgctaaagaagatagtggccgacattcacgcccttttcggtattctggaaacttcggacgatgagccagaccttgctgatgtcgatccagccgtgccaggcgggctttggaacccagatgataaagtgagccccggcggcttgtcatggggtctggatgatcctggaggccatgatgatggttctggtgcttgaaaaagttccctctggcctgagaggagaaattacacgctggctcctcgaaatcaaggctggagtatttgtcggtcaggtatcggccatgataagggaaaagctgtgggacaaggccaggtctggttgtgccggtggaacttgtatcatgatttacagcaagcattgcgaacaaggctttggaattgagttttggggtgccgcggaaaggatagtgacagaatgggaaggattgaaattgatgaccaagcatccgtgatccatacttgaagcctgttcaatggcctcaaagcgtctactttcgaagtgtgttccccacctgcgtgggggtgaaccggtgcgccaactgctttacgagacagcaagggcgtgttccccacctgcgtgggggtgaaccggccctgtcctggtgatcgtaaacgcctgggtggtgttccccacctgcgtgggggtgaaccgcggaggcacaattcagagaactgttctcgctcgtgttccccacctgcgtgggggtgaaccgtgatagcctatcccgctccatccccttgcacggtgttccccacctgcgtgggggtgaaccggtattcttgcccatcatggaaatgccgtgtccgtgttccccacctgcgtgggggtgaaccggtagctcaactacaagcggcgagccg

SEQ ID NO: 1101 - DNA, 103539 bp, Artificial Sequence
  Synthetic Oligonucleotide
  misc_feature (1)..(95965): n is a, c, g, or t
nnnnnnnnnnnnnnnnnnnnnnnnnnnnnnnnnnnnnnnnnnnnnnnnnnnnnnnnnnnnnnnnnnnnnnnnnnnnnnnnnnnnnnnnnnnnnnnnnnnnnnnnnnnnnnnnnnnnnnnnnnnnnnnnnnnnnnnnnnnnnnnnnnnnnnnnnnnnnnnnnnnnnnnnnnnnnnnnnnnnnnnnnnnnnnnnnnnnnnnnnnnnnnnnnnnnnnnnnnnnnnnnnnnnnnnnnnnnnnnnnnnnnnnnnnnnnnnnnnnnnnnnnnnnnnnnnnnnnnnnnnnnnnnnnnnnnnnnnnnnnnnnnnnnnnnnnnnnnnnnnnnnnnnnnnnnnnnnnnnnnnnnnnnnnnnnnnnnnnnnnnnnnnnnnnnnnnnnnnnnnnnnnnnnnnnnnnnnnnnnnnnnnnnnnnnnnnnnnnnnnnnnnnnnnnnnnnnnnnnnnnnnnnnnnnnnnnnnnnnnnnnnnnnnnnnnnnnnnnnnnnnnnnnnnnnnnnnnnnnnnnnnnnnnnnnnnnnnnnnnnnnnnnnnnnnnnnnnnnnnnnnnnnnnnnnnnnnnnnnnnnnnnnnnnnnnnnnnnnnnnnnnnnnnnnnnnnnnnnnnnnnnnnnnnnnnnnnnnnnnnnnnnnnnnnnnnnnnnnnnnnnnnnnnnnnnnnnnnnnnnnnnnnnnnnnnnnnnnnnnnnnnnnnnnnnnnnnnnnnnnnnnnnnnnnnnnnnnnnnnnnnnnnnnnnnnnnnnnnnnnnnnnnnnnnnnnnnnnnnnnnnnnnnnnnnnnnnnnnnnnnnnnnnnnnnnnnnnnnnnnnnnnnnnnnnnnnnnnnnnnnnnnnnnnnnnnnnnnnnnnnnnnnnnnnnnnnnnnnnnnnnnnnnnnnnnnnnnnnnnnnnnnnnnnnnnnnnnnnnnnnnnnnnnnnnnnnnnnnnnnnnnnnnnnnnnnnnnnnnnnnnnnnnnnnnnnnnnnnnnnnnnnnnnnnnnnnnnnnnnnnnnnnnnnnnnnnnnnnnnnnnnnnnnnnnnnnnnnnnnnnnnnnnnnnnnnnnnnnnnnnnnnnnnnnnnnnnnnnnnnnnnnnnnnnnnnnnnnnnnnnnnnnnnnnnnnnnnnnnnnnnnnnnnnnnnnnnnnnnnnnnnnnnnnnnnnnnnnnnnnnnnnnnnnnnnnnnnnnnnnnnnnnnnnnnnnnnnnnnnnnnnnnnnnnnnnnnnnnnnnnnnnnnnnnnnnnnnnnnnnnnnnnnnnnnnnnnnnnnnnnnnnnnnnnnnnnnnnnnnnnnnnnnnnnnnnnnnnnnnnnnnnnnnnnnnnnnnnnnnnnnnnnnnnnnnnnnnnnnnnnnnnnnnnnnnnnnnnnnnnnnnnnnnnnnnnnnnnnnnnnnnnnnnnnnnnnnnnnnnnnnnnnnnnnnnnnnnnnnnnnnnnnnnnnnnnnnnnnnnnnnnnnnnnnnnnnnnnnnnnnnnnnnnnnnnnnnnnnnnnnnnnnnnnnnnnnnnnnnnnnnnnnnnnnnnnnnnnnnnnnnnnnnnnnnnnnnnnnnnnnnnnnnnnnnnnnnnnnnnnnnnnnnnnnnnnnnnnnnnnnnnnnnnnnnnnnnnnnnnnnnnnnnnnnnnnnnnnnnnnnnnnnnnnnnnnnnnnnnnnnnnnnnnnnnnnnnnnnnnnnnnnnnnnnnnnnnnnnnnnnnnnnnnnnnnnnnnnnnnnnnnnnnnnnnnnnnnnnnnnnnnnnnnnnnnnnnnnnnnnnnnnnnnnnnnnnnnnnnnnnnnnnnnnnnnnnnnnnnnnnnnnnnnnnnnnnnnnnnnnnnnnnnnnnnnnnnnnnnnnnnnnnnnnnnnnnnnnnnnnnnnnnnnnnnnnnnnnnnnnnnnnnnnnnnnnnnnnnnnnnnnnnnnnnnnnnnnnnnnnnnnnnnnnnnnnnnnnnnnnnnnnnnnnnnnnnnnnnnnnnnnnnnnnnnnnnnnnnnnnnnnnnnnnnnnnnnnnnnnnnnnnnnnnnnnnnnnnnnnnnnnnnnnnnnnnnnnnnnnnnnnnnnnnnnnnnnnnnnnnnnnnnnnnnnnnnnnnnnnnnnnnnnnnnnnnnnnnnnnnnnnnnnnnnnnnnnnnnnnnnnnnnnnnnnnnnnnnnnnnnnnnnnnnnnnnnnnnnnnnnnnnnnnnnnnnnnnnnnnnnnnnnnnnnnnnnnnnnnnnnnnnnnnnnnnnnnnnnnnnnnnnnnnnnnnnnnnnnnnnnnnnnnnnnnnnnnnnnnnnnnnnnnnnnnnnnnnnnnnnnnnnnnnnnnnnnnnnnnnnnnnnnnnnnnnnnnnnnnnnnnnnnnnnnnnnnnnnnnnnnnnnnnnnnnnnnnnnnnnnnnnnnnnnnnnnnnnnnnnnnnnnnnnnnnnnnnnnnnnnnnnnnnnnnnnnnnnnnnnnnnnnnnnnnnnnnnnnnnnnnnnnnnnnnnnnnnnnnnnnnnnnnnnnnnnnnnnnnnnnnnnnnnnnnnnnnnnnnnnnnnnnnnnnnnnnnnnnnnnnnnnnnnnnnnnnnnnnnnnnnnnnnnnnnnnnnnnnnnnnnnnnnnnnnnnnnnnnnnnnnnnnnnnnnnnnnnnnnnnnnnnnnnnnnnnnnnnnnnnnnnnnnnnnnnnnnnnnnnnnnnnnnnnnnnnnnnnnnnnnnnnnnnnnnnnnnnnnnnnnnnnnnnnnnnnnnnnnnnnnnnnnnnnnnnnnnnnnnnnnnnnnnnnnnnnnnnnnnnnnnnnnnnnnnnnnnnnnnnnnnnnnnnnnnnnnnnnnnnnnnnnnnnnnnnnnnnnnnnnnnnnnnnnnnnnnnnnnnnnnnnnnnnnnnnnnnnnnnnnnnnnnnnnnnnnnnnnnnnnnnnnnnnnnnnnnnnnnnnnnnnnnnnnnnnnnnnnnnnnnnnnnnnnnnnnnnnnnnnnnnnnnnnnnnnnnnnnnnnnnnnnnnnnnnnnnnnnnnnnnnnnnnnnnnnnnnnnnnnnnnnnnnnnnnnnnnnnnnnnnnnnnnnnnnnnnnnnnnnnnnnnnnnnnnnnnnnnnnnnnnnnnnnnnnnnnnnnnnnnnnnnnnnnnnnnnnnnnnnnnnnnnnnnnnnnnnnnnnnnnnnnnnnnnnnnnnnnnnnnnnnnnnnnnnnnnnnnnnnnnnnnnnnnnnnnnnnnnnnnnnnnnnnnnnnnnnnnnnnnnnnnnnnnnnnnnnnnnnnnnnnnnnnnnnnnnnnnnnnnnnnnnnnnnnnnnnnnnnnnnnnnnnnnnnnnnnnnnnnnnnnnnnnnnnnnnnnnnnnnnnnnnnnnnnnnnnnnnnnnnnnnnnnnnnnnnnnnnnnnnnnnnnnnnnnnnnnnnnnnnnnnnnnnnnnnnnnnnnnnnnnnnnnnnnnnnnnnnnnnnnnnnnnnnnnnnnnnnnnnnnnnnnnnnnnnnnnnnnnnnnnnnnnnnnnnnnnnnnnnnnnnnnnnnnnnnnnnnnnnnnnnnnnnnnnnnnnnnnnnnnnnnnnnnnnnnnnnnnnnnnnnnnnnnnnnnnnnnnnnnnnnnnnnnnnnnnnnnnnnnnnnnnnnnnnnnnnnnnnnnnnnnnnnnnnnnnnnnnnnnnnnnnnnnnnnnnnnnnnnnnnnnnnnnnnnnnnnnnnnnnnnnnnnnnnnnnnnnnnnnnnnnnnnnnnnnnnnnnnnnnnnnnnnnnnnnnnnnnnnnnnnnnnnnnnnnnnnnnnnnnnnnnnnnnnnnnnnnnnnnnnnnnnnnnnnnnnnnnnnnnnnnnnnnnnnnnnnnnnnnnnnnnnnnnnnnnnnnnnnnnnnnnnnnnnnnnnnnnnnnnnnnnnnnnnnnnnnnnnnnnnnnnnnnnnnnnnnnnnnnnnnnnnnnnnnnnnnnnnnnnnnnnnnnnnnnnnnnnnnnnnnnnnnnnnnnnnnnnnnnnnnnnnnnnnnnnnnnnnnnnnnnnnnnnnnnnnnnnnnnnnnnnnnnnnnnnnnnnnnnnnnnnnnnnnnnnnnnnnnnnnnnnnnnnnnnnnnnnnnnnnnnnnnnnnnnnnnnnnnnnnnnnnnnnnnnnnnnnnnnnnnnnnnnnnnnnnnnnnnnnnnnnnnnnnnnnnnnnnnnnnnnnnnnnnnnnnnnnnnnnnnnnnnnnnnnnnnnnnnnnnnnnnnnnnnnnnnnnnnnnnnnnnnnnnnnnnnnnnnnnnnnnnnnnnnnnnnnnnnnnnnnnnnnnnnnnnnnnnnnnnnnnnnnnnnnnnnnnnnnnnnnnnnnnnnnnnnnnnnnnnnnnnnnnnnnnnnnnnnnnnnnnnnnnnnnnnnnnnnnnnnnnnnnnnnnnnnnnnnnnnnnnnnnnnnnnnnnnnnnnnnnnnnnnnnnnnnnnnnnnnnnnnnnnnnnnnnnnnnnnnnnnnnnnnnnnnnnnnnnnnnnnnnnnnnnnnnnnnnnnnnnnnnnnnnnnnnnnnnnnnnnnnnnnnnnnnnnnnnnnnnnnnnnnnnnnnnnnnnnnnnnnnnnnnnnnnnnnnnnnnnnnnnnnnnnnnnnnnnnnnnnnnnnnnnnnnnnnnnnnnnnnnnnnnnnnnnnnnnnnnnnnnnnnnnnnnnnnnnnnnnnnnnnnnnnnnnnnnnnnnnnnnnnnnnnnnnnnnnnnnnnnnnnnnnnnnnnnnnnnnnnnnnnnnnnnnnnnnnnnnnnnnnnnnnnnnnnnnnnnnnnnnnnnnnnnnnnnnnnnnnnnnnnnnnnnnnnnnnnnnnnnnnnnnnnnnnnnnnnnnnnnnnnnnnnnnnnnnnnnnnnnnnnnnnnnnnnnnnnnnnnnnnnnnnnnnnnnnnnnnnnnnnnnnnnnnnnnnnnnnnnnnnnnnnnnnnnnnnnnnnnnnnnnnnnnnnnnnnnnnnnnnnnnnnnnnnnnnnnnnnnnnnnnnnnnnnnnnnnnnnnnnnnnnnnnnnnnnnnnnnnnnnnnnnnnnnnnnnnnnnnnnnnnnnnnnnnnnnnnnnnnnnnnnnnnnnnnnnnnnnnnnnnnnnnnnnnnnnnnnnnnnnnnnnnnnnnnnnnnnnnnnnnnnnnnnnnnnnnnnnnnnnnnnnnnnnnnnnnnnnnnnnnnnnnnnnnnnnnnnnnnnnnnnnnnnnnnnnnnnnnnnnnnnnnnnnnnnnnnnnnnnnnnnnnnnnnnnnnnnnnnnnnnnnnnnnnnnnnnnnnnnnnnnnnnnnnnnnnnnnnnnnnnnnnnnnnnnnnnnnnnnnnnnnnnnnnnnnnnnnnnnnnnnnnnnnnnnnnnnnnnnnnnnnnnnnnnnnnnnnnnnnnnnnnnnnnnnnnnnnnnnnnnnnnnnnnnnnnnnnnnnnnnnnnnnnnnnnnnnnnnnnnnnnnnnnnnnnnnnnnnnnnnnnnnnnnnnnnnnnnnnnnnnnnnnnnnnnnnnnnnnnnnnnnnnnnnnnnnnnnnnnnnnnnnnnnnnnnnnnnnnnnnnnnnnnnnnnnnnnnnnnnnnnnnnnnnnnnnnnnnnnnnnnnnnnnnnnnnnnnnnnnnnnnnnnnnnnnnnnnnnnnnnnnnnnnnnnnnnnnnnnnnnnnnnnnnnnnnnnnnnnnnnnnnnnnnnnnnnnnnnnnnnnnnnnnnnnnnnnnnnnnnnnnnnnnnnnnnnnnnnnnnnnnnnnnnnnnnnnnnnnnnnnnnnnnnnnnnnnnnnnnnnnnnnnnnnnnnnnnnnnnnnnnnnnnnnnnnnnnnnnnnnnnnnnnnnnnnnnnnnnnnnnnnnnnnnnnnnnnnnnnnnnnnnnnnnnnnnnnnnnnnnnnnnnnnnnnnnnnnnnnnnnnnnnnnnnnnnnnnnnnnnnnnnnnnnnnnnnnnnnnnnnnnnnnnnnnnnnnnnnnnnnnnnnnnnnnnnnnnnnnnnnnnnnnnnnnnnnnnnnnnnnnnnnnnnnnnnnnnnnnnnnnnnnnnnnnnnnnnnnnnnnnnnnnnnnnnnnnnnnnnnnnnnnnnnnnnnnnnnnnnnnnnnnnnnnnnnnnnnnnnnnnnnnnnnnnnnnnnnnnnnnnnnnnnnnnnnnnnnnnnnnnnnnnnnnnnnnnnnnnnnnnnnnnnnnnnnnnnnnnnnnnnnnnnnnnnnnnnnnnnnnnnnnnnnnnnnnnnnnnnnnnnnnnnnnnnnnnnnnnnnnnnnnnnnnnnnnnnnnnnnnnnnnnnnnnnnnnnnnnnnnnnnnnnnnnnnnnnnnnnnnnnnnnnnnnnnnnnnnnnnnnnnnnnnnnnnnnnnnnnnnnnnnnnnnnnnnnnnnnnnnnnnnnnnnnnnnnnnnnnnnnnnnnnnnnnnnnnnnnnnnnnnnnnnnnnnnnnnnnnnnnnnnnnnnnnnnnnnnnnnnnnnnnnnnnnnnnnnnnnnnnnnnnnnnnnnnnnnnnnnnnnnnnnnnnnnnnnnnnnnnnnnnnnnnnnnnnnnnnnnnnnnnnnnnnnnnnnnnnnnnnnnnnnnnnnnnnnnnnnnnnnnnnnnnnnnnnnnnnnnnnnnnnnnnnnnnnnnnnnnnnnnnnnnnnnnnnnnnnnnnnnnnnnnnnnnnnnnnnnnnnnnnnnnnnnnnnnnnnnnnnnnnnnnnnnnnnnnnnnnnnnnnnnnnnnnnnnnnnnnnnnnnnnnnnnnnnnnnnnnnnnnnnnnnnnnnnnnnnnnnnnnnnnnnnnnnnnnnnnnnnnnnnnnnnnnnnnnnnnnnnnnnnnnnnnnnnnnnnnnnnnnnnnnnnnnnnnnnnnnnnnnnnnnnnnnnnnnnnnnnnnnnnnnnnnnnnnnnnnnnnnnnnnnnnnnnnnnnnnnnnnnnnnnnnnnnnnnnnnnnnnnnnnnnnnnnnnnnnnnnnnnnnnnnnnnnnnnnnnnnnnnnnnnnnnnnnnnnnnnnnnnnnnnnnnnnnnnnnnnnnnnnnnnnnnnnnnnnnnnnnnnnnnnnnnnnnnnnnnnnnnnnnnnnnnnnnnnnnnnnnnnnnnnnnnnnnnnnnnnnnnnnnnnnnnnnnnnnnnnnnnnnnnnnnnnnnnnnnnnnnnnnnnnnnnnnnnnnnnnnnnnnnnnnnnnnnnnnnnnnnnnnnnnnnnnnnnnnnnnnnnnnnnnnnnnnnnnnnnnnnnnnnnnnnnnnnnnnnnnnnnnnnnnnnnnnnnnnnnnnnnnnnnnnnnnnnnnnnnnnnnnnnnnnnnnnnnnnnnnnnnnnnnnnnnnnnnnnnnnnnnnnnnnnnnnnnnnnnnnnnnnnnnnnnnnnnnnnnnnnnnnnnnnnnnnnnnnnnnnnnnnnnnnnnnnnnnnnnnnnnnnnnnnnnnnnnnnnnnnnnnnnnnnnnnnnnnnnnnnnnnnnnnnnnnnnnnnnnnnnnnnnnnnnnnnnnnnnnnnnnnnnnnnnnnnnnnnnnnnnnnnnnnnnnnnnnnnnnnnnnnnnnnnnnnnnnnnnnnnnnnnnnnnnnnnnnnnnnnnnnnnnnnnnnnnnnnnnnnnnnnnnnnnnnnnnnnnnnnnnnnnnnnnnnnnnnnnnnnnnnnnnnnnnnnnnnnnnnnnnnnnnnnnnnnnnnnnnnnnnnnnnnnnnnnnnnnnnnnnnnnnnnnnnnnnnnnnnnnnnnnnnnnnnnnnnnnnnnnnnnnnnnnnnnnnnnnnnnnnnnnnnnnnnnnnnnnnnnnnnnnnnnnnnnnnnnnnnnnnnnnnnnnnnnnnnnnnnnnnnnnnnnnnnnnnnnnnnnnnnnnnnnnnnnnnnnnnnnnnnnnnnnnnnnnnnnnnnnnnnnnnnnnnnnnnnnnnnnnnnnnnnnnnnnnnnnnnnnnnnnnnnnnnnnnnnnnnnnnnnnnnnnnnnnnnnnnnnnnnnnnnnnnnnnnnnnnnnnnnnnnnnnnnnnnnnnnnnnnnnnnnnnnnnnnnnnnnnnnnnnnnnnnnnnnnnnnnnnnnnnnnnnnnnnnnnnnnnnnnnnnnnnnnnnnnnnnnnnnnnnnnnnnnnnnnnnnnnnnnnnnnnnnnnnnnnnnnnnnnnnnnnnnnnnnnnnnnnnnnnnnnnnnnnnnnnnnnnnnnnnnnnnnnnnnnnnnnnnnnnnnnnnnnnnnnnnnnnnnnnnnnnnnnnnnnnnnnnnnnnnnnnnnnnnnnnnnnnnnnnnnnnnnnnnnnnnnnnnnnnnnnnnnnnnnnnnnnnnnnnnnnnnnnnnnnnnnnnnnnnnnnnnnnnnnnnnnnnnnnnnnnnnnnnnnnnnnnnnnnnnnnnnnnnnnnnnnnnnnnnnnnnnnnnnnnnnnnnnnnnnnnnnnnnnnnnnnnnnnnnnnnnnnnnnnnnnnnnnnnnnnnnnnnnnnnnnnnnnnnnnnnnnnnnnnnnnnnnnnnnnnnnnnnnnnnnnnnnnnnnnnnnnnnnnnnnnnnnnnnnnnnnnnnnnnnnnnnnnnnnnnnnnnnnnnnnnnnnnnnnnnnnnnnnnnnnnnnnnnnnnnnnnnnnnnnnnnnnnnnnnnnnnnnnnnnnnnnnnnnnnnnnnnnnnnnnnnnnnnnnnnnnnnnnnnnnnnnnnnnnnnnnnnnnnnnnnnnnnnnnnnnnnnnnnnnnnnnnnnnnnnnnnnnnnnnnnnnnnnnnnnnnnnnnnnnnnnnnnnnnnnnnnnnnnnnnnnnnnnnnnnnnnnnnnnnnnnnnnnnnnnnnnnnnnnnnnnnnnnnnnnnnnnnnnnnnnnnnnnnnnnnnnnnnnnnnnnnnnnnnnnnnnnnnnnnnnnnnnnnnnnnnnnnnnnnnnnnnnnnnnnnnnnnnnnnnnnnnnnnnnnnnnnnnnnnnnnnnnnnnnnnnnnnnnnnnnnnnnnnnnnnnnnnnnnnnnnnnnnnnnnnnnnnnnnnnnnnnnnnnnnnnnnnnnnnnnnnnnnnnnnnnnnnnnnnnnnnnnnnnnnnnnnnnnnnnnnnnnnnnnnnnnnnnnnnnnnnnnnnnnnnnnnnnnnnnnnnnnnnnnnnnnnnnnnnnnnnnnnnnnnnnnnnnnnnnnnnnnnnnnnnnnnnnnnnnnnnnnnnnnnnnnnnnnnnnnnnnnnnnnnnnnnnnnnnnnnnnnnnnnnnnnnnnnnnnnnnnnnnnnnnnnnnnnnnnnnnnnnnnnnnnnnnnnnnnnnnnnnnnnnnnnnnnnnnnnnnnnnnnnnnnnnnnnnnnnnnnnnnnnnnnnnnnnnnnnnnnnnnnnnnnnnnnnnnnnnnnnnnnnnnnnnnnnnnnnnnnnnnnnnnnnnnnnnnnnnnnnnnnnnnnnnnnnnnnnnnnnnnnnnnnnnnnnnnnnnnnnnnnnnnnnnnnnnnnnnnnnnnnnnnnnnnnnnnnnnnnnnnnnnnnnnnnnnnnnnnnnnnnnnnnnnnnnnnnnnnnnnnnnnnnnnnnnnnnnnnnnnnnnnnnnnnnnnnnnnnnnnnnnnnnnnnnnnnnnnnnnnnnnnnnnnnnnnnnnnnnnnnnnnnnnnnnnnnnnnnnnnnnnnnnnnnnnnnnnnnnnnnnnnnnnnnnnnnnnnnnnnnnnnnnnnnnnnnnnnnnnnnnnnnnnnnnnnnnnnnnnnnnnnnnnnnnnnnnnnnnnnnnnnnnnnnnnnnnnnnnnnnnnnnnnnnnnnnnnnnnnnnnnnnnnnnnnnnnnnnnnnnnnnnnnnnnnnnnnnnnnnnnnnnnnnnnnnnnnnnnnnnnnnnnnnnnnnnnnnnnnnnnnnnnnnnnnnnnnnnnnnnnnnnnnnnnnnnnnnnnnnnnnnnnnnnnnnnnnnnnnnnnnnnnnnnnnnnnnnnnnnnnnnnnnnnnnnnnnnnnnnnnnnnnnnnnnnnnnnnnnnnnnnnnnnnnnnnnnnnnnnnnnnnnnnnnnnnnnnnnnnnnnnnnnnnnnnnnnnnnnnnnnnnnnnnnnnnnnnnnnnnnnnnnnnnnnnnnnnnnnnnnnnnnnnnnnnnnnnnnnnnnnnnnnnnnnnnnnnnnnnnnnnnnnnnnnnnnnnnnnnnnnnnnnnnnnnnnnnnnnnnnnnnnnnnnnnnnnnnnnnnnnnnnnnnnnnnnnnnnnnnnnnnnnnnnnnnnnnnnnnnnnnnnnnnnnnnnnnnnnnnnnnnnnnnnnnnnnnnnnnnnnnnnnnnnnnnnnnnnnnnnnnnnnnnnnnnnnnnnnnnnnnnnnnnnnnnnnnnnnnnnnnnnnnnnnnnnnnnnnnnnnnnnnnnnnnnnnnnnnnnnnnnnnnnnnnnnnnnnnnnnnnnnnnnnnnnnnnnnnnnnnnnnnnnnnnnnnnnnnnnnnnnnnnnnnnnnnnnnnnnnnnnnnnnnnnnnnnnnnnnnnnnnnnnnnnnnnnnnnnnnnnnnnnnnnnnnnnnnnnnnnnnnnnnnnnnnnnnnnnnnnnnnnnnnnnnnnnnnnnnnnnnnnnnnnnnnnnnnnnnnnnnnnnnnnnnnnnnnnnnnnnnnnnnnnnnnnnnnnnnnnnnnnnnnnnnnnnnnnnnnnnnnnnnnnnnnnnnnnnnnnnnnnnnnnnnnnnnnnnnnnnnnnnnnnnnnnnnnnnnnnnnnnnnnnnnnnnnnnnnnnnnnnnnnnnnnnnnnnnnnnnnnnnnnnnnnnnnnnnnnnnnnnnnnnnnnnnnnnnnnnnnnnnnnnnnnnnnnnnnnnnnnnnnnnnnnnnnnnnnnnnnnnnnnnnnnnnnnnnnnnnnnnnnnnnnnnnnnnnnnnnnnnnnnnnnnnnnnnnnnnnnnnnnnnnnnnnnnnnnnnnnnnnnnnnnnnnnnnnnnnnnnnnnnnnnnnnnnnnnnnnnnnnnnnnnnnnnnnnnnnnnnnnnnnnnnnnnnnnnnnnnnnnnnnnnnnnnnnnnnnnnnnnnnnnnnnnnnnnnnnnnnnnnnnnnnnnnnnnnnnnnnnnnnnnnnnnnnnnnnnnnnnnnnnnnnnnnnnnnnnnnnnnnnnnnnnnnnnnnnnnnnnnnnnnnnnnnnnnnnnnnnnnnnnnnnnnnnnnnnnnnnnnnnnnnnnnnnnnnnnnnnnnnnnnnnnnnnnnnnnnnnnnnnnnnnnnnnnnnnnnnnnnnnnnnnnnnnnnnnnnnnnnnnnnnnnnnnnnnnnnnnnnnnnnnnnnnnnnnnnnnnnnnnnnnnnnnnnnnnnnnnnnnnnnnnnnnnnnnnnnnnnnnnnnnnnnnnnnnnnnnnnnnnnnnnnnnnnnnnnnnnnnnnnnnnnnnnnnnnnnnnnnnnnnnnnnnnnnnnnnnnnnnnnnnnnnnnnnnnnnnnnnnnnnnnnnnnnnnnnnnnnnnnnnnnnnnnnnnnnnnnnnnnnnnnnnnnnnnnnnnnnnnnnnnnnnnnnnnnnnnnnnnnnnnnnnnnnnnnnnnnnnnnnnnnnnnnnnnnnnnnnnnnnnnnnnnnnnnnnnnnnnnnnnnnnnnnnnnnnnnnnnnnnnnnnnnnnnnnnnnnnnnnnnnnnnnnnnnnnnnnnnnnnnnnnnnnnnnnnnnnnnnnnnnnnnnnnnnnnnnnnnnnnnnnnnnnnnnnnnnnnnnnnnnnnnnnnnnnnnnnnnnnnnnnnnnnnnnnnnnnnnnnnnnnnnnnnnnnnnnnnnnnnnnnnnnnnnnnnnnnnnnnnnnnnnnnnnnnnnnnnnnnnnnnnnnnnnnnnnnnnnnnnnnnnnnnnnnnnnnnnnnnnnnnnnnnnnnnnnnnnnnnnnnnnnnnnnnnnnnnnnnnnnnnnnnnnnnnnnnnnnnnnnnnnnnnnnnnnnnnnnnnnnnnnnnnnnnnnnnnnnnnnnnnnnnnnnnnnnnnnnnnnnnnnnnnnnnnnnnnnnnnnnnnnnnnnnnnnnnnnnnnnnnnnnnnnnnnnnnnnnnnnnnnnnnnnnnnnnnnnnnnnnnnnnnnnnnnnnnnnnnnnnnnnnnnnnnnnnnnnnnnnnnnnnnnnnnnnnnnnnnnnnnnnnnnnnnnnnnnnnnnnnnnnnnnnnnnnnnnnnnnnnnnnnnnnnnnnnnnnnnnnnnnnnnnnnnnnnnnnnnnnnnnnnnnnnnnnnnnnnnnnnnnnnnnnnnnnnnnnnnnnnnnnnnnnnnnnnnnnnnnnnnnnnnnnnnnnnnnnnnnnnnnnnnnnnnnnnnnnnnnnnnnnnnnnnnnnnnnnnnnnnnnnnnnnnnnnnnnnnnnnnnnnnnnnnnnnnnnnnnnnnnnnnnnnnnnnnnnnnnnnnnnnnnnnnnnnnnnnnnnnnnnnnnnnnnnnnnnnnnnnnnnnnnnnnnnnnnnnnnnnnnnnnnnnnnnnnnnnnnnnnnnnnnnnnnnnnnnnnnnnnnnnnnnnnnnnnnnnnnnnnnnnnnnnnnnnnnnnnnnnnnnnnnnnnnnnnnnnnnnnnnnnnnnnnnnnnnnnnnnnnnnnnnnnnnnnnnnnnnnnnnnnnnnnnnnnnnnnnnnnnnnnnnnnnnnnnnnnnnnnnnnnnnnnnnnnnnnnnnnnnnnnnnnnnnnnnnnnnnnnnnnnnnnnnnnnnnnnnnnnnnnnnnnnnnnnnnnnnnnnnnnnnnnnnnnnnnnnnnnnnnnnnnnnnnnnnnnnnnnnnnnnnnnnnnnnnnnnnnnnnnnnnnnnnnnnnnnnnnnnnnnnnnnnnnnnnnnnnnnnnnnnnnnnnnnnnnnnnnnnnnnnnnnnnnnnnnnnnnnnnnnnnnnnnnnnnnnnnnnnnnnnnnnnnnnnnnnnnnnnnnnnnnnnnnnnnnnnnnnnnnnnnnnnnnnnnnnnnnnnnnnnnnnnnnnnnnnnnnnnnnnnnnnnnnnnnnnnnnnnnnnnnnnnnnnnnnnnnnnnnnnnnnnnnnnnnnnnnnnnnnnnnnnnnnnnnnnnnnnnnnnnnnnnnnnnnnnnnnnnnnnnnnnnnnnnnnnnnnnnnnnnnnnnnnnnnnnnnnnnnnnnnnnnnnnnnnnnnnnnnnnnnnnnnnnnnnnnnnnnnnnnnnnnnnnnnnnnnnnnnnnnnnnnnnnnnnnnnnnnnnnnnnnnnnnnnnnnnnnnnnnnnnnnnnnnnnnnnnnnnnnnnnnnnnnnnnnnnnnnnnnnnnnnnnnnnnnnnnnnnnnnnnnnnnnnnnnnnnnnnnnnnnnnnnnnnnnnnnnnnnnnnnnnnnnnnnnnnnnnnnnnnnnnnnnnnnnnnnnnnnnnnnnnnnnnnnnnnnnnnnnnnnnnnnnnnnnnnnnnnnnnnnnnnnnnnnnnnnnnnnnnnnnnnnnnnnnnnnnnnnnnnnnnnnnnnnnnnnnnnnnnnnnnnnnnnnnnnnnnnnnnnnnnnnnnnnnnnnnnnnnnnnnnnnnnnnnnnnnnnnnnnnnnnnnnnnnnnnnnnnnnnnnnnnnnnnnnnnnnnnnnnnnnnnnnnnnnnnnnnnnnnnnnnnnnnnnnnnnnnnnnnnnnnnnnnnnnnnnnnnnnnnnnnnnnnnnnnnnnnnnnnnnnnnnnnnnnnnnnnnnnnnnnnnnnnnnnnnnnnnnnnnnnnnnnnnnnnnnnnnnnnnnnnnnnnnnnnnnnnnnnnnnnnnnnnnnnnnnnnnnnnnnnnnnnnnnnnnnnnnnnnnnnnnnnnnnnnnnnnnnnnnnnnnnnnnnnnnnnnnnnnnnnnnnnnnnnnnnnnnnnnnnnnnnnnnnnnnnnnnnnnnnnnnnnnnnnnnnnnnnnnnnnnnnnnnnnnnnnnnnnnnnnnnnnnnnnnnnnnnnnnnnnnnnnnnnnnnnnnnnnnnnnnnnnnnnnnnnnnnnnnnnnnnnnnnnnnnnnnnnnnnnnnnnnnnnnnnnnnnnnnnnnnnnnnnnnnnnnnnnnnnnnnnnnnnnnnnnnnnnnnnnnnnnnnnnnnnnnnnnnnnnnnnnnnnnnnnnnnnnnnnnnnnnnnnnnnnnnnnnnnnnnnnnnnnnnnnnnnnnnnnnnnnnnnnnnnnnnnnnnnnnnnnnnnnnnnnnnnnnnnnnnnnnnnnnnnnnnnnnnnnnnnnnnnnnnnnnnnnnnnnnnnnnnnnnnnnnnnnnnnnnnnnnnnnnnnnnnnnnnnnnnnnnnnnnnnnnnnnnnnnnnnnnnnnnnnnnnnnnnnnnnnnnnnnnnnnnnnnnnnnnnnnnnnnnnnnnnnnnnnnnnnnnnnnnnnnnnnnnnnnnnnnnnnnnnnnnnnnnnnnnnnnnnnnnnnnnnnnnnnnnnnnnnnnnnnnnnnnnnnnnnnnnnnnnnnnnnnnnnnnnnnnnnnnnnnnnnnnnnnnnnnnnnnnnnnnnnnnnnnnnnnnnnnnnnnnnnnnnnnnnnnnnnnnnnnnnnnnnnnnnnnnnnnnnnnnnnnnnnnnnnnnnnnnnnnnnnnnnnnnnnnnnnnnnnnnnnnnnnnnnnnnnnnnnnnnnnnnnnnnnnnnnnnnnnnnnnnnnnnnnnnnnnnnnnnnnnnnnnnnnnnnnnnnnnnnnnnnnnnnnnnnnnnnnnnnnnnnnnnnnnnnnnnnnnnnnnnnnnnnnnnnnnnnnnnnnnnnnnnnnnnnnnnnnnnnnnnnnnnnnnnnnnnnnnnnnnnnnnnnnnnnnnnnnnnnnnnnnnnnnnnnnnnnnnnnnnnnnnnnnnnnnnnnnnnnnnnnnnnnnnnnnnnnnnnnnnnnnnnnnnnnnnnnnnnnnnnnnnnnnnnnnnnnnnnnnnnnnnnnnnnnnnnnnnnnnnnnnnnnnnnnnnnnnnnnnnnnnnnnnnnnnnnnnnnnnnnnnnnnnnnnnnnnnnnnnnnnnnnnnnnnnnnnnnnnnnnnnnnnnnnnnnnnnnnnnnnnnnnnnnnnnnnnnnnnnnnnnnnnnnnnnnnnnnnnnnnnnnnnnnnnnnnnnnnnnnnnnnnnnnnnnnnnnnnnnnnnnnnnnnnnnnnnnnnnnnnnnnnnnnnnnnnnnnnnnnnnnnnnnnnnnnnnnnnnnnnnnnnnnnnnnnnnnnnnnnnnnnnnnnnnnnnnnnnnnnnnnnnnnnnnnnnnnnnnnnnnnnnnnnnnnnnnnnnnnnnnnnnnnnnnnnnnnnnnnnnnnnnnnnnnnnnnnnnnnnnnnnnnnnnnnnnnnnnnnnnnnnnnnnnnnnnnnnnnnnnnnnnnnnnnnnnnnnnnnnnnnnnnnnnnnnnnnnnnnnnnnnnnnnnnnnnnnnnnnnnnnnnnnnnnnnnnnnnnnnnnnnnnnnnnnnnnnnnnnnnnnnnnnnnnnnnnnnnnnnnnnnnnnnnnnnnnnnnnnnnnnnnnnnnnnnnnnnnnnnnnnnnnnnnnnnnnnnnnnnnnnnnnnnnnnnnnnnnnnnnnnnnnnnnnnnnnnnnnnnnnnnnnnnnnnnnnnnnnnnnnnnnnnnnnnnnnnnnnnnnnnnnnnnnnnnnnnnnnnnnnnnnnnnnnnnnnnnnnnnnnnnnnnnnnnnnnnnnnnnnnnnnnnnnnnnnnnnnnnnnnnnnnnnnnnnnnnnnnnnnnnnnnnnnnnnnnnnnnnnnnnnnnnnnnnnnnnnnnnnnnnnnnnnnnnnnnnnnnnnnnnnnnnnnnnnnnnnnnnnnnnnnnnnnnnnnnnnnnnnnnnnnnnnnnnnnnnnnnnnnnnnnnnnnnnnnnnnnnnnnnnnnnnnnnnnnnnnnnnnnnnnnnnnnnnnnnnnnnnnnnnnnnnnnnnnnnnnnnnnnnnnnnnnnnnnnnnnnnnnnnnnnnnnnnnnnnnnnnnnnnnnnnnnnnnnnnnnnnnnnnnnnnnnnnnnnnnnnnnnnnnnnnnnnnnnnnnnnnnnnnnnnnnnnnnnnnnnnnnnnnnnnnnnnnnnnnnnnnnnnnnnnnnnnnnnnnnnnnnnnnnnnnnnnnnnnnnnnnnnnnnnnnnnnnnnnnnnnnnnnnnnnnnnnnnnnnnnnnnnnnnnnnnnnnnnnnnnnnnnnnnnnnnnnnnnnnnnnnnnnnnnnnnnnnnnnnnnnnnnnnnnnnnnnnnnnnnnnnnnnnnnnnnnnnnnnnnnnnnnnnnnnnnnnnnnnnnnnnnnnnnnnnnnnnnnnnnnnnnnnnnnnnnnnnnnnnnnnnnnnnnnnnnnnnnnnnnnnnnnnnnnnnnnnnnnnnnnnnnnnnnnnnnnnnnnnnnnnnnnnnnnnnnnnnnnnnnnnnnnnnnnnnnnnnnnnnnnnnnnnnnnnnnnnnnnnnnnnnnnnnnnnnnnnnnnnnnnnnnnnnnnnnnnnnnnnnnnnnnnnnnnnnnnnnnnnnnnnnnnnnnnnnnnnnnnnnnnnnnnnnnnnnnnnnnnnnnnnnnnnnnnnnnnnnnnnnnnnnnnnnnnnnnnnnnnnnnnnnnnnnnnnnnnnnnnnnnnnnnnnnnnnnnnnnnnnnnnnnnnnnnnnnnnnnnnnnnnnnnnnnnnnnnnnnnnnnnnnnnnnnnnnnnnnnnnnnnnnnnnnnnnnnnnnnnnnnnnnnnnnnnnnnnnnnnnnnnnnnnnnnnnnnnnnnnnnnnnnnnnnnnnnnnnnnnnnnnnnnnnnnnnnnnnnnnnnnnnnnnnnnnnnnnnnnnnnnnnnnnnnnnnnnnnnnnnnnnnnnnnnnnnnnnnnnnnnnnnnnnnnnnnnnnnnnnnnnnnnnnnnnnnnnnnnnnnnnnnnnnnnnnnnnnnnnnnnnnnnnnnnnnnnnnnnnnnnnnnnnnnnnnnnnnnnnnnnnnnnnnnnnnnnnnnnnnnnnnnnnnnnnnnnnnnnnnnnnnnnnnnnnnnnnnnnnnnnnnnnnnnnnnnnnnnnnnnnnnnnnnnnnnnnnnnnnnnnnnnnnnnnnnnnnnnnnnnnnnnnnnnnnnnnnnnnnnnnnnnnnnnnnnnnnnnnnnnnnnnnnnnnnnnnnnnnnnnnnnnnnnnnnnnnnnnnnnnnnnnnnnnnnnnnnnnnnnnnnnnnnnnnnnnnnnnnnnnnnnnnnnnnnnnnnnnnnnnnnnnnnnnnnnnnnnnnnnnnnnnnnnnnnnnnnnnnnnnnnnnnnnnnnnnnnnnnnnnnnnnnnnnnnnnnnnnnnnnnnnnnnnnnnnnnnnnnnnnnnnnnnnnnnnnnnnnnnnnnnnnnnnnnnnnnnnnnnnnnnnnnnnnnnnnnnnnnnnnnnnnnnnnnnnnnnnnnnnnnnnnnnnnnnnnnnnnnnnnnnnnnnnnnnnnnnnnnnnnnnnnnnnnnnnnnnnnnnnnnnnnnnnnnnnnnnnnnnnnnnnnnnnnnnnnnnnnnnnnnnnnnnnnnnnnnnnnnnnnnnnnnnnnnnnnnnnnnnnnnnnnnnnnnnnnnnnnnnnnnnnnnnnnnnnnnnnnnnnnnnnnnnnnnnnnnnnnnnnnnnnnnnnnnnnnnnnnnnnnnnnnnnnnnnnnnnnnnnnnnnnnnnnnnnnnnnnnnnnnnnnnnnnnnnnnnnnnnnnnnnnnnnnnnnnnnnnnnnnnnnnnnnnnnnnnnnnnnnnnnnnnnnnnnnnnnnnnnnnnnnnnnnnnnnnnnnnnnnnnnnnnnnnnnnnnnnnnnnnnnnnnnnnnnnnnnnnnnnnnnnnnnnnnnnnnnnnnnnnnnnnnnnnnnnnnnnnnnnnnnnnnnnnnnnnnnnnnnnnnnnnnnnnnnnnnnnnnnnnnnnnnnnnnnnnnnnnnnnnnnnnnnnnnnnnnnnnnnnnnnnnnnnnnnnnnnnnnnnnnnnnnnnnnnnnnnnnnnnnnnnnnnnnnnnnnnnnnnnnnnnnnnnnnnnnnnnnnnnnnnnnnnnnnnnnnnnnnnnnnnnnnnnnnnnnnnnnnnnnnnnnnnnnnnnnnnnnnnnnnnnnnnnnnnnnnnnnnnnnnnnnnnnnnnnnnnnnnnnnnnnnnnnnnnnnnnnnnnnnnnnnnnnnnnnnnnnnnnnnnnnnnnnnnnnnnnnnnnnnnnnnnnnnnnnnnnnnnnnnnnnnnnnnnnnnnnnnnnnnnnnnnnnnnnnnnnnnnnnnnnnnnnnnnnnnnnnnnnnnnnnnnnnnnnnnnnnnnnnnnnnnnnnnnnnnnnnnnnnnnnnnnnnnnnnnnnnnnnnnnnnnnnnnnnnnnnnnnnnnnnnnnnnnnnnnnnnnnnnnnnnnnnnnnnnnnnnnnnnnnnnnnnnnnnnnnnnnnnnnnnnnnnnnnnnnnnnnnnnnnnnnnnnnnnnnnnnnnnnnnnnnnnnnnnnnnnnnnnnnnnnnnnnnnnnnnnnnnnnnnnnnnnnnnnnnnnnnnnnnnnnnnnnnnnnnnnnnnnnnnnnnnnnnnnnnnnnnnnnnnnnnnnnnnnnnnnnnnnnnnnnnnnnnnnnnnnnnnnnnnnnnnnnnnnnnnnnnnnnnnnnnnnnnnnnnnnnnnnnnnnnnnnnnnnnnnnnnnnnnnnnnnnnnnnnnnnnnnnnnnnnnnnnnnnnnnnnnnnnnnnnnnnnnnnnnnnnnnnnnnnnnnnnnnnnnnnnnnnnnnnnnnnnnnnnnnnnnnnnnnnnnnnnnnnnnnnnnnnnnnnnnnnnnnnnnnnnnnnnnnnnnnnnnnnnnnnnnnnnnnnnnnnnnnnnnnnnnnnnnnnnnnnnnnnnnnnnnnnnnnnnnnnnnnnnnnnnnnnnnnnnnnnnnnnnnnnnnnnnnnnnnnnnnnnnnnnnnnnnnnnnnnnnnnnnnnnnnnnnnnnnnnnnnnnnnnnnnnnnnnnnnnnnnnnnnnnnnnnnnnnnnnnnnnnnnnnnnnnnnnnnnnnnnnnnnnnnnnnnnnnnnnnnnnnnnnnnnnnnnnnnnnnnnnnnnnnnnnnnnnnnnnnnnnnnnnnnnnnnnnnnnnnnnnnnnnnnnnnnnnnnnnnnnnnnnnnnnnnnnnnnnnnnnnnnnnnnnnnnnnnnnnnnnnnnnnnnnnnnnnnnnnnnnnnnnnnnnnnnnnnnnnnnnnnnnnnnnnnnnnnnnnnnnnnnnnnnnnnnnnnnnnnnnnnnnnnnnnnnnnnnnnnnnnnnnnnnnnnnnnnnnnnnnnnnnnnnnnnnnnnnnnnnnnnnnnnnnnnnnnnnnnnnnnnnnnnnnnnnnnnnnnnnnnnnnnnnnnnnnnnnnnnnnnnnnnnnnnnnnnnnnnnnnnnnnnnnnnnnnnnnnnnnnnnnnnnnnnnnnnnnnnnnnnnnnnnnnnnnnnnnnnnnnnnnnnnnnnnnnnnnnnnnnnnnnnnnnnnnnnnnnnnnnnnnnnnnnnnnnnnnnnnnnnnnnnnnnnnnnnnnnnnnnnnnnnnnnnnnnnnnnnnnnnnnnnnnnnnnnnnnnnnnnnnnnnnnnnnnnnnnnnnnnnnnnnnnnnnnnnnnnnnnnnnnnnnnnnnnnnnnnnnnnnnnnnnnnnnnnnnnnnnnnnnnnnnnnnnnnnnnnnnnnnnnnnnnnnnnnnnnnnnnnnnnnnnnnnnnnnnnnnnnnnnnnnnnnnnnnnnnnnnnnnnnnnnnnnnnnnnnnnnnnnnnnnnnnnnnnnnnnnnnnnnnnnnnnnnnnnnnnnnnnnnnnnnnnnnnnnnnnnnnnnnnnnnnnnnnnnnnnnnnnnnnnnnnnnnnnnnnnnnnnnnnnnnnnnnnnnnnnnnnnnnnnnnnnnnnnnnnnnnnnnnnnnnnnnnnnnnnnnnnnnnnnnnnnnnnnnnnnnnnnnnnnnnnnnnnnnnnnnnnnnnnnnnnnnnnnnnnnnnnnnnnnnnnnnnnnnnnnnnnnnnnnnnnnnnnnnnnnnnnnnnnnnnnnnnnnnnnnnnnnnnnnnnnnnnnnnnnnnnnnnnnnnnnnnnnnnnnnnnnnnnnnnnnnnnnnnnnnnnnnnnnnnnnnnnnnnnnnnnnnnnnnnnnnnnnnnnnnnnnnnnnnnnnnnnnnnnnnnnnnnnnnnnnnnnnnnnnnnnnnnnnnnnnnnnnnnnnnnnnnnnnnnnnnnnnnnnnnnnnnnnnnnnnnnnnnnnnnnnnnnnnnnnnnnnnnnnnnnnnnnnnnnnnnnnnnnnnnnnnnnnnnnnnnnnnnnnnnnnnnnnnnnnnnnnnnnnnnnnnnnnnnnnnnnnnnnnnnnnnnnnnnnnnnnnnnnnnnnnnnnnnnnnnnnnnnnnnnnnnnnnnnnnnnnnnnnnnnnnnnnnnnnnnnnnnnnnnnnnnnnnnnnnnnnnnnnnnnnnnnnnnnnnnnnnnnnnnnnnnnnnnnnnnnnnnnnnnnnnnnnnnnnnnnnnnnnnnnnnnnnnnnnnnnnnnnnnnnnnnnnnnnnnnnnnnnnnnnnnnnnnnnnnnnnnnnnnnnnnnnnnnnnnnnnnnnnnnnnnnnnnnnnnnnnnnnnnnnnnnnnnnnnnnnnnnnnnnnnnnnnnnnnnnnnnnnnnnnnnnnnnnnnnnnnnnnnnnnnnnnnnnnnnnnnnnnnnnnnnnnnnnnnnnnnnnnnnnnnnnnnnnnnnnnnnnnnnnnnnnnnnnnnnnnnnnnnnnnnnnnnnnnnnnnnnnnnnnnnnnnnnnnnnnnnnnnnnnnnnnnnnnnnnnnnnnnnnnnnnnnnnnnnnnnnnnnnnnnnnnnnnnnnnnnnnnnnnnnnnnnnnnnnnnnnnnnnnnnnnnnnnnnnnnnnnnnnnnnnnnnnnnnnnnnnnnnnnnnnnnnnnnnnnnnnnnnnnnnnnnnnnnnnnnnnnnnnnnnnnnnnnnnnnnnnnnnnnnnnnnnnnnnnnnnnnnnnnnnnnnnnnnnnnnnnnnnnnnnnnnnnnnnnnnnnnnnnnnnnnnnnnnnnnnnnnnnnnnnnnnnnnnnnnnnnnnnnnnnnnnnnnnnnnnnnnnnnnnnnnnnnnnnnnnnnnnnnnnnnnnnnnnnnnnnnnnnnnnnnnnnnnnnnnnnnnnnnnnnnnnnnnnnnnnnnnnnnnnnnnnnnnnnnnnnnnnnnnnnnnnnnnnnnnnnnnnnnnnnnnnnnnnnnnnnnnnnnnnnnnnnnnnnnnnnnnnnnnnnnnnnnnnnnnnnnnnnnnnnnnnnnnnnnnnnnnnnnnnnnnnnnnnnnnnnnnnnnnnnnnnnnnnnnnnnnnnnnnnnnnnnnnnnnnnnnnnnnnnnnnnnnnnnnnnnnnnnnnnnnnnnnnnnnnnnnnnnnnnnnnnnnnnnnnnnnnnnnnnnnnnnnnnnnnnnnnnnnnnnnnnnnnnnnnnnnnnnnnnnnnnnnnnnnnnnnnnnnnnnnnnnnnnnnnnnnnnnnnnnnnnnnnnnnnnnnnnnnnnnnnnnnnnnnnnnnnnnnnnnnnnnnnnnnnnnnnnnnnnnnnnnnnnnnnnnnnnnnnnnnnnnnnnnnnnnnnnnnnnnnnnnnnnnnnnnnnnnnnnnnnnnnnnnnnnnnnnnnnnnnnnnnnnnnnnnnnnnnnnnnnnnnnnnnnnnnnnnnnnnnnnnnnnnnnnnnnnnnnnnnnnnnnnnnnnnnnnnnnnnnnnnnnnnnnnnnnnnnnnnnnnnnnnnnnnnnnnnnnnnnnnnnnnnnnnnnnnnnnnnnnnnnnnnnnnnnnnnnnnnnnnnnnnnnnnnnnnnnnnnnnnnnnnnnnnnnnnnnnnnnnnnnnnnnnnnnnnnnnnnnnnnnnnnnnnnnnnnnnnnnnnnnnnnnnnnnnnnnnnnnnnnnnnnnnnnnnnnnnnnnnnnnnnnnnnnnnnnnnnnnnnnnnnnnnnnnnnnnnnnnnnnnnnnnnnnnnnnnnnnnnnnnnnnnnnnnnnnnnnnnnnnnnnnnnnnnnnnnnnnnnnnnnnnnnnnnnnnnnnnnnnnnnnnnnnnnnnnnnnnnnnnnnnnnnnnnnnnnnnnnnnnnnnnnnnnnnnnnnnnnnnnnnnnnnnnnnnnnnnnnnnnnnnnnnnnnnnnnnnnnnnnnnnnnnnnnnnnnnnnnnnnnnnnnnnnnnnnnnnnnnnnnnnnnnnnnnnnnnnnnnnnnnnnnnnnnnnnnnnnnnnnnnnnnnnnnnnnnnnnnnnnnnnnnnnnnnnnnnnnnnnnnnnnnnnnnnnnnnnnnnnnnnnnnnnnnnnnnnnnnnnnnnnnnnnnnnnnnnnnnnnnnnnnnnnnnnnnnnnnnnnnnnnnnnnnnnnnnnnnnnnnnnnnnnnnnnnnnnnnnnnnnnnnnnnnnnnnnnnnnnnnnnnnnnnnnnnnnnnnnnnnnnnnnnnnnnnnnnnnnnnnnnnnnnnnnnnnnnnnnnnnnnnnnnnnnnnnnnnnnnnnnnnnnnnnnnnnnnnnnnnnnnnnnnnnnnnnnnnnnnnnnnnnnnnnnnnnnnnnnnnnnnnnnnnnnnnnnnnnnnnnnnnnnnnnnnnnnnnnnnnnnnnnnnnnnnnnnnnnnnnnnnnnnnnnnnnnnnnnnnnnnnnnnnnnnnnnnnnnnnnnnnnnnnnnnnnnnnnnnnnnnnnnnnnnnnnnnnnnnnnnnnnnnnnnnnnnnnnnnnnnnnnnnnnnnnnnnnnnnnnnnnnnnnnnnnnnnnnnnnnnnnnnnnnnnnnnnnnnnnnnnnnnnnnnnnnnnnnnnnnnnnnnnnnnnnnnnnnnnnnnnnnnnnnnnnnnnnnnnnnnnnnnnnnnnnnnnnnnnnnnnnnnnnnnnnnnnnnnnnnnnnnnnnnnnnnnnnnnnnnnnnnnnnnnnnnnnnnnnnnnnnnnnnnnnnnnnnnnnnnnnnnnnnnnnnnnnnnnnnnnnnnnnnnnnnnnnnnnnnnnnnnnnnnnnnnnnnnnnnnnnnnnnnnnnnnnnnnnnnnnnnnnnnnnnnnnnnnnnnnnnnnnnnnnnnnnnnnnnnnnnnnnnnnnnnnnnnnnnnnnnnnnnnnnnnnnnnnnnnnnnnnnnnnnnnnnnnnnnnnnnnnnnnnnnnnnnnnnnnnnnnnnnnnnnnnnnnnnnnnnnnnnnnnnnnnnnnnnnnnnnnnnnnnnnnnnnnnnnnnnnnnnnnnnnnnnnnnnnnnnnnnnnnnnnnnnnnnnnnnnnnnnnnnnnnnnnnnnnnnnnnnnnnnnnnnnnnnnnnnnnnnnnnnnnnnnnnnnnnnnnnnnnnnnnnnnnnnnnnnnnnnnnnnnnnnnnnnnnnnnnnnnnnnnnnnnnnnnnnnnnnnnnnnnnnnnnnnnnnnnnnnnnnnnnnnnnnnnnnnnnnnnnnnnnnnnnnnnnnnnnnnnnnnnnnnnnnnnnnnnnnnnnnnnnnnnnnnnnnnnnnnnnnnnnnnnnnnnnnnnnnnnnnnnnnnnnnnnnnnnnnnnnnnnnnnnnnnnnnnnnnnnnnnnnnnnnnnnnnnnnnnnnnnnnnnnnnnnnnnnnnnnnnnnnnnnnnnnnnnnnnnnnnnnnnnnnnnnnnnnnnnnnnnnnnnnnnnnnnnnnnnnnnnnnnnnnnnnnnnnnnnnnnnnnnnnnnnnnnnnnnnnnnnnnnnnnnnnnnnnnnnnnnnnnnnnnnnnnnnnnnnnnnnnnnnnnnnnnnnnnnnnnnnnnnnnnnnnnnnnnnnnnnnnnnnnnnnnnnnnnnnnnnnnnnnnnnnnnnnnnnnnnnnnnnnnnnnnnnnnnnnnnnnnnnnnnnnnnnnnnnnnnnnnnnnnnnnnnnnnnnnnnnnnnnnnnnnnnnnnnnnnnnnnnnnnnnnnnnnnnnnnnnnnnnnnnnnnnnnnnnnnnnnnnnnnnnnnnnnnnnnnnnnnnnnnnnnnnnnnnnnnnnnnnnnnnnnnnnnnnnnnnnnnnnnnnnnnnnnnnnnnnnnnnnnnnnnnnnnnnnnnnnnnnnnnnnnnnnnnnnnnnnnnnnnnnnnnnnnnnnnnnnnnnnnnnnnnnnnnnnnnnnnnnnnnnnnnnnnnnnnnnnnnnnnnnnnnnnnnnnnnnnnnnnnnnnnnnnnnnnnnnnnnnnnnnnnnnnnnnnnnnnnnnnnnnnnnnnnnnnnnnnnnnnnnnnnnnnnnnnnnnnnnnnnnnnnnnnnnnnnnnnnnnnnnnnnnnnnnnnnnnnnnnnnnnnnnnnnnnnnnnnnnnnnnnnnnnnnnnnnnnnnnnnnnnnnnnnnnnnnnnnnnnnnnnnnnnnnnnnnnnnnnnnnnnnnnnnnnnnnnnnnnnnnnnnnnnnnnnnnnnnnnnnnnnnnnnnnnnnnnnnnnnnnnnnnnnnnnnnnnnnnnnnnnnnnnnnnnnnnnnnnnnnnnnnnnnnnnnnnnnnnnnnnnnnnnnnnnnnnnnnnnnnnnnnnnnnnnnnnnnnnnnnnnnnnnnnnnnnnnnnnnnnnnnnnnnnnnnnnnnnnnnnnnnnnnnnnnnnnnnnnnnnnnnnnnnnnnnnnnnnnnnnnnnnnnnnnnnnnnnnnnnnnnnnnnnnnnnnnnnnnnnnnnnnnnnnnnnnnnnnnnnnnnnnnnnnnnnnnnnnnnnnnnnnnnnnnnnnnnnnnnnnnnnnnnnnnnnnnnnnnnnnnnnnnnnnnnnnnnnnnnnnnnnnnnnnnnnnnnnnnnnnnnnnnnnnnnnnnnnnnnnnnnnnnnnnnnnnnnnnnnnnnnnnnnnnnnnnnnnnnnnnnnnnnnnnnnnnnnnnnnnnnnnnnnnnnnnnnnnnnnnnnnnnnnnnnnnnnnnnnnnnnnnnnnnnnnnnnnnnnnnnnnnnnnnnnnnnnnnnnnnnnnnnnnnnnnnnnnnnnnnnnnnnnnnnnnnnnnnnnnnnnnnnnnnnnnnnnnnnnnnnnnnnnnnnnnnnnnnnnnnnnnnnnnnnnnnnnnnnnnnnnnnnnnnnnnnnnnnnnnnnnnnnnnnnnnnnnnnnnnnnnnnnnnnnnnnnnnnnnnnnnnnnnnnnnnnnnnnnnnnnnnnnnnnnnnnnnnnnnnnnnnnnnnnnnnnnnnnnnnnnnnnnnnnnnnnnnnnnnnnnnnnnnnnnnnnnnnnnnnnnnnnnnnnnnnnnnnnnnnnnnnnnnnnnnnnnnnnnnnnnnnnnnnnnnnnnnnnnnnnnnnnnnnnnnnnnnnnnnnnnnnnnnnnnnnnnnnnnnnnnnnnnnnnnnnnnnnnnnnnnnnnnnnnnnnnnnnnnnnnnnnnnnnnnnnnnnnnnnnnnnnnnnnnnnnnnnnnnnnnnnnnnnnnnnnnnnnnnnnnnnnnnnnnnnnnnnnnnnnnnnnnnnnnnnnnnnnnnnnnnnnnnnnnnnnnnnnnnnnnnnnnnnnnnnnnnnnnnnnnnnnnnnnnnnnnnnnnnnnnnnnnnnnnnnnnnnnnnnnnnnnnnnnnnnnnnnnnnnnnnnnnnnnnnnnnnnnnnnnnnnnnnnnnnnnnnnnnnnnnnnnnnnnnnnnnnnnnnnnnnnnnnnnnnnnnnnnnnnnnnnnnnnnnnnnnnnnnnnnnnnnnnnnnnnnnnnnnnnnnnnnnnnnnnnnnnnnnnnnnnnnnnnnnnnnnnnnnnnnnnnnnnnnnnnnnnnnnnnnnnnnnnnnnnnnnnnnnnnnnnnnnnnnnnnnnnnnnnnnnnnnnnnnnnnnnnnnnnnnnnnnnnnnnnnnnnnnnnnnnnnnnnnnnnnnnnnnnnnnnnnnnnnnnnnnnnnnnnnnnnnnnnnnnnnnnnnnnnnnnnnnnnnnnnnnnnnnnnnnnnnnnnnnnnnnnnnnnnnnnnnnnnnnnnnnnnnnnnnnnnnnnnnnnnnnnnnnnnnnnnnnnnnnnnnnnnnnnnnnnnnnnnnnnnnnnnnnnnnnnnnnnnnnnnnnnnnnnnnnnnnnnnnnnnnnnnnnnnnnnnnnnnnnnnnnnnnnnnnnnnnnnnnnnnnnnnnnnnnnnnnnnnnnnnnnnnnnnnnnnnnnnnnnnnnnnnnnnnnnnnnnnnnnnnnnnnnnnnnnnnnnnnnnnnnnnnnnnnnnnnnnnnnnnnnnnnnnnnnnnnnnnnnnnnnnnnnnnnnnnnnnnnnnnnnnnnnnnnnnnnnnnnnnnnnnnnnnnnnnnnnnnnnnnnnnnnnnnnnnnnnnnnnnnnnnnnnnnnnnnnnnnnnnnnnnnnnnnnnnnnnnnnnnnnnnnnnnnnnnnnnnnnnnnnnnnnnnnnnnnnnnnnnnnnnnnnnnnnnnnnnnnnnnnnnnnnnnnnnnnnnnnnnnnnnnnnnnnnnnnnnnnnnnnnnnnnnnnnnnnnnnnnnnnnnnnnnnnnnnnnnnnnnnnnnnnnnnnnnnnnnnnnnnnnnnnnnnnnnnnnnnnnnnnnnnnnnnnnnnnnnnnnnnnnnnnnnnnnnnnnnnnnnnnnnnnnnnnnnnnnnnnnnnnnnnnnnnnnnnnnnnnnnnnnnnnnnnnnnnnnnnnnnnnnnnnnnnnnnnnnnnnnnnnnnnnnnnnnnnnnnnnnnnnnnnnnnnnnnnnnnnnnnnnnnnnnnnnnnnnnnnnnnnnnnnnnnnnnnnnnnnnnnnnnnnnnnnnnnnnnnnnnnnnnnnnnnnnnnnnnnnnnnnnnnnnnnnnnnnnnnnnnnnnnnnnnnnnnnnnnnnnnnnnnnnnnnnnnnnnnnnnnnnnnnnnnnnnnnnnnnnnnnnnnnnnnnnnnnnnnnnnnnnnnnnnnnnnnnnnnnnnnnnnnnnnnnnnnnnnnnnnnnnnnnnnnnnnnnnnnnnnnnnnnnnnnnnnnnnnnnnnnnnnnnnnnnnnnnnnnnnnnnnnnnnnnnnnnnnnnnnnnnnnnnnnnnnnnnnnnnnnnnnnnnnnnnnnnnnnnnnnnnnnnnnnnnnnnnnnnnnnnnnnnnnnnnnnnnnnnnnnnnnnnnnnnnnnnnnnnnnnnnnnnnnnnnnnnnnnnnnnnnnnnnnnnnnnnnnnnnnnnnnnnnnnnnnnnnnnnnnnnnnnnnnnnnnnnnnnnnnnnnnnnnnnnnnnnnnnnnnnnnnnnnnnnnnnnnnnnnnnnnnnnnnnnnnnnnnnnnnnnnnnnnnnnnnnnnnnnnnnnnnnnnnnnnnnnnnnnnnnnnnnnnnnnnnnnnnnnnnnnnnnnnnnnnnnnnnnnnnnnnnnnnnnnnnnnnnnnnnnnnnnnnnnnnnnnnnnnnnnnnnnnnnnnnnnnnnnnnnnnnnnnnnnnnnnnnnnnnnnnnnnnnnnnnnnnnnnnnnnnnnnnnnnnnnnnnnnnnnnnnnnnnnnnnnnnnnnnnnnnnnnnnnnnnnnnnnnnnnnnnnnnnnnnnnnnnnnnnnnnnnnnnnnnnnnnnnnnnnnnnnnnnnnnnnnnnnnnnnnnnnnnnnnnnnnnnnnnnnnnnnnnnnnnnnnnnnnnnnnnnnnnnnnnnnnnnnnnnnnnnnnnnnnnnnnnnnnnnnnnnnnnnnnnnnnnnnnnnnnnnnnnnnnnnnnnnnnnnnnnnnnnnnnnnnnnnnnnnnnnnnnnnnnnnnnnnnnnnnnnnnnnnnnnnnnnnnnnnnnnnnnnnnnnnnnnnnnnnnnnnnnnnnnnnnnnnnnnnnnnnnnnnnnnnnnnnnnnnnnnnnnnnnnnnnnnnnnnnnnnnnnnnnnnnnnnnnnnnnnnnnnnnnnnnnnnnnnnnnnnnnnnnnnnnnnnnnnnnnnnnnnnnnnnnnnnnnnnnnnnnnnnnnnnnnnnnnnnnnnnnnnnnnnnnnnnnnnnnnnnnnnnnnnnnnnnnnnnnnnnnnnnnnnnnnnnnnnnnnnnnnnnnnnnnnnnnnnnnnnnnnnnnnnnnnnnnnnnnnnnnnnnnnnnnnnnnnnnnnnnnnnnnnnnnnnnnnnnnnnnnnnnnnnnnnnnnnnnnnnnnnnnnnnnnnnnnnnnnnnnnnnnnnnnnnnnnnnnnnnnnnnnnnnnnnnnnnnnnnnnnnnnnnnnnnnnnnnnnnnnnnnnnnnnnnnnnnnnnnnnnnnnnnnnnnnnnnnnnnnnnnnnnnnnnnnnnnnnnnnnnnnnnnnnnnnnnnnnnnnnnnnnnnnnnnnnnnnnnnnnnnnnnnnnnnnnnnnnnnnnnnnnnnnnnnnnnnnnnnnnnnnnnnnnnnnnnnnnnnnnnnnnnnnnnnnnnnnnnnnnnnnnnnnnnnnnnnnnnnnnnnnnnnnnnnnnnnnnnnnnnnnnnnnnnnnnnnnnnnnnnnnnnnnnnnnnnnnnnnnnnnnnnnnnnnnnnnnnnnnnnnnnnnnnnnnnnnnnnnnnnnnnnnnnnnnnnnnnnnnnnnnnnnnnnnnnnnnnnnnnnnnnnnnnnnnnnnnnnnnnnnnnnnnnnnnnnnnnnnnnnnnnnnnnnnnnnnnnnnnnnnnnnnnnnnnnnnnnnnnnnnnnnnnnnnnnnnnnnnnnnnnnnnnnnnnnnnnnnnnnnnnnnnnnnnnnnnnnnnnnnnnnnnnnnnnnnnnnnnnnnnnnnnnnnnnnnnnnnnnnnnnnnnnnnnnnnnnnnnnnnnnnnnnnnnnnnnnnnnnnnnnnnnnnnnnnnnnnnnnnnnnnnnnnnnnnnnnnnnnnnnnnnnnnnnnnnnnnnnnnnnnnnnnnnnnnnnnnnnnnnnnnnnnnnnnnnnnnnnnnnnnnnnnnnnnnnnnnnnnnnnnnnnnnnnnnnnnnnnnnnnnnnnnnnnnnnnnnnnnnnnnnnnnnnnnnnnnnnnnnnnnnnnnnnnnnnnnnnnnnnnnnnnnnnnnnnnnnnnnnnnnnnnnnnnnnnnnnnnnnnnnnnnnnnnnnnnnnnnnnnnnnnnnnnnnnnnnnnnnnnnnnnnnnnnnnnnnnnnnnnnnnnnnnnnnnnnnnnnnnnnnnnnnnnnnnnnnnnnnnnnnnnnnnnnnnnnnnnnnnnnnnnnnnnnnnnnnnnnnnnnnnnnnnnnnnnnnnnnnnnnnnnnnnnnnnnnnnnnnnnnnnnnnnnnnnnnnnnnnnnnnnnnnnnnnnnnnnnnnnnnnnnnnnnnnnnnnnnnnnnnnnnnnnnnnnnnnnnnnnnnnnnnnnnnnnnnnnnnnnnnnnnnnnnnnnnnnnnnnnnnnnnnnnnnnnnnnnnnnnnnnnnnnnnnnnnnnnnnnnnnnnnnnnnnnnnnnnnnnnnnnnnnnnnnnnnnnnnnnnnnnnnnnnnnnnnnnnnnnnnnnnnnnnnnnnnnnnnnnnnnnnnnnnnnnnnnnnnnnnnnnnnnnnnnnnnnnnnnnnnnnnnnnnnnnnnnnnnnnnnnnnnnnnnnnnnnnnnnnnnnnnnnnnnnnnnnnnnnnnnnnnnnnnnnnnnnnnnnnnnnnnnnnnnnnnnnnnnnnnnnnnnnnnnnnnnnnnnnnnnnnnnnnnnnnnnnnnnnnnnnnnnnnnnnnnnnnnnnnnnnnnnnnnnnnnnnnnnnnnnnnnnnnnnnnnnnnnnnnnnnnnnnnnnnnnnnnnnnnnnnnnnnnnnnnnnnnnnnnnnnnnnnnnnnnnnnnnnnnnnnnnnnnnnnnnnnnnnnnnnnnnnnnnnnnnnnnnnnnnnnnnnnnnnnnnnnnnnnnnnnnnnnnnnnnnnnnnnnnnnnnnnnnnnnnnnnnnnnnnnnnnnnnnnnnnnnnnnnnnnnnnnnnnnnnnnnnnnnnnnnnnnnnnnnnnnnnnnnnnnnnnnnnnnnnnnnnnnnnnnnnnnnnnnnnnnnnnnnnnnnnnnnnnnnnnnnnnnnnnnnnnnnnnnnnnnnnnnnnnnnnnnnnnnnnnnnnnnnnnnnnnnnnnnnnnnnnnnnnnnnnnnnnnnnnnnnnnnnnnnnnnnnnnnnnnnnnnnnnnnnnnnnnnnnnnnnnnnnnnnnnnnnnnnnnnnnnnnnnnnnnnnnnnnnnnnnnnnnnnnnnnnnnnnnnnnnnnnnnnnnnnnnnnnnnnnnnnnnnnnnnnnnnnnnnnnnnnnnnnnnnnnnnnnnnnnnnnnnnnnnnnnnnnnnnnnnnnnnnnnnnnnnnnnnnnnnnnnnnnnnnnnnnnnnnnnnnnnnnnnnnnnnnnnnnnnnnnnnnnnnnnnnnnnnnnnnnnnnnnnnnnnnnnnnnnnnnnnnnnnnnnnnnnnnnnnnnnnnnnnnnnnnnnnnnnnnnnnnnnnnnnnnnnnnnnnnnnnnnnnnnnnnnnnnnnnnnnnnnnnnnnnnnnnnnnnnnnnnnnnnnnnnnnnnnnnnnnnnnnnnnnnnnnnnnnnnnnnnnnnnnnnnnnnnnnnnnnnnnnnnnnnnnnnnnnnnnnnnnnnnnnnnnnnnnnnnnnnnnnnnnnnnnnnnnnnnnnnnnnnnnnnnnnnnnnnnnnnnnnnnnnnnnnnnnnnnnnnnnnnnnnnnnnnnnnnnnnnnnnnnnnnnnnnnnnnnnnnnnnnnnnnnnnnnnnnnnnnnnnnnnnnnnnnnnnnnnnnnnnnnnnnnnnnnnnnnnnnnnnnnnnnnnnnnnnnnnnnnnnnnnnnnnnnnnnnnnnnnnnnnnnnnnnnnnnnnnnnnnnnnnnnnnnnnnnnnnnnnnnnnnnnnnnnnnnnnnnnnnnnnnnnnnnnnnnnnnnnnnnnnnnnnnnnnnnnnnnnnnnnnnnnnnnnnnnnnnnnnnnnnnnnnnnnnnnnnnnnnnnnnnnnnnnnnnnnnnnnnnnnnnnnnnnnnnnnnnnnnnnnnnnnnnnnnnnnnnnnnnnnnnnnnnnnnnnnnnnnnnnnnnnnnnnnnnnnnnnnnnnnnnnnnnnnnnnnnnnnnnnnnnnnnnnnnnnnnnnnnnnnnnnnnnnnnnnnnnnnnnnnnnnnnnnnnnnnnnnnnnnnnnnnnnnnnnnnnnnnnnnnnnnnnnnnnnnnnnnnnnnnnnnnnnnnnnnnnnnnnnnnnnnnnnnnnnnnnnnnnnnnnnnnnnnnnnnnnnnnnnnnnnnnnnnnnnnnnnnnnnnnnnnnnnnnnnnnnnnnnnnnnnnnnnnnnnnnnnnnnnnnnnnnnnnnnnnnnnnnnnnnnnnnnnnnnnnnnnnnnnnnnnnnnnnnnnnnnnnnnnnnnnnnnnnnnnnnnnnnnnnnnnnnnnnnnnnnnnnnnnnnnnnnnnnnnnnnnnnnnnnnnnnnnnnnnnnnnnnnnnnnnnnnnnnnnnnnnnnnnnnnnnnnnnnnnnnnnnnnnnnnnnnnnnnnnnnnnnnnnnnnnnnnnnnnnnnnnnnnnnnnnnnnnnnnnnnnnnnnnnnnnnnnnnnnnnnnnnnnnnnnnnnnnnnnnnnnnnnnnnnnnnnnnnnnnnnnnnnnnnnnnnnnnnnnnnnnnnnnnnnnnnnnnnnnnnnnnnnnnnnnnnnnnnnnnnnnnnnnnnnnnnnnnnnnnnnnnnnnnnnnnnnnnnnnnnnnnnnnnnnnnnnnnnnnnnnnnnnnnnnnnnnnnnnnnnnnnnnnnnnnnnnnnnnnnnnnnnnnnnnnnnnnnnnnnnnnnnnnnnnnnnnnnnnnnnnnnnnnnnnnnnnnnnnnnnnnnnnnnnnnnnnnnnnnnnnnnnnnnnnnnnnnnnnnnnnnnnnnnnnnnnnnnnnnnnnnnnnnnnnnnnnnnnnnnnnnnnnnnnnnnnnnnnnnnnnnnnnnnnnnnnnnnnnnnnnnnnnnnnnnnnnnnnnnnnnnnnnnnnnnnnnnnnnnnnnnnnnnnnnnnnnnnnnnnnnnnnnnnnnnnnnnnnnnnnnnnnnnnnnnnnnnnnnnnnnnnnnnnnnnnnnnnnnnnnnnnnnnnnnnnnnnnnnnnnnnnnnnnnnnnnnnnnnnnnnnnnnnnnnnnnnnnnnnnnnnnnnnnnnnnnnnnnnnnnnnnnnnnnnnnnnnnnnnnnnnnnnnnnnnnnnnnnnnnnnnnnnnnnnnnnnnnnnnnnnnnnnnnnnnnnnnnnnnnnnnnnnnnnnnnnnnnnnnnnnnnnnnnnnnnnnnnnnnnnnnnnnnnnnnnnnnnnnnnnnnnnnnnnnnnnnnnnnnnnnnnnnnnnnnnnnnnnnnnnnnnnnnnnnnnnnnnnnnnnnnnnnnnnnnnnnnnnnnnnnnnnnnnnnnnnnnnnnnnnnnnnnnnnnnnnnnnnnnnnnnnnnnnnnnnnnnnnnnnnnnnnnnnnnnnnnnnnnnnnnnnnnnnnnnnnnnnnnnnnnnnnnnnnnnnnnnnnnnnnnnnnnnnnnnnnnnnnnnnnnnnnnnnnnnnnnnnnnnnnnnnnnnnnnnnnnnnnnnnnnnnnnnnnnnnnnnnnnnnnnnnnnnnnnnnnnnnnnnnnnnnnnnnnnnnnnnnnnnnnnnnnnnnnnnnnnnnnnnnnnnnnnnnnnnnnnnnnnnnnnnnnnnnnnnnnnnnnnnnnnnnnnnnnnnnnnnnnnnnnnnnnnnnnnnnnnnnnnnnnnnnnnnnnnnnnnnnnnnnnnnnnnnnnnnnnnnnnnnnnnnnnnnnnnnnnnnnnnnnnnnnnnnnnnnnnnnnnnnnnnnnnnnnnnnnnnnnnnnnnnnnnnnnnnnnnnnnnnnnnnnnnnnnnnnnnnnnnnnnnnnnnnnnnnnnnnnnnnnnnnnnnnnnnnnnnnnnnnnnnnnnnnnnnnnnnnnnnnnnnnnnnnnnnnnnnnnnnnnnnnnnnnnnnnnnnnnnnnnnnnnnnnnnnnnnnnnnnnnnnnnnnnnnnnnnnnnnnnnnnnnnnnnnnnnnnnnnnnnnnnnnnnnnnnnnnnnnnnnnnnnnnnnnnnnnnnnnnnnnnnnnnnnnnnnnnnnnnnnnnnnnnnnnnnnnnnnnnnnnnnnnnnnnnnnnnnnnnnnnnnnnnnnnnnnnnnnnnnnnnnnnnnnnnnnnnnnnnnnnnnnnnnnnnnnnnnnnnnnnnnnnnnnnnnnnnnnnnnnnnnnnnnnnnnnnnnnnnnnnnnnnnnnnnnnnnnnnnnnnnnnnnnnnnnnnnnnnnnnnnnnnnnnnnnnnnnnnnnnnnnnnnnnnnnnnnnnnnnnnnnnnnnnnnnnnnnnnnnnnnnnnnnnnnnnnnnnnnnnnnnnnnnnnnnnnnnnnnnnnnnnnnnnnnnnnnnnnnnnnnnnnnnnnnnnnnnnnnnnnnnnnnnnnnnnnnnnnnnnnnnnnnnnnnnnnnnnnnnnnnnnnnnnnnnnnnnnnnnnnnnnnnnnnnnnnnnnnnnnnnnnnnnnnnnnnnnnnnnnnnnnnnnnnnnnnnnnnnnnnnnnnnnnnnnnnnnnnnnnnnnnnnnnnnnnnnnnnnnnnnnnnnnnnnnnnnnnnnnnnnnnnnnnnnnnnnnnnnnnnnnnnnnnnnnnnnnnnnnnnnnnnnnnnnnnnnnnnnnnnnnnnnnnnnnnnnnnnnnnnnnnnnnnnnnnnnnnnnnnnnnnnnnnnnnnnnnnnnnnnnnnnnnnnnnnnnnnnnnnnnnnnnnnnnnnnnnnnnnnnnnnnnnnnnnnnnnnnnnnnnnnnnnnnnnnnnnnnnnnnnnnnnnnnnnnnnnnnnnnnnnnnnnnnnnnnnnnnnnnnnnnnnnnnnnnnnnnnnnnnnnnnnnnnnnnnnnnnnnnnnnnnnnnnnnnnnnnnnnnnnnnnnnnnnnnnnnnnnnnnnnnnnnnnnnnnnnnnnnnnnnnnnnnnnnnnnnnnnnnnnnnnnnnnnnnnnnnnnnnnnnnnnnnnnnnnnnnnnnnnnnnnnnnnnnnnnnnnnnnnnnnnnnnnnnnnnnnnnnnnnnnnnnnnnnnnnnnnnnnnnnnnnnnnnnnnnnnnnnnnnnnnnnnnnnnnnnnnnnnnnnnnnnnnnnnnnnnnnnnnnnnnnnnnnnnnnnnnnnnnnnnnnnnnnnnnnnnnnnnnnnnnnnnnnnnnnnnnnnnnnnnnnnnnnnnnnnnnnnnnnnnnnnnnnnnnnnnnnnnnnnnnnnnnnnnnnnnnnnnnnnnnnnnnnnnnnnnnnnnnnnnnnnnnnnnnnnnnnnnnnnnnnnnnnnnnnnnnnnnnnnnnnnnnnnnnnnnnnnnnnnnnnnnnnnnnnnnnnnnnnnnnnnnnnnnnnnnnnnnnnnnnnnnnnnnnnnnnnnnnnnnnnnnnnnnnnnnnnnnnnnnnnnnnnnnnnnnnnnnnnnnnnnnnnnnnnnnnnnnnnnnnnnnnnnnnnnnnnnnnnnnnnnnnnnnnnnnnnnnnnnnnnnnnnnnnnnnnnnnnnnnnnnnnnnnnnnnnnnnnnnnnnnnnnnnnnnnnnnnnnnnnnnnnnnnnnnnnnnnnnnnnnnnnnnnnnnnnnnnnnnnnnnnnnnnnnnnnnnnnnnnnnnnnnnnnnnnnnnnnnnnnnnnnnnnnnnnnnnnnnnnnnnnnnnnnnnnnnnnnnnnnnnnnnnnnnnnnnnnnnnnnnnnnnnnnnnnnnnnnnnnnnnnnnnnnnnnnnnnnnnnnnnnnnnnnnnnnnnnnnnnnnnnnnnnnnnnnnnnnnnnnnnnnnnnnnnnnnnnnnnnnnnnnnnnnnnnnnnnnnnnnnnnnnnnnnnnnnnnnnnnnnnnnnnnnnnnnnnnnnnnnnnnnnnnnnnnnnnnnnnnnnnnnnnnnnnnnnnnnnnnnnnnnnnnnnnnnnnnnnnnnnnnnnnnnnnnnnnnnnnnnnnnnnnnnnnnnnnnnnnnnnnnnnnnnnnnnnnnnnnnnnnnnnnnnnnnnnnnnnnnnnnnnnnnnnnnnnnnnnnnnnnnnnnnnnnnnnnnnnnnnnnnnnnnnnnnnnnnnnnnnnnnnnnnnnnnnnnnnnnnnnnnnnnnnnnnnnnnnnnnnnnnnnnnnnnnnnnnnnnnnnnnnnnnnnnnnnnnnnnnnnnnnnnnnnnnnnnnnnnnnnnnnnnnnnnnnnnnnnnnnnnnnnnnnnnnnnnnnnnnnnnnnnnnnnnnnnnnnnnnnnnnnnnnnnnnnnnnnnnnnnnnnnnnnnnnnnnnnnnnnnnnnnnnnnnnnnnnnnnnnnnnnnnnnnnnnnnnnnnnnnnnnnnnnnnnnnnnnnnnnnnnnnnnnnnnnnnnnnnnnnnnnnnnnnnnnnnnnnnnnnnnnnnnnnnnnnnnnnnnnnnnnnnnnnnnnnnnnnnnnnnnnnnnnnnnnnnnnnnnnnnnnnnnnnnnnnnnnnnnnnnnnnnnnnnnnnnnnnnnnnnnnnnnnnnnnnnnnnnnnnnnnnnnnnnnnnnnnnnnnnnnnnnnnnnnnnnnnnnnnnnnnnnnnnnnnnnnnnnnnnnnnnnnnnnnnnnnnnnnnnnnnnnnnnnnnnnnnnnnnnnnnnnnnnnnnnnnnnnnnnnnnnnnnnnnnnnnnnnnnnnnnnnnnnnnnnnnnnnnnnnnnnnnnnnnnnnnnnnnnnnnnnnnnnnnnnnnnnnnnnnnnnnnnnnnnnnnnnnnnnnnnnnnnnnnnnnnnnnnnnnnnnnnnnnnnnnnnnnnnnnnnnnnnnnnnnnnnnnnnnnnnnnnnnnnnnnnnnnnnnnnnnnnnnnnnnnnnnnnnnnnnnnnnnnnnnnnnnnnnnnnnnnnnnnnnnnnnnnnnnnnnnnnnnnnnnnnnnnnnnnnnnnnnnnnnnnnnnnnnnnnnnnnnnnnnnnnnnnnnnnnnnnnnnnnnnnnnnnnnnnnnnnnnnnnnnnnnnnnnnnnnnnnnnnnnnnnnnnnnnnnnnnnnnnnnnnnnnnnnnnnnnnnnnnnnnnnnnnnnnnnnnnnnnnnnnnnnnnnnnnnnnnnnnnnnnnnnnnnnnnnnnnnnnnnnnnnnnnnnnnnnnnnnnnnnnnnnnnnnnnnnnnnnnnnnnnnnnnnnnnnnnnnnnnnnnnnnnnnnnnnnnnnnnnnnnnnnnnnnnnnnnnnnnnnnnnnnnnnnnnnnnnnnnnnnnnnnnnnnnnnnnnnnnnnnnnnnnnnnnnnnnnnnnnnnnnnnnnnnnnnnnnnnnnnnnnnnnnnnnnnnnnnnnnnnnnnnnnnnnnnnnnnnnnnnnnnnnnnnnnnnnnnnnnnnnnnnnnnnnnnnnnnnnnnnnnnnnnnnnnnnnnnnnnnnnnnnnnnnnnnnnnnnnnnnnnnnnnnnnnnnnnnnnnnnnnnnnnnnnnnnnnnnnnnnnnnnnnnnnnnnnnnnnnnnnnnnnnnnnnnnnnnnnnnnnnnnnnnnnnnnnnnnnnnnnnnnnnnnnnnnnnnnnnnnnnnnnnnnnnnnnnnnnnnnnnnnnnnnnnnnnnnnnnnnnnnnnnnnnnnnnnnnnnnnnnnnnnnnnnnnnnnnnnnnnnnnnnnnnnnnnnnnnnnnnnnnnnnnnnnnnnnnnnnnnnnnnnnnnnnnnnnnnnnnnnnnnnnnnnnnnnnnnnnnnnnnnnnnnnnnnnnnnnnnnnnnnnnnnnnnnnnnnnnnnnnnnnnnnnnnnnnnnnnnnnnnnnnnnnnnnnnnnnnnnnnnnnnnnnnnnnnnnnnnnnnnnnnnnnnnnnnnnnnnnnnnnnnnnnnnnnnnnnnnnnnnnnnnnnnnnnnnnnnnnnnnnnnnnnnnnnnnnnnnnnnnnnnnnnnnnnnnnnnnnnnnnnnnnnnnnnnnnnnnnnnnnnnnnnnnnnnnnnnnnnnnnnnnnnnnnnnnnnnnnnnnnnnnnnnnnnnnnnnnnnnnnnnnnnnnnnnnnnnnnnnnnnnnnnnnnnnnnnnnnnnnnnnnnnnnnnnnnnnnnnnnnnnnnnnnnnnnnnnnnnnnnnnnnnnnnnnnnnnnnnnnnnnnnnnnnnnnnnnnnnnnnnnnnnnnnnnnnnnnnnnnnnnnnnnnnnnnnnnnnnnnnnnnnnnnnnnnnnnnnnnnnnnnnnnnnnnnnnnnnnnnnnnnnnnnnnnnnnnnnnnnnnnnnnnnnnnnnnnnnnnnnnnnnnnnnnnnnnnnnnnnnnnnnnnnnnnnnnnnnnnnnnnnnnnnnnnnnnnnnnnnnnnnnnnnnnnnnnnnnnnnnnnnnnnnnnnnnnnnnnnnnnnnnnnnnnnnnnnnnnnnnnnnnnnnnnnnnnnnnnnnnnnnnnnnnnnnnnnnnnnnnnnnnnnnnnnnnnnnnnnnnnnnnnnnnnnnnnnnnnnnnnnnnnnnnnnnnnnnnnnnnnnnnnnnnnnnnnnnnnnnnnnnnnnnnnnnnnnnnnnnnnnnnnnnnnnnnnnnnnnnnnnnnnnnnnnnnnnnnnnnnnnnnnnnnnnnnnnnnnnnnnnnnnnnnnnnnnnnnnnnnnnnnnnnnnnnnnnnnnnnnnnnnnnnnnnnnnnnnnnnnnnnnnnnnnnnnnnnnnnnnnnnnnnnnnnnnnnnnnnnnnnnnnnnnnnnnnnnnnnnnnnnnnnnnnnnnnnnnnnnnnnnnnnnnnnnnnnnnnnnnnnnnnnnnnnnnnnnnnnnnnnnnnnnnnnnnnnnnnnnnnnnnnnnnnnnnnnnnnnnnnnnnnnnnnnnnnnnnnnnnnnnnnnnnnnnnnnnnnnnnnnnnnnnnnnnnnnnnnnnnnnnnnnnnnnnnnnnnnnnnnnnnnnnnnnnnnnnnnnnnnnnnnnnnnnnnnnnnnnnnnnnnnnnnnnnnnnnnnnnnnnnnnnnnnnnnnnnnnnnnnnnnnnnnnnnnnnnnnnnnnnnnnnnnnnnnnnnnnnnnnnnnnnnnnnnnnnnnnnnnnnnnnnnnnnnnnnnnnnnnnnnnnnnnnnnnnnnnnnnnnnnnnnnnnnnnnnnnnnnnnnnnnnnnnnnnnnnnnnnnnnnnnnnnnnnnnnnnnnnnnnnnnnnnnnnnnnnnnnnnnnnnnnnnnnnnnnnnnnnnnnnnnnnnnnnnnnnnnnnnnnnnnnnnnnnnnnnnnnnnnnnnnnnnnnnnnnnnnnnnnnnnnnnnnnnnnnnnnnnnnnnnnnnnnnnnnnnnnnnnnnnnnnnnnnnnnnnnnnnnnnnnnnnnnnnnnnnnnnnnnnnnnnnnnnnnnnnnnnnnnnnnnnnnnnnnnnnnnnnnnnnnnnnnnnnnnnnnnnnnnnnnnnnnnnnnnnnnnnnnnnnnnnnnnnnnnnnnnnnnnnnnnnnnnnnnnnnnnnnnnnnnnnnnnnnnnnnnnnnnnnnnnnnnnnnnnnnnnnnnnnnnnnnnnnnnnnnnnnnnnnnnnnnnnnnnnnnnnnnnnnnnnnnnnnnnnnnnnnnnnnnnnnnnnnnnnnnnnnnnnnnnnnnnnnnnnnnnnnnnnnnnnnnnnnnnnnnnnnnnnnnnnnnnnnnnnnnnnnnnnnnnnnnnnnnnnnnnnnnnnnnnnnnnnnnnnnnnnnnnnnnnnnnnnnnnnnnnnnnnnnnnnnnnnnnnnnnnnnnnnnnnnnnnnnnnnnnnnnnnnnnnnnnnnnnnnnnnnnnnnnnnnnnnnnnnnnnnnnnnnnnnnnnnnnnnnnnnnnnnnnnnnnnnnnnnnnnnnnnnnnnnnnnnnnnnnnnnnnnnnnnnnnnnnnnnnnnnnnnnnnnnnnnnnnnnnnnnnnnnnnnnnnnnnnnnnnnnnnnnnnnnnnnnnnnnnnnnnnnnnnnnnnnnnnnnnnnnnnnnnnnnnnnnnnnnnnnnnnnnnnnnnnnnnnnnnnnnnnnnnnnnnnnnnnnnnnnnnnnnnnnnnnnnnnnnnnnnnnnnnnnnnnnnnnnnnnnnnnnnnnnnnnnnnnnnnnnnnnnnnnnnnnnnnnnnnnnnnnnnnnnnnnnnnnnnnnnnnnnnnnnnnnnnnnnnnnnnnnnnnnnnnnnnnnnnnnnnnnnnnnnnnnnnnnnnnnnnnnnnnnnnnnnnnnnnnnnnnnnnnnnnnnnnnnnnnnnnnnnnnnnnnnnnnnnnnnnnnnnnnnnnnnnnnnnnnnnnnnnnnnnnnnnnnnnnnnnnnnnnnnnnnnnnnnnnnnnnnnnnnnnnnnnnnnnnnnnnnnnnnnnnnnnnnnnnnnnnnnnnnnnnnnnnnnnnnnnnnnnnnnnnnnnnnnnnnnnnnnnnnnnnnnnnnnnnnnnnnnnnnnnnnnnnnnnnnnnnnnnnnnnnnnnnnnnnnnnnnnnnnnnnnnnnnnnnnnnnnnnnnnnnnnnnnnnnnnnnnnnnnnnnnnnnnnnnnnnnnnnnnnnnnnnnnnnnnnnnnnnnnnnnnnnnnnnnnnnnnnnnnnnnnnnnnnnnnnnnnnnnnnnnnnnnnnnnnnnnnnnnnnnnnnnnnnnnnnnnnnnnnnnnnnnnnnnnnnnnnnnnnnnnnnnnnnnnnnnnnnnnnnnnnnnnnnnnnnnnnnnnnnnnnnnnnnnnnnnnnnnnnnnnnnnnnnnnnnnnnnnnnnnnnnnnnnnnnnnnnnnnnnnnnnnnnnnnnnnnnnnnnnnnnnnnnnnnnnnnnnnnnnnnnnnnnnnnnnnnnnnnnnnnnnnnnnnnnnnnnnnnnnnnnnnnnnnnnnnnnnnnnnnnnnnnnnnnnnnnnnnnnnnnnnnnnnnnnnnnnnnnnnnnnnnnnnnnnnnnnnnnnnnnnnnnnnnnnnnnnnnnnnnnnnnnnnnnnnnnnnnnnnnnnnnnnnnnnnnnnnnnnnnnnnnnnnnnnnnnnnnnnnnnnnnnnnnnnnnnnnnnnnnnnnnnnnnnnnnnnnnnnnnnnnnnnnnnnnnnnnnnnnnnnnnnnnnnnnnnnnnnnnnnnnnnnnnnnnnnnnnnnnnnnnnnnnnnnnnnnnnnnnnnnnnnnnnnnnnnnnnnnnnnnnnnnnnnnnnnnnnnnnnnnnnnnnnnnnnnnnnnnnnnnnnnnnnnnnnnnnnnnnnnnnnnnnnnnnnnnnnnnnnnnnnnnnnnnnnnnnnnnnnnnnnnnnnnnnnnnnnnnnnnnnnnnnnnnnnnnnnnnnnnnnnnnnnnnnnnnnnnnnnnnnnnnnnnnnnnnnnnnnnnnnnnnnnnnnnnnnnnnnnnnnnnnnnnnnnnnnnnnnnnnnnnnnnnnnnnnnnnnnnnnnnnnnnnnnnnnnnnnnnnnnnnnnnnnnnnnnnnnnnnnnnnnnnnnnnnnnnnnnnnnnnnnnnnnnnnnnnnnnnnnnnnnnnnnnnnnnnnnnnnnnnnnnnnnnnnnnnnnnnnnnnnnnnnnnnnnnnnnnnnnnnnnnnnnnnnnnnnnnnnnnnnnnnnnnnnnnnnnnnnnnnnnnnnnnnnnnnnnnnnnnnnnnnnnnnnnnnnnnnnnnnnnnnnnnnnnnnnnnnnnnnnnnnnnnnnnnnnnnnnnnnnnnnnnnnnnnnnnnnnnnnnnnnnnnnnnnnnnnnnnnnnnnnnnnnnnnnnnnnnnnnnnnnnnnnnnnnnnnnnnnnnnnnnnnnnnnnnnnnnnnnnnnnnnnnnnnnnnnnnnnnnnnnnnnnnnnnnnnnnnnnnnnnnnnnnnnnnnnnnnnnnnnnnnnnnnnnnnnnnnnnnnnnnnnnnnnnnnnnnnnnnnnnnnnnnnnnnnnnnnnnnnnnnnnnnnnnnnnnnnnnnnnnnnnnnnnnnnnnnnnnnnnnnnnnnnnnnnnnnnnnnnnnnnnnnnnnnnnnnnnnnnnnnnnnnnnnnnnnnnnnnnnnnnnnnnnnnnnnnnnnnnnnnnnnnnnnnnnnnnnnnnnnnnnnnnnnnnnnnnnnnnnnnnnnnnnnnnnnnnnnnnnnnnnnnnnnnnnnnnnnnnnnnnnnnnnnnnnnnnnnnnnnnnnnnnnnnnnnnnnnnnnnnnnnnnnnnnnnnnnnnnnnnnnnnnnnnnnnnnnnnnnnnnnnnnnnnnnnnnnnnnnnnnnnnnnnnnnnnnnnnnnnnnnnnnnnnnnnnnnnnnnnnnnnnnnnnnnnnnnnnnnnnnnnnnnnnnnnnnnnnnnnnnnnnnnnnnnnnnnnnnnnnnnnnnnnnnnnnnnnnnnnnnnnnnnnnnnnnnnnnnnnnnnnnnnnnnnnnnnnnnnnnnnnnnnnnnnnnnnnnnnnnnnnnnnnnnnnnnnnnnnnnnnnnnnnnnnnnnnnnnnnnnnnnnnnnnnnnnnnnnnnnnnnnnnnnnnnnnnnnnnnnnnnnnnnnnnnnnnnnnnnnnnnnnnnnnnnnnnnnnnnnnnnnnnnnnnnnnnnnnnnnnnnnnnnnnnnnnnnnnnnnnnnnnnnnnnnnnnnnnnnnnnnnnnnnnnnnnnnnnnnnnnnnnnnnnnnnnnnnnnnnnnnnnnnnnnnnnnnnnnnnnnnnnnnnnnnnnnnnnnnnnnnnnnnnnnnnnnnnnnnnnnnnnnnnnnnnnnnnnnnnnnnnnnnnnnnnnnnnnnnnnnnnnnnnnnnnnnnnnnnnnnnnnnnnnnnnnnnnnnnnnnnnnnnnnnnnnnnnnnnnnnnnnnnnnnnnnnnnnnnnnnnnnnnnnnnnnnnnnnnnnnnnnnnnnnnnnnnnnnnnnnnnnnnnnnnnnnnnnnnnnnnnnnnnnnnnnnnnnnnnnnnnnnnnnnnnnnnnnnnnnnnnnnnnnnnnnnnnnnnnnnnnnnnnnnnnnnnnnnnnnnnnnnnnnnnnnnnnnnnnnnnnnnnnnnnnnnnnnnnnnnnnnnnnnnnnnnnnnnnnnnnnnnnnnnnnnnnnnnnnnnnnnnnnnnnnnnnnnnnnnnnnnnnnnnnnnnnnnnnnnnnnnnnnnnnnnnnnnnnnnnnnnnnnnnnnnnnnnnnnnnnnnnnnnnnnnnnnnnnnnnnnnnnnnnnnnnnnnnnnnnnnnnnnnnnnnnnnnnnnnnnnnnnnnnnnnnnnnnnnnnnnnnnnnnnnnnnnnnnnnnnnnnnnnnnnnnnnnnnnnnnnnnnnnnnnnnnnnnnnnnnnnnnnnnnnnnnnnnnnnnnnnnnnnnnnnnnnnnnnnnnnnnnnnnnnnnnnnnnnnnnnnnnnnnnnnnnnnnnnnnnnnnnnnnnnnnnnnnnnnnnnnnnnnnnnnnnnnnnnnnnnnnnnnnnnnnnnnnnnnnnnnnnnnnnnnnnnnnnnnnnnnnnnnnnnnnnnnnnnnnnnnnnnnnnnnnnnnnnnnnnnnnnnnnnnnnnnnnnnnnnnnnnnnnnnnnnnnnnnnnnnnnnnnnnnnnnnnnnnnnnnnnnnnnnnnnnnnnnnnnnnnnnnnnnnnnnnnnnnnnnnnnnnnnnnnnnnnnnnnnnnnnnnnnnnnnnnnnnnnnnnnnnnnnnnnnnnnnnnnnnnnnnnnnnnnnnnnnnnnnnnnnnnnnnnnnnnnnnnnnnnnnnnnnnnnnnnnnnnnnnnnnnnnnnnnnnnnnnnnnnnnnnnnnnnnnnnnnnnnnnnnnnnnnnnnnnnnnnnnnnnnnnnnnnnnnnnnnnnnnnnnnnnnnnnnnnnnnnnnnnnnnnnnnnnnnnnnnnnnnnnnnnnnnnnnnnnnnnnnnnnnnnnnnnnnnnnnnnnnnnnnnnnnnnnnnnnnnnnnnnnnnnnnnnnnnnnnnnnnnnnnnnnnnnnnnnnnnnnnnnnnnnnnnnnnnnnnnnnnnnnnnnnnnnnnnnnnnnnnnnnnnnnnnnnnnnnnnnnnnnnnnnnnnnnnnnnnnnnnnnnnnnnnnnnnnnnnnnnnnnnnnnnnnnnnnnnnnnnnnnnnnnnnnnnnnnnnnnnnnnnnnnnnnnnnnnnnnnnnnnnnnnnnnnnnnnnnnnnnnnnnnnnnnnnnnnnnnnnnnnnnnnnnnnnnnnnnnnnnnnnnnnnnnnnnnnnnnnnnnnnnnnnnnnnnnnnnnnnnnnnnnnnnnnnnnnnnnnnnnnnnnnnnnnnnnnnnnnnnnnnnnnnnnnnnnnnnnnnnnnnnnnnnnnnnnnnnnnnnnnnnnnnnnnnnnnnnnnnnnnnnnnnnnnnnnnnnnnnnnnnnnnnnnnnnnnnnnnnnnnnnnnnnnnnnnnnnnnnnnnnnnnnnnnnnnnnnnnnnnnnnnnnnnnnnnnnnnnnnnnnnnnnnnnnnnnnnnnnnnnnnnnnnnnnnnnnnnnnnnnnnnnnnnnnnnnnnnnnnnnnnnnnnnnnnnnnnnnnnnnnnnnnnnnnnnnnnnnnnnnnnnnnnnnnnnnnnnnnnnnnnnnnnnnnnnnnnnnnnnnnnnnnnnnnnnnnnnnnnnnnnnnnnnnnnnnnnnnnnnnnnnnnnnnnnnnnnnnnnnnnnnnnnnnnnnnnnnnnnnnnnnnnnnnnnnnnnnnnnnnnnnnnnnnnnnnnnnnnnnnnnnnnnnnnnnnnnnnnnnnnnnnnnnnnnnnnnnnnnnnnnnnnnnnnnnnnnnnnnnnnnnnnnnnnnnnnnnnnnnnnnnnnnnnnnnnnnnnnnnnnnnnnnnnnnnnnnnnnnnnnnnnnnnnnnnnnnnnnnnnnnnnnnnnnnnnnnnnnnnnnnnnnnnnnnnnnnnnnnnnnnnnnnnnnnnnnnnnnnnnnnnnnnnnnnnnnnnnnnnnnnnnnnnnnnnnnnnnnnnnnnnnnnnnnnnnnnnnnnnnnnnnnnnnnnnnnnnnnnnnnnnnnnnnnnnnnnnnnnnnnnnnnnnnnnnnnnnnnnnnnnnnnnnnnnnnnnnnnnnnnnnnnnnnnnnnnnnnnnnnnnnnnnnnnnnnnnnnnnnnnnnnnnnnnnnnnnnnnnnnnnnnnnnnnnnnnnnnnnnnnnnnnnnnnnnnnnnnnnnnnnnnnnnnnnnnnnnnnnnnnnnnnnnnnnnnnnnnnnnnnnnnnnnnnnnnnnnnnnnnnnnnnnnnnnnnnnnnnnnnnnnnnnnnnnnnnnnnnnnnnnnnnnnnnnnnnnnnnnnnnnnnnnnnnnnnnnnnnnnnnnnnnnnnnnnnnnnnnnnnnnnnnnnnnnnnnnnnnnnnnnnnnnnnnnnnnnnnnnnnnnnnnnnnnnnnnnnnnnnnnnnnnnnnnnnnnnnnnnnnnnnnnnnnnnnnnnnnnnnnnnnnnnnnnnnnnnnnnnnnnnnnnnnnnnnnnnnnnnnnnnnnnnnnnnnnnnnnnnnnnnnnnnnnnnnnnnnnnnnnnnnnnnnnnnnnnnnnnnnnnnnnnnnnnnnnnnnnnnnnnnnnnnnnnnnnnnnnnnnnnnnnnnnnnnnnnnnnnnnnnnnnnnnnnnnnnnnnnnnnnnnnnnnnnnnnnnnnnnnnnnnnnnnnnnnnnnnnnnnnnnnnnnnnnnnnnnnnnnnnnnnnnnnnnnnnnnnnnnnnnnnnnnnnnnnnnnnnnnnnnnnnnnnnnnnnnnnnnnnnnnnnnnnnnnnnnnnnnnnnnnnnnnnnnnnnnnnnnnnnnnnnnnnnnnnnnnnnnnnnnnnnnnnnnnnnnnnnnnnnnnnnnnnnnnnnnnnnnnnnnnnnnnnnnnnnnnnnnnnnnnnnnnnnnnnnnnnnnnnnnnnnnnnnnnnnnnnnnnnnnnnnnnnnnnnnnnnnnnnnnnnnnnnnnnnnnnnnnnnnnnnnnnnnnnnnnnnnnnnnnnnnnnnnnnnnnnnnnnnnnnnnnnnnnnnnnnnnnnnnnnnnnnnnnnnnnnnnnnnnnnnnnnnnnnnnnnnnnnnnnnnnnnnnnnnnnnnnnnnnnnnnnnnnnnnnnnnnnnnnnnnnnnnnnnnnnnnnnnnnnnnnnnnnnnnnnnnnnnnnnnnnnnnnnnnnnnnnnnnnnnnnnnnnnnnnnnnnnnnnnnnnnnnnnnnnnnnnnnnnnnnnnnnnnnnnnnnnnnnnnnnnnnnnnnnnnnnnnnnnnnnnnnnnnnnnnnnnnnnnnnnnnnnnnnnnnnnnnnnnnnnnnnnnnnnnnnnnnnnnnnnnnnnnnnnnnnnnnnnnnnnnnnnnnnnnnnnnnnnnnnnnnnnnnnnnnnnnnnnnnnnnnnnnnnnnnnnnnnnnnnnnnnnnnnnnnnnnnnnnnnnnnnnnnnnnnnnnnnnnnnnnnnnnnnnnnnnnnnnnnnnnnnnnnnnnnnnnnnnnnnnnnnnnnnnnnnnnnnnnnnnnnnnnnnnnnnnnnnnnnnnnnnnnnnnnnnnnnnnnnnnnnnnnnnnnnnnnnnnnnnnnnnnnnnnnnnnnnnnnnnnnnnnnnnnnnnnnnnnnnnnnnnnnnnnnnnnnnnnnnnnnnnnnnnnnnnnnnnnnnnnnnnnnnnnnnnnnnnnnnnnnnnnnnnnnnnnnnnnnnnnnnnnnnnnnnnnnnnnnnnnnnnnnnnnnnnnnnnnnnnnnnnnnnnnnnnnnnnnnnnnnnnnnnnnnnnnnnnnnnnnnnnnnnnnnnnnnnnnnnnnnnnnnnnnnnnnnnnnnnnnnnnnnnnnnnnnnnnnnnnnnnnnnnnnnnnnnnnnnnnnnnnnnnnnnnnnnnnnnnnnnnnnnnnnnnnnnnnnnnnnnnnnnnnnnnnnnnnnnnnnnnnnnnnnnnnnnnnnnnnnnnnnnnnnnnnnnnnnnnnnnnnnnnnnnnnnnnnnnnnnnnnnnnnnnnnnnnnnnnnnnnnnnnnnnnnnnnnnnnnnnnnnnnnnnnnnnnnnnnnnnnnnnnnnnnnnnnnnnnnnnnnnnnnnnnnnnnnnnnnnnnnnnnnnnnnnnnnnnnnnnnnnnnnnnnnnnnnnnnnnnnnnnnnnnnnnnnnnnnnnnnnnnnnnnnnnnnnnnnnnnnnnnnnnnnnnnnnnnnnnnnnnnnnnnnnnnnnnnnnnnnnnnnnnnnnnnnnnnnnnnnnnnnnnnnnnnnnnnnnnnnnnnnnnnnnnnnnnnnnnnnnnnnnnnnnnnnnnnnnnnnnnnnnnnnnnnnnnnnnnnnnnnnnnnnnnnnnnnnnnnnnnnnnnnnnnnnnnnnnnnnnnnnnnnnnnnnnnnnnnnnnnnnnnnnnnnnnnnnnnnnnnnnnnnnnnnnnnnnnnnnnnnnnnnnnnnnnnnnnnnnnnnnnnnnnnnnnnnnnnnnnnnnnnnnnnnnnnnnnnnnnnnnnnnnnnnnnnnnnnnnnnnnnnnnnnnnnnnnnnnnnnnnnnnnnnnnnnnnnnnnnnnnnnnnnnnnnnnnnnnnnnnnnnnnnnnnnnnnnnnnnnnnnnnnnnnnnnnnnnnnnnnnnnnnnnnnnnnnnnnnnnnnnnnnnnnnnnnnnnnnnnnnnnnnnnnnnnnnnnnnnnnnnnnnnnnnnnnnnnnnnnnnnnnnnnnnnnnnnnnnnnnnnnnnnnnnnnnnnnnnnnnnnnnnnnnnnnnnnnnnnnnnnnnnnnnnnnnnnnnnnnnnnnnnnnnnnnnnnnnnnnnnnnnnnnnnnnnnnnnnnnnnnnnnnnnnnnnnnnnnnnnnnnnnnnnnnnnnnnnnnnnnnnnnnnnnnnnnnnnnnnnnnnnnnnnnnnnnnnnnnnnnnnnnnnnnnnnnnnnnnnnnnnnnnnnnnnnnnnnnnnnnnnnnnnnnnnnnnnnnnnnnnnnnnnnnnnnnnnnnnnnnnnnnnnnnnnnnnnnnnnnnnnnnnnnnnnnnnnnnnnnnnnnnnnnnnnnnnnnnnnnnnnnnnnnnnnnnnnnnnnnnnnnnnnnnnnnnnnnnnnnnnnnnnnnnnnnnnnnnnnnnnnnnnnnnnnnnnnnnnnnnnnnnnnnnnnnnnnnnnnnnnnnnnnnnnnnnnnnnnnnnnnnnnnnnnnnnnnnnnnnnnnnnnnnnnnnnnnnnnnnnnnnnnnnnnnnnnnnnnnnnnnnnnnnnnnnnnnnnnnnnnnnnnnnnnnnnnnnnnnnnnnnnnnnnnnnnnnnnnnnnnnnnnnnnnnnnnnnnnnnnnnnnnnnnnnnnnnnnnnnnnnnnnnnnnnnnnnnnnnnnnnnnnnnnnnnnnnnnnnnnnnnnnnnnnnnnnnnnnnnnnnnnnnnnnnnnnnnnnnnnnnnnnnnnnnnnnnnnnnnnnnnnnnnnnnnnnnnnnnnnnnnnnnnnnnnnnnnnnnnnnnnnnnnnnnnnnnnnnnnnnnnnnnnnnnnnnnnnnnnnnnnnnnnnnnnnnnnnnnnnnnnnnnnnnnnnnnnnnnnnnnnnnnnnnnnnnnnnnnnnnnnnnnnnnnnnnnnnnnnnnnnnnnnnnnnnnnnnnnnnnnnnnnnnnnnnnnnnnnnnnnnnnnnnnnnnnnnnnnnnnnnnnnnnnnnnnnnnnnnnnnnnnnnnnnnnnnnnnnnnnnnnnnnnnnnnnnnnnnnnnnnnnnnnnnnnnnnnnnnnnnnnnnnnnnnnnnnnnnnnnnnnnnnnnnnnnnnnnnnnnnnnnnnnnnnnnnnnnnnnnnnnnnnnnnnnnnnnnnnnnnnnnnnnnnnnnnnnnnnnnnnnnnnnnnnnnnnnnnnnnnnnnnnnnnnnnnnnnnnnnnnnnnnnnnnnnnnnnnnnnnnnnnnnnnnnnnnnnnnnnnnnnnnnnnnnnnnnnnnnnnnnnnnnnnnnnnnnnnnnnnnnnnnnnnnnnnnnnnnnnnnnnnnnnnnnnnnnnnnnnnnnnnnnnnnnnnnnnnnnnnnnnnnnnnnnnnnnnnnnnnnnnnnnnnnnnnnnnnnnnnnnnnnnnnnnnnnnnnnnnnnnnnnnnnnnnnnnnnnnnnnnnnnnnnnnnnnnnnnnnnnnnnnnnnnnnnnnnnnnnnnnnnnnnnnnnnnnnnnnnnnnnnnnnnnnnnnnnnnnnnnnnnnnnnnnnnnnnnnnnnnnnnnnnnnnnnnnnnnnnnnnnnnnnnnnnnnnnnnnnnnnnnnnnnnnnnnnnnnnnnnnnnnnnnnnnnnnnnnnnnnnnnnnnnnnnnnnnnnnnnnnnnnnnnnnnnnnnnnnnnnnnnnnnnnnnnnnnnnnnnnnnnnnnnnnnnnnnnnnnnnnnnnnnnnnnnnnnnnnnnnnnnnnnnnnnnnnnnnnnnnnnnnnnnnnnnnnnnnnnnnnnnnnnnnnnnnnnnnnnnnnnnnnnnnnnnnnnnnnnnnnnnnnnnnnnnnnnnnnnnnnnnnnnnnnnnnnnnnnnnnnnnnnnnnnnnnnnnnnnnnnnnnnnnnnnnnnnnnnnnnnnnnnnnnnnnnnnnnnnnnnnnnnnnnnnnnnnnnnnnnnnnnnnnnnnnnnnnnnnnnnnnnnnnnnnnnnnnnnnnnnnnnnnnnnnnnnnnnnnnnnnnnnnnnnnnnnnnnnnnnnnnnnnnnnnnnnnnnnnnnnnnnnnnnnnnnnnnnnnnnnnnnnnnnnnnnnnnnnnnnnnnnnnnnnnnnnnnnnnnnnnnnnnnnnnnnnnnnnnnnnnnnnnnnnnnnnnnnnnnnnnnnnnnnnnnnnnnnnnnnnnnnnnnnnnnnnnnnnnnnnnnnnnnnnnnnnnnnnnnnnnnnnnnnnnnnnnnnnnnnnnnnnnnnnnnnnnnnnnnnnnnnnnnnnnnnnnnnnnnnnnnnnnnnnnnnnnnnnnnnnnnnnnnnnnnnnnnnnnnnnnnnnnnnnnnnnnnnnnnnnnnnnnnnnnnnnnnnnnnnnnnnnnnnnnnnnnnnnnnnnnnnnnnnnnnnnnnnnnnnnnnnnnnnnnnnnnnnnnnnnnnnnnnnnnnnnnnnnnnnnnnnnnnnnnnnnnnnnnnnnnnnnnnnnnnnnnnnnnnnnnnnnnnnnnnnnnnnnnnnnnnnnnnnnnnnnnnnnnnnnnnnnnnnnnnnnnnnnnnnnnnnnnnnnnnnnnnnnnnnnnnnnnnnnnnnnnnnnnnnnnnnnnnnnnnnnnnnnnnnnnnnnnnnnnnnnnnnnnnnnnnnnnnnnnnnnnnnnnnnnnnnnnnnnnnnnnnnnnnnnnnnnnnnnnnnnnnnnnnnnnnnnnnnnnnnnnnnnnnnnnnnnnnnnnnnnnnnnnnnnnnnnnnnnnnnnnnnnnnnnnnnnnnnnnnnnnnnnnnnnnnnnnnnnnnnnnnnnnnnnnnnnnnnnnnnnnnnnnnnnnnnnnnnnnnnnnnnnnnnnnnnnnnnnnnnnnnnnnnnnnnnnnnnnnnnnnnnnnnnnnnnnnnnnnnnnnnnnnnnnnnnnnnnnnnnnnnnnnnnnnnnnnnnnnnnnnnnnnnnnnnnnnnnnnnnnnnnnnnnnnnnnnnnnnnnnnnnnnnnnnnnnnnnnnnnnnnnnnnnnnnnnnnnnnnnnnnnnnnnnnnnnnnnnnnnnnnnnnnnnnnnnnnnnnnnnnnnnnnnnnnnnnnnnnnnnnnnnnnnnnnnnnnnnnnnnnnnnnnnnnnnnnnnnnnnnnnnnnnnnnnnnnnnnnnnnnnnnnnnnnnnnnnnnnnnnnnnnnnnnnnnnnnnnnnnnnnnnnnnnnnnnnnnnnnnnnnnnnnnnnnnnnnnnnnnnnnnnnnnnnnnnnnnnnnnnnnnnnnnnnnnnnnnnnnnnnnnnnnnnnnnnnnnnnnnnnnnnnnnnnnnnnnnnnnnnnnnnnnnnnnnnnnnnnnnnnnnnnnnnnnnnnnnnnnnnnnnnnnnnnnnnnnnnnnnnnnnnnnnnnnnnnnnnnnnnnnnnnnnnnnnnnnnnnnnnnnnnnnnnnnnnnnnnnnnnnnnnnnnnnnnnnnnnnnnnnnnnnnnnnnnnnnnnnnnnnnnnnnnnnnnnnnnnnnnnnnnnnnnnnnnnnnnnnnnnnnnnnnnnnnnnnnnnnnnnnnnnnnnnnnnnnnnnnnnnnnnnnnnnnnnnnnnnnnnnnnnnnnnnnnnnnnnnnnnnnnnnnnnnnnnnnnnnnnnnnnnnnnnnnnnnnnnnnnnnnnnnnnnnnnnnnnnnnnnnnnnnnnnnnnnnnnnnnnnnnnnnnnnnnnnnnnnnnnnnnnnnnnnnnnnnnnnnnnnnnnnnnnnnnnnnnnnnnnnnnnnnnnnnnnnnnnnnnnnnnnnnnnnnnnnnnnnnnnnnnnnnnnnnnnnnnnnnnnnnnnnnnnnnnnnnnnnnnnnnnnnnnnnnnnnnnnnnnnnnnnnnnnnnnnnnnnnnnnnnnnnnnnnnnnnnnnnnnnnnnnnnnnnnnnnnnnnnnnnnnnnnnnnnnnnnnnnnnnnnnnnnnnnnnnnnnnnnnnnnnnnnnnnnnnnnnnnnnnnnnnnnnnnnnnnnnnnnnnnnnnnnnnnnnnnnnnnnnnnnnnnnnnnnnnnnnnnnnnnnnnnnnnnnnnnnnnnnnnnnnnnnnnnnnnnnnnnnnnnnnnnnnnnnnnnnnnnnnnnnnnnnnnnnnnnnnnnnnnnnnnnnnnnnnnnnnnnnnnnnnnnnnnnnnnnnnnnnnnnnnnnnnnnnnnnnnnnnnnnnnnnnnnnnnnnnnnnnnnnnnnnnnnnnnnnnnnnnnnnnnnnnnnnnnnnnnnnnnnnnnnnnnnnnnnnnnnnnnnnnnnnnnnnnnnnnnnnnnnnnnnnnnnnnnnnnnnnnnnnnnnnnnnnnnnnnnnnnnnnnnnnnnnnnnnnnnnnnnnnnnnnnnnnnnnnnnnnnnnnnnnnnnnnnnnnnnnnnnnnnnnnnnnnnnnnnnnnnnnnnnnnnnnnnnnnnnnnnnnnnnnnnnnnnnnnnnnnnnnnnnnnnnnnnnnnnnnnnnnnnnnnnnnnnnnnnnnnnnnnnnnnnnnnnnnnnnnnnnnnnnnnnnnnnnnnnnnnnnnnnnnnnnnnnnnnnnnnnnnnnnnnnnnnnnnnnnnnnnnnnnnnnnnnnnnnnnnnnnnnnnnnnnnnnnnnnnnnnnnnnnnnnnnnnnnnnnnnnnnnnnnnnnnnnnnnnnnnnnnnnnnnnnnnnnnnnnnnnnnnnnnnnnnnnnnnnnnnnnnnnnnnnnnnnnnnnnnnnnnnnnnnnnnnnnnnnnnnnnnnnnnnnnnnnnnnnnnnnnnnnnnnnnnnnnnnnnnnnnnnnnnnnnnnnnnnnnnnnnnnnnnnnnnnnnnnnnnnnnnnnnnnnnnnnnnnnnnnnnnnnnnnnnnnnnnnnnnnnnnnnnnnnnnnnnnnnnnnnnnnnnnnnnnnnnnnnnnnnnnnnnnnnnnnnnnnnnnnnnnnnnnnnnnnnnnnnnnnnnnnnnnnnnnnnnnnnnnnnnnnnnnnnnnnnnnnnnnnnnnnnnnnnnnnnnnnnnnnnnnnnnnnnnnnnnnnnnnnnnnnnnnnnnnnnnnnnnnnnnnnnnnnnnnnnnnnnnnnnnnnnnnnnnnnnnnnnnnnnnnnnnnnnnnnnnnnnnnnnnnnnnnnnnnnnnnnnnnnnnnnnnnnnnnnnnnnnnnnnnnnnnnnnnnnnnnnnnnnnnnnnnnnnnnnnnnnnnnnnnnnnnnnnnnnnnnnnnnnnnnnnnnnnnnnnnnnnnnnnnnnnnnnnnnnnnnnnnnnnnnnnnnnnnnnnnnnnnnnnnnnnnnnnnnnnnnnnnnnnnnnnnnnnnnnnnnnnnnnnnnnnnnnnnnnnnnnnnnnnnnnnnnnnnnnnnnnnnnnnnnnnnnnnnnnnnnnnnnnnnnnnnnnnnnnnnnnnnnnnnnnnnnnnnnnnnnnnnnnnnnnnnnnnnnnnnnnnnnnnnnnnnnnnnnnnnnnnnnnnnnnnnnnnnnnnnnnnnnnnnnnnnnnnnnnnnnnnnnnnnnnnnnnnnnnnnnnnnnnnnnnnnnnnnnnnnnnnnnnnnnnnnnnnnnnnnnnnnnnnnnnnnnnnnnnnnnnnnnnnnnnnnnnnnnnnnnnnnnnnnnnnnnnnnnnnnnnnnnnnnnnnnnnnnnnnnnnnnnnnnnnnnnnnnnnnnnnnnnnnnnnnnnnnnnnnnnnnnnnnnnnnnnnnnnnnnnnnnnnnnnnnnnnnnnnnnnnnnnnnnnnnnnnnnnnnnnnnnnnnnnnnnnnnnnnnnnnnnnnnnnnnnnnnnnnnnnnnnnnnnnnnnnnnnnnnnnnnnnnnnnnnnnnnnnnnnnnnnnnnnnnnnnnnnnnnnnnnnnnnnnnnnnnnnnnnnnnnnnnnnnnnnnnnnnnnnnnnnnnnnnnnnnnnnnnnnnnnnnnnnnnnnnnnnnnnnnnnnnnnnnnnnnnnnnnnnnnnnnnnnnnnnnnnnnnnnnnnnnnnnnnnnnnnnnnnnnnnnnnnnnnnnnnnnnnnnnnnnnnnnnnnnnnnnnnnnnnnnnnnnnnnnnnnnnnnnnnnnnnnnnnnnnnnnnnnnnnnnnnnnnnnnnnnnnnnnnnnnnnnnnnnnnnnnnnnnnnnnnnnnnnnnnnnnnnnnnnnnnnnnnnnnnnnnnnnnnnnnnnnnnnnnnnnnnnnnnnnnnnnnnnnnnnnnnnnnnnnnnnnnnnnnnnnnnnnnnnnnnnnnnnnnnnnnnnnnnnnnnnnnnnnnnnnnnnnnnnnnnnnnnnnnnnnnnnnnnnnnnnnnnnnnnnnnnnnnnnnnnnnnnnnnnnnnnnnnnnnnnnnnnnnnnnnnnnnnnnnnnnnnnnnnnnnnnnnnnnnnnnnnnnnnnnnnnnnnnnnnnnnnnnnnnnnnnnnnnnnnnnnnnnnnnnnnnnnnnnnnnnnnnnnnnnnnnnnnnnnnnnnnnnnnnnnnnnnnnnnnnnnnnnnnnnnnnnnnnnnnnnnnnnnnnnnnnnnnnnnnnnnnnnnnnnnnnnnnnnnnnnnnnnnnnnnnnnnnnnnnnnnnnnnnnnnnnnnnnnnnnnnnnnnnnnnnnnnnnnnnnnnnnnnnnnnnnnnnnnnnnnnnnnnnnnnnnnnnnnnnnnnnnnnnnnnnnnnnnnnnnnnnnnnnnnnnnnnnnnnnnnnnnnnnnnnnnnnnnnnnnnnnnnnnnnnnnnnnnnnnnnnnnnnnnnnnnnnnnnnnnnnnnnnnnnnnnnnnnnnnnnnnnnnnnnnnnnnnnnnnnnnnnnnnnnnnnnnnnnnnnnnnnnnnnnnnnnnnnnnnnnnnnnnnnnnnnnnnnnnnnnnnnnnnnnnnnnnnnnnnnnnnnnnnnnnnnnnnnnnnnnnnnnnnnnnnnnnnnnnnnnnnnnnnnnnnnnnnnnnnnnnnnnnnnnnnnnnnnnnnnnnnnnnnnnnnnnnnnnnnnnnnnnnnnnnnnnnnnnnnnnnnnnnnnnnnnnnnnnnnnnnnnnnnnnnnnnnnnnnnnnnnnnnnnnnnnnnnnnnnnnnnnnnnnnnnnnnnnnnnnnnnnnnnnnnnnnnnnnnnnnnnnnnnnnnnnnnnnnnnnnnnnnnnnnnnnnnnnnnnnnnnnnnnnnnnnnnnnnnnnnnnnnnnnnnnnnnnnnnnnnnnnnnnnnnnnnnnnnnnnnnnnnnnnnnnnnnnnnnnnnnnnnnnnnnnnnnnnnnnnnnnnnnnnnnnnnnnnnnnnnnnnnnnnnnnnnnnnnnnnnnnnnnnnnnnnnnnnnnnnnnnnnnnnnnnnnnnnnnnnnnnnnnnnnnnnnnnnnnnnnnnnnnnnnnnnnnnnnnnnnnnnnnnnnnnnnnnnnnnnnnnnnnnnnnnnnnnnnnnnnnnnnnnnnnnnnnnnnnnnnnnnnnnnnnnnnnnnnnnnnnnnnnnnnnnnnnnnnnnnnnnnnnnnnnnnnnnnnnnnnnnnnnnnnnnnnnnnnnnnnnnnnnnnnnnnnnnnnnnnnnnnnnnnnnnnnnnnnnnnnnnnnnnnnnnnnnnnnnnnnnnnnnnnnnnnnnnnnnnnnnnnnnnnnnnnnnnnnnnnnnnnnnnnnnnnnnnnnnnnnnnnnnnnnnnnnnnnnnnnnnnnnnnnnnnnnnnnnnnnnnnnnnnnnnnnnnnnnnnnnnnnnnnnnnnnnnnnnnnnnnnnnnnnnnnnnnnnnnnnnnnnnnnnnnnnnnnnnnnnnnnnnnnnnnnnnnnnnnnnnnnnnnnnnnnnnnnnnnnnnnnnnnnnnnnnnnnnnnnnnnnnnnnnnnnnnnnnnnnnnnnnnnnnnnnnnnnnnnnnnnnnnnnnnnnnnnnnnnnnnnnnnnnnnnnnnnnnnnnnnnnnnnnnnnnnnnnnnnnnnnnnnnnnnnnnnnnnnnnnnnnnnnnnnnnnnnnnnnnnnnnnnnnnnnnnnnnnnnnnnnnnnnnnnnnnnnnnnnnnnnnnnnnnnnnnnnnnnnnnnnnnnnnnnnnnnnnnnnnnnnnnnnnnnnnnnnnnnnnnnnnnnnnnnnnnnnnnnnnnnnnnnnnnnnnnnnnnnnnnnnnnnnnnnnnnnnnnnnnnnnnnnnnnnnnnnnnnnnnnnnnnnnnnnnnnnnnnnnnnnnnnnnnnnnnnnnnnnnnnnnnnnnnnnnnnnnnnnnnnnnnnnnnnnnnnnnnnnnnnnnnnnnnnnnnnnnnnnnnnnnnnnnnnnnnnnnnnnnnnnnnnnnnnnnnnnnnnnnnnnnnnnnnnnnnnnnnnnnnnnnnnnnnnnnnnnnnnnnnnnnnnnnnnnnnnnnnnnnnnnnnnnnnnnnnnnnnnnnnnnnnnnnnnnnnnnnnnnnnnnnnnnnnnnnnnnnnnnnnnnnnnnnnnnnnnnnnnnnnnnnnnnnnnnnnnnnnnnnnnnnnnnnnnnnnnnnnnnnnnnnnnnnnnnnnnnnnnnnnnnnnnnnnnnnnnnnnnnnnnnnnnnnnnnnnnnnnnnnnnnnnnnnnnnnnnnnnnnnnnnnnnnnnnnnnnnnnnnnnnnnnnnnnnnnnnnnnnnnnnnnnnnnnnnnnnnnnnnnnnnnnnnnnnnnnnnnnnnnnnnnnnnnnnnnnnnnnnnnnnnnnnnnnnnnnnnnnnnnnnnnnnnnnnnnnnnnnnnnnnnnnnnnnnnnnnnnnnnnnnnnnnnnnnnnnnnnnnnnnnnnnnnnnnnnnnnnnnnnnnnnnnnnnnnnnnnnnnnnnnnnnnnnnnnnnnnnnnnnnnnnnnnnnnnnnnnnnnnnnnnnnnnnnnnnnnnnnnnnnnnnnnnnnnnnnnnnnnnnnnnnnnnnnnnnnnnnnnnnnnnnnnnnnnnnnnnnnnnnnnnnnnnnnnnnnnnnnnnnnnnnnnnnnnnnnnnnnnnnnnnnnnnnnnnnnnnnnnnnnnnnnnnnnnnnnnnnnnnnnnnnnnnnnnnnnnnnnnnnnnnnnnnnnnnnnnnnnnnnnnnnnnnnnnnnnnnnnnnnnnnnnnnnnnnnnnnnnnnnnnnnnnnnnnnnnnnnnnnnnnnnnnnnnnnnnnnnnnnnnnnnnnnnnnnnnnnnnnnnnnnnnnnnnnnnnnnnnnnnnnnnnnnnnnnnnnnnnnnnnnnnnnnnnnnnnnnnnnnnnnnnnnnnnnnnnnnnnnnnnnnnnnnnnnnnnnnnnnnnnnnnnnnnnnnnnnnnnnnnnnnnnnnnnnnnnnnnnnnnnnnnnnnnnnnnnnnnnnnnnnnnnnnnnnnnnnnnnnnnnnnnnnnnnnnnnnnnnnnnnnnnnnnnnnnnnnnnnnnnnnnnnnnnnnnnnnnnnnnnnnnnnnnnnnnnnnnnnnnnnnnnnnnnnnnnnnnnnnnnnnnnnnnnnnnnnnnnnnnnnnnnnnnnnnnnnnnnnnnnnnnnnnnnnnnnnnnnnnnnnnnnnnnnnnnnnnnnnnnnnnnnnnnnnnnnnnnnnnnnnnnnnnnnnnnnnnnnnnnnnnnnnnnnnnnnnnnnnnnnnnnnnnnnnnnnnnnnnnnnnnnnnnnnnnnnnnnnnnnnnnnnnnnnnnnnnnnnnnnnnnnnnnnnnnnnnnnnnnnnnnnnnnnnnnnnnnnnnnnnnnnnnnnnnnnnnnnnnnnnnnnnnnnnnnnnnnnnnnnnnnnnnnnnnnnnnnnnnnnnnnnnnnnnnnnnnnnnnnnnnnnnnnnnnnnnnnnnnnnnnnnnnnnnnnnnnnnnnnnnnnnnnnnnnnnnnnnnnnnnnnnnnnnnnnnnnnnnnnnnnnnnnnnnnnnnnnnnnnnnnnnnnnnnnnnnnnnnnnnnnnnnnnnnnnnnnnnnnnnnnnnnnnnnnnnnnnnnnnnnnnnnnnnnnnnnnnnnnnnnnnnnnnnnnnnnnnnnnnnnnnnnnnnnnnnnnnnnnnnnnnnnnnnnnnnnnnnnnnnnnnnnnnnnnnnnnnnnnnnnnnnnnnnnnnnnnnnnnnnnnnnnnnnnnnnnnnnnnnnnnnnnnnnnnnnnnnnnnnnnnnnnnnnnnnnnnnnnnnnnnnnnnnnnnnnnnnnnnnnnnnnnnnnnnnnnnnnnnnnnnnnnnnnnnnnnnnnnnnnnnnnnnnnnnnnnnnnnnnnnnnnnnnnnnnnnnnnnnnnnnnnnnnnnnnnnnnnnnnnnnnnnnnnnnnnnnnnnnnnnnnnnnnnnnnnnnnnnnnnnnnnnnnnnnnnnnnnnnnnnnnnnnnnnnnnnnnnnnnnnnnnnnnnnnnnnnnnnnnnnnnnnnnnnnnnnnnnnnnnnnnnnnnnnnnnnnnnnnnnnnnnnnnnnnnnnnnnnnnnnnnnnnnnnnnnnnnnnnnnnnnnnnnnnnnnnnnnnnnnnnnnnnnnnnnnnnnnnnnnnnnnnnnnnnnnnnnnnnnnnnnnnnnnnnnnnnnnnnnnnnnnnnnnnnnnnnnnnnnnnnnnnnnnnnnnnnnnnnnnnnnnnnnnnnnnnnnnnnnnnnnnnnnnnnnnnnnnnnnnnnnnnnnnnnnnnnnnnnnnnnnnnnnnnnnnnnnnnnnnnnnnnnnnnnnnnnnnnnnnnnnnnnnnnnnnnnnnnnnnnnnnnnnnnnnnnnnnnnnnnnnnnnnnnnnnnnnnnnnnnnnnnnnnnnnnnnnnnnnnnnnnnnnnnnnnnnnnnnnnnnnnnnnnnnnnnnnnnnnnnnnnnnnnnnnnnnnnnnnnnnnnnnnnnnnnnnnnnnnnnnnnnnnnnnnnnnnnnnnnnnnnnnnnnnnnnnnnnnnnnnnnnnnnnnnnnnnnnnnnnnnnnnnnnnnnnnnnnnnnnnnnnnnnnnnnnnnnnnnnnnnnnnnnnnnnnnnnnnnnnnnnnnnnnnnnnnnnnnnnnnnnnnnnnnnnnnnnnnnnnnnnnnnnnnnnnnnnnnnnnnnnnnnnnnnnnnnnnnnnnnnnnnnnnnnnnnnnnnnnnnnnnnnnnnnnnnnnnnnnnnnnnnnnnnnnnnnnnnnnnnnnnnnnnnnnnnnnnnnnnnnnnnnnnnnnnnnnnnnnnnnnnnnnnnnnnnnnnnnnnnnnnnnnnnnnnnnnnnnnnnnnnnnnnnnnnnnnnnnnnnnnnnnnnnnnnnnnnnnnnnnnnnnnnnnnnnnnnnnnnnnnnnnnnnnnnnnnnnnnnnnnnnnnnnnnnnnnnnnnnnnnnnnnnnnnnnnnnnnnnnnnnnnnnnnnnnnnnnnnnnnnnnnnnnnnnnnnnnnnnnnnnnnnnnnnnnnnnnnnnnnnnnnnnnnnnnnnnnnnnnnnnnnnnnnnnnnnnnnnnnnnnnnnnnnnnnnnnnnnnnnnnnnnnnnnnnnnnnnnnnnnnnnnnnnnnnnnnnnnnnnnnnnnnnnnnnnnnnnnnnnnnnnnnnnnnnnnnnnnnnnnnnnnnnnnnnnnnnnnnnnnnnnnnnnnnnnnnnnnnnnnnnnnnnnnnnnnnnnnnnnnnnnnnnnnnnnnnnnnnnnnnnnnnnnnnnnnnnnnnnnnnnnnnnnnnnnnnnnnnnnnnnnnnnnnnnnnnnnnnnnnnnnnnnnnnnnnnnnnnnnnnnnnnnnnnnnnnnnnnnnnnnnnnnnnnnnnnnnnnnnnnnnnnnnnnnnnnnnnnnnnnnnnnnnnnnnnnnnnnnnnnnnnnnnnnnnnnnnnnnnnnnnnnnnnnnnnnnnnnnnnnnnnnnnnnnnnnnnnnnnnnnnnnnnnnnnnnnnnnnnnnnnnnnnnnnnnnnnnnnnnnnnnnnnnnnnnnnnnnnnnnnnnnnnnnnnnnnnnnnnnnnnnnnnnnnnnnnnnnnnnnnnnnnnnnnnnnnnnnnnnnnnnnnnnnnnnnnnnnnnnnnnnnnnnnnnnnnnnnnnnnnnnnnnnnnnnnnnnnnnnnnnnnnnnnnnnnnnnnnnnnnnnnnnnnnnnnnnnnnnnnnnnnnnnnnnnnnnnnnnnnnnnnnnnnnnnnnnnnnnnnnnnnnnnnnnnnnnnnnnnnnnnnnnnnnnnnnnnnnnnnnnnnnnnnnnnnnnnnnnnnnnnnnnnnnnnnnnnnnnnnnnnnnnnnnnnnnnnnnnnnnnnnnnnnnnnnnnnnnnnnnnnnnnnnnnnnnnnnnnnnnnnnnnnnnnnnnnnnnnnnnnnnnnnnnnnnnnnnnnnnnnnnnnnnnnnnnnnnnnnnnnnnnnnnnnnnnnnnnnnnnnnnnnnnnnnnnnnnnnnnnnnnnnnnnnnnnnnnnnnnnnnnnnnnnnnnnnnnnnnnnnnnnnnnnnnnnnnnnnnnnnnnnnnnnnnnnnnnnnnnnnnnnnnnnnnnnnnnnnnnnnnnnnnnnnnnnnnnnnnnnnnnnnnnnnnnnnnnnnnnnnnnnnnnnnnnnnnnnnnnnnnnnnnnnnnnnnnnnnnnnnnnnnnnnnnnnnnnnnnnnnnnnnnnnnnnnnnnnnnnnnnnnnnnnnnnnnnnnnnnnnnnnnnnnnnnnnnnnnnnnnnnnnnnnnnnnnnnnnnnnnnnnnnnnnnnnnnnnnnnnnnnnnnnnnnnnnnnnnnnnnnnnnnnnnnnnnnnnnnnnnnnnnnnnnnnnnnnnnnnnnnnnnnnnnnnnnnnnnnnnnnnnnnnnnnnnnnnnnnnnnnnnnnnnnnnnnnnnnnnnnnnnnnnnnnnnnnnnnnnnnnnnnnnnnnnnnnnnnnnnnnnnnnnnnnnnnnnnnnnnnnnnnnnnnnnnnnnnnnnnnnnnnnnnnnnnnnnnnnnnnnnnnnnnnnnnnnnnnnnnnnnnnnnnnnnnnnnnnnnnnnnnnnnnnnnnnnnnnnnnnnnnnnnnnnnnnnnnnnnnnnnnnnnnnnnnnnnnnnnnnnnnnnnnnnnnnnnnnnnnnnnnnnnnnnnnnnnnnnnnnnnnnnnnnnnnnnnnnnnnnnnnnnnnnnnnnnnnnnnnnnnnnnnnnnnnnnnnnnnnnnnnnnnnnnnnnnnnnnnnnnnnnnnnnnnnnnnnnnnnnnnnnnnnnnnnnnnnnnnnnnnnnnnnnnnnnnnnnnnnnnnnnnnnnnnnnnnnnnnnnnnnnnnnnnnnnnnnnnnnnnnnnnnnnnnnnnnnnnnnnnnnnnnnnnnnnnnnnnnnnnnnnnnnnnnnnnnnnnnnnnnnnnnnnnnnnnnnnnnnnnnnnnnnnnnnnnnnnnnnnnnnnnnnnnnnnnnnnnnnnnnnnnnnnnnnnnnnnnnnnnnnnnnnnnnnnnnnnnnnnnnnnnnnnnnnnnnnnnnnnnnnnnnnnnnnnnnnnnnnnnnnnnnnnnnnnnnnnnnnnnnnnnnnnnnnnnnnnnnnnnnnnnnnnnnnnnnnnnnnnnnnnnnnnnnnnnnnnnnnnnnnnnnnnnnnnnnnnnnnnnnnnnnnnnnnnnnnnnnnnnnnnnnnnnnnnnnnnnnnnnnnnnnnnnnnnnnnnnnnnnnnnnnnnnnnnnnnnnnnnnnnnnnnnnnnnnnnnnnnnnnnnnnnnnnnnnnnnnnnnnnnnnnnnnnnnnnnnnnnnnnnnnnnnnnnnnnnnnnnnnnnnnnnnnnnnnnnnnnnnnnnnnnnnnnnnnnnnnnnnnnnnnnnnnnnnnnnnnnnnnnnnnnnnnnnnnnnnnnnnnnnnnnnnnnnnnnnnnnnnnnnnnnnnnnnnnnnnnnnnnnnnnnnnnnnnnnnnnnnnnnnnnnnnnnnnnnnnnnnnnnnnnnnnnnnnnnnnnnnnnnnnnnnnnnnnnnnnnnnnnnnnnnnnnnnnnnnnnnnnnnnnnnnnnnnnnnnnnnnnnnnnnnnnnnnnnnnnnnnnnnnnnnnnnnnnnnnnnnnnnnnnnnnnnnnnnnnnnnnnnnnnnnnnnnnnnnnnnnnnnnnnnnnnnnnnnnnnnnnnnnnnnnnnnnnnnnnnnnnnnnnnnnnnnnnnnnnnnnnnnnnnnnnnnnnnnnnnnnnnnnnnnnnnnnnnnnnnnnnnnnnnnnnnnnnnnnnnnnnnnnnnnnnnnnnnnnnnnnnnnnnnnnnnnnnnnnnnnnnnnnnnnnnnnnnnnnnnnnnnnnnnnnnnnnnnnnnnnnnnnnnnnnnnnnnnnnnnnnnnnnnnnnnnnnnnnnnnnnnnnnnnnnnnnnnnnnnnnnnnnnnnnnnnnnnnnnnnnnnnnnnnnnnnnnnnnnnnnnnnnnnnnnnnnnnnnnnnnnnnnnnnnnnnnnnnnnnnnnnnnnnnnnnnnnnnnnnnnnnnnnnnnnnnnnnnnnnnnnnnnnnnnnnnnnnnnnnnnnnnnnnnnnnnnnnnnnnnnnnnnnnnnnnnnnnnnnnnnnnnnnnnnnnnnnnnnnnnnnnnnnnnnnnnnnnnnnnnnnnnnnnnnnnnnnnnnnnnnnnnnnnnnnnnnnnnnnnnnnnnnnnnnnnnnnnnnnnnnnnnnnnnnnnnnnnnnnnnnnnnnnnnnnnnnnnnnnnnnnnnnnnnnnnnnnnnnnnnnnnnnnnnnnnnnnnnnnnnnnnnnnnnnnnnnnnnnnnnnnnnnnnnnnnnnnnnnnnnnnnnnnnnnnnnnnnnnnnnnnnnnnnnnnnnnnnnnnnnnnnnnnnnnnnnnnnnnnnnnnnnnnnnnnnnnnnnnnnnnnnnnnnnnnnnnnnnnnnnnnnnnnnnnnnnnnnnnnnnnnnnnnnnnnnnnnnnnnnnnnnnnnnnnnnnnnnnnnnnnnnnnnnnnnnnnnnnnnnnnnnnnnnnnnnnnnnnnnnnnnnnnnnnnnnnnnnnnnnnnnnnnnnnnnnnnnnnnnnnnnnnnnnnnnnnnnnnnnnnnnnnnnnnnnnnnnnnnnnnnnnnnnnnnnnnnnnnnnnnnnnnnnnnnnnnnnnnnnnnnnnnnnnnnnnnnnnnnnnnnnnnnnnnnnnnnnnnnnnnnnnnnnnnnnnnnnnnnnnnnnnnnnnnnnnnnnnnnnnnnnnnnnnnnnnnnnnnnnnnnnnnnnnnnnnnnnnnnnnnnnnnnnnnnnnnnnnnnnnnnnnnnnnnnnnnnnnnnnnnnnnnnnnnnnnnnnnnnnnnnnnnnnnnnnnnnnnnnnnnnnnnnnnnnnnnnnnnnnnnnnnnnnnnnnnnnnnnnnnnnnnnnnnnnnnnnnnnnnnnnnnnnnnnnnnnnnnnnnnnnnnnnnnnnnnnnnnnnnnnnnnnnnnnnnnnnnnnnnnnnnnnnnnnnnnnnnnnnnnnnnnnnnnnnnnnnnnnnnnnnnnnnnnnnnnnnnnnnnnnnnnnnnnnnnnnnnnnnnnnnnnnnnnnnnnnnnnnnnnnnnnnnnnnnnnnnnnnnnnnnnnnnnnnnnnnnnnnnnnnnnnnnnnnnnnnnnnnnnnnnnnnnnnnnnnnnnnnnnnnnnnnnnnnnnnnnnnnnnnnnnnnnnnnnnnnnnnnnnnnnnnnnnnnnnnnnnnnnnnnnnnnnnnnnnnnnnnnnnnnnnnnnnnnnnnnnnnnnnnnnnnnnnnnnnnnnnnnnnnnnnnnnnnnnnnnnnnnnnnnnnnnnnnnnnnnnnnnnnnnnnnnnnnnnnnnnnnnnnnnnnnnnnnnnnnnnnnnnnnnnnnnnnnnnnnnnnnnnnnnnnnnnnnnnnnnnnnnnnnnnnnnnnnnnnnnnnnnnnnnnnnnnnnnnnnnnnnnnnnnnnnnnnnnnnnnnnnnnnnnnnnnnnnnnnnnnnnnnnnnnnnnnnnnnnnnnnnnnnnnnnnnnnnnnnnnnnnnnnnnnnnnnnnnnnnnnnnnnnnnnnnnnnnnnnnnnnnnnnnnnnnnnnnnnnnnnnnnnnnnnnnnnnnnnnnnnnnnnnnnnnnnnnnnnnnnnnnnnnnnnnnnnnnnnnnnnnnnnnnnnnnnnnnnnnnnnnnnnnnnnnnnnnnnnnnnnnnnnnnnnnnnnnnnnnnnnnnnnnnnnnnnnnnnnnnnnnnnnnnnnnnnnnnnnnnnnnnnnnnnnnnnnnnnnnnnnnnnnnnnnnnnnnnnnnnnnnnnnnnnnnnnnnnnnnnnnnnnnnnnnnnnnnnnnnnnnnnnnnnnnnnnnnnnnnnnnnnnnnnnnnnnnnnnnnnnnnnnnnnnnnnnnnnnnnnnnnnnnnnnnnnnnnnnnnnnnnnnnnnnnnnnnnnnnnnnnnnnnnnnnnnnnnnnnnnnnnnnnnnnnnnnnnnnnnnnnnnnnnnnnnnnnnnnnnnnnnnnnnnnnnnnnnnnnnnnnnnnnnnnnnnnnnnnnnnnnnnnnnnnnnnnnnnnnnnnnnnnnnnnnnnnnnnnnnnnnnnnnnnnnnnnnnnnnnnnnnnnnnnnnnnnnnnnnnnnnnnnnnnnnnnnnnnnnnnnnnnnnnnnnnnnnnnnnnnnnnnnnnnnnnnnnnnnnnnnnnnnnnnnnnnnnnnnnnnnnnnnnnnnnnnnnnnnnnnnnnnnnnnnnnnnnnnnnnnnnnnnnnnnnnnnnnnnnnnnnnnnnnnnnnnnnnnnnnnnnnnnnnnnnnnnnnnnnnnnnnnnnnnnnnnnnnnnnnnnnnnnnnnnnnnnnnnnnnnnnnnnnnnnnnnnnnnnnnnnnnnnnnnnnnnnnnnnnnnnnnnnnnnnnnnnnnnnnnnnnnnnnnnnnnnnnnnnnnnnnnnnnnnnnnnnnnnnnnnnnnnnnnnnnnnnnnnnnnnnnnnnnnnnnnnnnnnnnnnnnnnnnnnnnnnnnnnnnnnnnnnnnnnnnnnnnnnnnnnnnnnnnnnnnnnnnnnnnnnnnnnnnnnnnnnnnnnnnnnnnnnnnnnnnnnnnnnnnnnnnnnnnnnnnnnnnnnnnnnnnnnnnnnnnnnnnnnnnnnnnnnnnnnnnnnnnnnnnnnnnnnnnnnnnnnnnnnnnnnnnnnnnnnnnnnnnnnnnnnnnnnnnnnnnnnnnnnnnnnnnnnnnnnnnnnnnnnnnnnnnnnnnnnnnnnnnnnnnnnnnnnnnnnnnnnnnnnnnnnnnnnnnnnnnnnnnnnnnnnnnnnnnnnnnnnnnnnnnnnnnnnnnnnnnnnnnnnnnnnnnnnnnnnnnnnnnnnnnnnnnnnnnnnnnnnnnnnnnnnnnnnnnnnnnnnnnnnnnnnnnnnnnnnnnnnnnnnnnnnnnnnnnnnnnnnnnnnnnnnnnnnnnnnnnnnnnnnnnnnnnnnnnnnnnnnnnnnnnnnnnnnnnnnnnnnnnnnnnnnnnnnnnnnnnnnnnnnnnnnnnnnnnnnnnnnnnnnnnnnnnnnnnnnnnnnnnnnnnnnnnnnnnnnnnnnnnnnnnnnnnnnnnnnnnnnnnnnnnnnnnnnnnnnnnnnnnnnnnnnnnnnnnnnnnnnnnnnnnnnnnnnnnnnnnnnnnnnnnnnnnnnnnnnnnnnnnnnnnnnnnnnnnnnnnnnnnnnnnnnnnnnnnnnnnnnnnnnnnnnnnnnnnnnnnnnnnnnnnnnnnnnnnnnnnnnnnnnnnnnnnnnnnnnnnnnnnnnnnnnnnnnnnnnnnnnnnnnnnnnnnnnnnnnnnnnnnnnnnnnnnnnnnnnnnnnnnnnnnnnnnnnnnnnnnnnnnnnnnnnnnnnnnnnnnnnnnnnnnnnnnnnnnnnnnnnnnnnnnnnnnnnnnnnnnnnnnnnnnnnnnnnnnnnnnnnnnnnnnnnnnnnnnnnnnnnnnnnnnnnnnnnnnnnnnnnnnnnnnnnnnnnnnnnnnnnnnnnnnnnnnnnnnnnnnnnnnnnnnnnnnnnnnnnnnnnnnnnnnnnnnnnnnnnnnnnnnnnnnnnnnnnnnnnnnnnnnnnnnnnnnnnnnnnnnnnnnnnnnnnnnnnnnnnnnnnnnnnnnnnnnnnnnnnnnnnnnnnnnnnnnnnnnnnnnnnnnnnnnnnnnnnnnnnnnnnnnnnnnnnnnnnnnnnnnnnnnnnnnnnnnnnnnnnnnnnnnnnnnnnnnnnnnnnnnnnnnnnnnnnnnnnnnnnnnnnnnnnnnnnnnnnnnnnnnnnnnnnnnnnnnnnnnnnnnnnnnnnnnnnnnnnnnnnnnnnnnnnnnnnnnnnnnnnnnnnnnnnnnnnnnnnnnnnnnnnnnnnnnnnnnnnnnnnnnnnnnnnnnnnnnnnnnnnnnnnnnnnnnnnnnnnnnnnnnnnnnnnnnnnnnnnnnnnnnnnnnnnnnnnnnnnnnnnnnnnnnnnnnnnnnnnnnnnnnnnnnnnnnnnnnnnnnnnnnnnnnnnnnnnnnnnnnnnnnnnnnnnnnnnnnnnnnnnnnnnnnnnnnnnnnnnnnnnnnnnnnnnnnnnnnnnnnnnnnnnnnnnnnnnnnnnnnnnnnnnnnnnnnnnnnnnnnnnnnnnnnnnnnnnnnnnnnnnnnnnnnnnnnnnnnnnnnnnnnnnnnnnnnnnnnnnnnnnnnnnnnnnnnnnnnnnnnnnnnnnnnnnnnnnnnnnnnnnnnnnnnnnnnnnnnnnnnnnnnnnnnnnnnnnnnnnnnnnnnnnnnnnnnnnnnnnnnnnnnnnnnnnnnnnnnnnnnnnnnnnnnnnnnnnnnnnnnnnnnnnnnnnnnnnnnnnnnnnnnnnnnnnnnnnnnnnnnnnnnnnnnnnnnnnnnnnnnnnnnnnnnnnnnnnnnnnnnnnnnnnnnnnnnnnnnnnnnnnnnnnnnnnnnnnnnnnnnnnnnnnnnnnnnnnnnnnnnnnnnnnnnnnnnnnnnnnnnnnnnnnnnnnnnnnnnnnnnnnnnnnnnnnnnnnnnnnnnnnnnnnnnnnnnnnnnnnnnnnnnnnnnnnnnnnnnnnnnnnnnnnnnnnnnnnnnnnnnnnnnnnnnnnnnnnnnnnnnnnnnnnnnnnnnnnnnnnnnnnnnnnnnnnnnnnnnnnnnnnnnnnnnnnnnnnnnnnnnnnnnnnnnnnnnnnnnnnnnnnnnnnnnnnnnnnnnnnnnnnnnnnnnnnnnnnnnnnnnnnnnnnnnnnnnnnnnnnnnnnnnnnnnnnnnnnnnnnnnnnnnnnnnnnnnnnnnnnnnnnnnnnnnnnnnnnnnnnnnnnnnnnnnnnnnnnnnnnnnnnnnnnnnnnnnnnnnnnnnnnnnnnnnnnnnnnnnnnnnnnnnnnnnnnnnnnnnnnnnnnnnnnnnnnnnnnnnnnnnnnnnnnnnnnnnnnnnnnnnnnnnnnnnnnnnnnnnnnnnnnnnnnnnnnnnnnnnnnnnnnnnnnnnnnnnnnnnnnnnnnnnnnnnnnnnnnnnnnnnnnnnnnnnnnnnnnnnnnnnnnnnnnnnnnnnnnnnnnnnnnnnnnnnnnnnnnnnnnnnnnnnnnnnnnnnnnnnnnnnnnnnnnnnnnnnnnnnnnnnnnnnnnnnnnnnnnnnnnnnnnnnnnnnnnnnnnnnnnnnnnnnnnnnnnnnnnnnnnnnnnnnnnnnnnnnnnnnnnnnnnnnnnnnnnnnnnnnnnnnnnnnnnnnnnnnnnnnnnnnnnnnnnnnnnnnnnnnnnnnnnnnnnnnnnnnnnnnnnnnnnnnnnnnnnnnnnnnnnnnnnnnnnnnnnnnnnnnnnnnnnnnnnnnnnnnnnnnnnnnnnnnnnnnnnnnnnnnnnnnnnnnnnnnnnnnnnnnnnnnnnnnnnnnnnnnnnnnnnnnnnnnnnnnnnnnnnnnnnnnnnnnnnnnnnnnnnnnnnnnnnnnnnnnnnnnnnnnnnnnnnnnnnnnnnnnnnnnnnnnnnnnnnnnnnnnnnnnnnnnnnnnnnnnnnnnnnnnnnnnnnnnnnnnnnnnnnnnnnnnnnnnnnnnnnnnnnnnnnnnnnnnnnnnnnnnnnnnnnnnnnnnnnnnnnnnnnnnnnnnnnnnnnnnnnnnnnnnnnnnnnnnnnnnnnnnnnnnnnnnnnnnnnnnnnnnnnnnnnnnnnnnnnnnnnnnnnnnnnnnnnnnnnnnnnnnnnnnnnnnnnnnnnnnnnnnnnnnnnnnnnnnnnnnnnnnnnnnnnnnnnnnnnnnnnnnnnnnnnnnnnnnnnnnnnnnnnnnnnnnnnnnnnnnnnnnnnnnnnnnnnnnnnnnnnnnnnnnnnnnnnnnnnnnnnnnnnnnnnnnnnnnnnnnnnnnnnnnnnnnnnnnnnnnnnnnnnnnnnnnnnnnnnnnnnnnnnnnnnnnnnnnnnnnnnnnnnnnnnnnnnnnnnnnnnnnnnnnnnnnnnnnnnnnnnnnnnnnnnnnnnnnnnnnnnnnnnnnnnnnnnnnnnnnnnnnnnnnnnnnnnnnnnnnnnnnnnnnnnnnnnnnnnnnnnnnnnnnnnnnnnnnnnnnnnnnnnnnnnnnnnnnnnnnnnnnnnnnnnnnnnnnnnnnnnnnnnnnnnnnnnnnnnnnnnnnnnnnnnnnnnnnnnnnnnnnnnnnnnnnnnnnnnnnnnnnnnnnnnnnnnnnnnnnnnnnnnnnnnnnnnnnnnnnnnnnnnnnnnnnnnnnnnnnnnnnnnnnnnnnnnnnnnnnnnnnnnnnnnnnnnnnnnnnnnnnnnnnnnnnnnnnnnnnnnnnnnnnnnnnnnnnnnnnnnnnnnnnnnnnnnnnnnnnnnnnnnnnnnnnnnnnnnnnnnnnnnnnnnnnnnnnnnnnnnnnnnnnnnnnnnnnnnnnnnnnnnnnnnnnnnnnnnnnnnnnnnnnnnnnnnnnnnnnnnnnnnnnnnnnnnnnnnnnnnnnnnnnnnnnnnnnnnnnnnnnnnnnnnnnnnnnnnnnnnnnnnnnnnnnnnnnnnnnnnnnnnnnnnnnnnnnnnnnnnnnnnnnnnnnnnnnnnnnnnnnnnnnnnnnnnnnnnnnnnnnnnnnnnnnnnnnnnnnnnnnnnnnnnnnnnnnnnnnnnnnnnnnnnnnnnnnnnnnnnnnnnnnnnnnnnnnnnnnnnnnnnnnnnnnnnnnnnnnnnnnnnnnnnnnnnnnnnnnnnnnnnnnnnnnnnnnnnnnnnnnnnnnnnnnnnnnnnnnnnnnnnnnnnnnnnnnnnnnnnnnnnnnnnnnnnnnnnnnnnnnnnnnnnnnnnnnnnnnnnnnnnnnnnnnnnnnnnnnnnnnnnnnnnnnnnnnnnnnnnnnnnnnnnnnnnnnnnnnnnnnnnnnnnnnnnnnnnnnnnnnnnnnnnnnnnnnnnnnnnnnnnnnnnnnnnnnnnnnnnnnnnnnnnnnnnnnnnnnnnnnnnnnnnnnnnnnnnnnnnnnnnnnnnnnnnnnnnnnnnnnnnnnnnnnnnnnnnnnnnnnnnnnnnnnnnnnnnnnnnnnnnnnnnnnnnnnnnnnnnnnnnnnnnnnnnnnnnnnnnnnnnnnnnnnnnnnnnnnnnnnnnnnnnnnnnnnnnnnnnnnnnnnnnnnnnnnnnnnnnnnnnnnnnnnnnnnnnnnnnnnnnnnnnnnnnnnnnnnnnnnnnnnnnnnnnnnnnnnnnnnnnnnnnnnnnnnnnnnnnnnnnnnnnnnnnnnnnnnnnnnnnnnnnnnnnnnnnnnnnnnnnnnnnnnnnnnnnnnnnnnnnnnnnnnnnnnnnnnnnnnnnnnnnnnnnnnnnnnnnnnnnnnnnnnnnnnnnnnnnnnnnnnnnnnnnnnnnnnnnnnnnnnnnnnnnnnnnnnnnnnnnnnnnnnnnnnnnnnnnnnnnnnnnnnnnnnnnnnnnnnnnnnnnnnnnnnnnnnnnnnnnnnnnnnnnnnnnnnnnnnnnnnnnnnnnnnnnnnnnnnnnnnnnnnnnnnnnnnnnnnnnnnnnnnnnnnnnnnnnnnnnnnnnnnnnnnnnnnnnnnnnnnnnnnnnnnnnnnnnnnnnnnnnnnnnnnnnnnnnnnnnnnnnnnnnnnnnnnnnnnnnnnnnnnnnnnnnnnnnnnnnnnnnnnnnnnnnnnnnnnnnnnnnnnnnnnnnnnnnnnnnnnnnnnnnnnnnnnnnnnnnnnnnnnnnnnnnnnnnnnnnnnnnnnnnnnnnnnnnnnnnnnnnnnnnnnnnnnnnnnnnnnnnnnnnnnnnnnnnnnnnnnnnnnnnnnnnnnnnnnnnnnnnnnnnnnnnnnnnnnnnnnnnnnnnnnnnnnnnnnnnnnnnnnnnnnnnnnnnnnnnnnnnnnnnnnnnnnnnnnnnnnnnnnnnnnnnnnnnnnnnnnnnnnnnnnnnnnnnnnnnnnnnnnnnnnnnnnnnnnnnnnnnnnnnnnnnnnnnnnnnnnnnnnnnnnnnnnnnnnnnnnnnnnnnnnnnnnnnnnnnnnnnnnnnnnnnnnnnnnnnnnnnnnnnnnnnnnnnnnnnnnnnnnnnnnnnnnnnnnnnnnnnnnnnnnnnnnnnnnnnnnnnnnnnnnnnnnnnnnnnnnnnnnnnnnnnnnnnnnnnnnnnnnnnnnnnnnnnnnnnnnnnnnnnnnnnnnnnnnnnnnnnnnnnnnnnnnnnnnnnnnnnnnnnnnnnnnnnnnnnnnnnnnnnnnnnnnnnnnnnnnnnnnnnnnnnnnnnnnnnnnnnnnnnnnnnnnnnnnnnnnnnnnnnnnnnnnnnnnnnnnnnnnnnnnnnnnnnnnnnnnnnnnnnnnnnnnnnnnnnnnnnnnnnnnnnnnnnnnnnnnnnnnnnnnnnnnnnnnnnnnnnnnnnnnnnnnnnnnnnnnnnnnnnnnnnnnnnnnnnnnnnnnnnnnnnnnnnnnnnnnnnnnnnnnnnnnnnnnnnnnnnnnnnnnnnnnnnnnnnnnnnnnnnnnnnnnnnnnnnnnnnnnnnnnnnnnnnnnnnnnnnnnnnnnnnnnnnnnnnnnnnnnnnnnnnnnnnnnnnnnnnnnnnnnnnnnnnnnnnnnnnnnnnnnnnnnnnnnnnnnnnnnnnnnnnnnnnnnnnnnnnnnnnnnnnnnnnnnnnnnnnnnnnnnnnnnnnnnnnnnnnnnnnnnnnnnnnnnnnnnnnnnnnnnnnnnnnnnnnnnnnnnnnnnnnnnnnnnnnnnnnnnnnnnnnnnnnnnnnnnnnnnnnnnnnnnnnnnnnnnnnnnnnnnnnnnnnnnnnnnnnnnnnnnnnnnnnnnnnnnnnnnnnnnnnnnnnnnnnnnnnnnnnnnnnnnnnnnnnnnnnnnnnnnnnnnnnnnnnnnnnnnnnnnnnnnnnnnnnnnnnnnnnnnnnnnnnnnnnnnnnnnnnnnnnnnnnnnnnnnnnnnnnnnnnnnnnnnnnnnnnnnnnnnnnnnnnnnnnnnnnnnnnnnnnnnnnnnnnnnnnnnnnnnnnnnnnnnnnnnnnnnnnnnnnnnnnnnnnnnnnnnnnnnnnnnnnnnnnnnnnnnnnnnnnnnnnnnnnnnnnnnnnnnnnnnnnnnnnnnnnnnnnnnnnnnnnnnnnnnnnnnnnnnnnnnnnnnnnnnnnnnnnnnnnnnnnnnnnnnnnnnnnnnnnnnnnnnnnnnnnnnnnnnnnnnnnnnnnnnnnnnnnnnnnnnnnnnnnnnnnnnnnnnnnnnnnnnnnnnnnnnnnnnnnnnnnnnnnnnnnnnnnnnnnnnnnnnnnnnnnnnnnnnnnnnnnnnnnnnnnnnnnnnnnnnnnnnnnnnnnnnnnnnnnnnnnnnnnnnnnnnnnnnnnnnnnnnnnnnnnnnnnnnnnnnnnnnnnnnnnnnnnnnnnnnnnnnnnnnnnnnnnnnnnnnnnnnnnnnnnnnnnnnnnnnnnnnnnnnnnnnnnnnnnnnnnnnnnnnnnnnnnnnnnnnnnnnnnnnnnnnnnnnnnnnnnnnnnnnnnnnnnnnnnnnnnnnnnnnnnnnnnnnnnnnnnnnnnnnnnnnnnnnnnnnnnnnnnnnnnnnnnnnnnnnnnnnnnnnnnnnnnnnnnnnnnnnnnnnnnnnnnnnnnnnnnnnnnnnnnnnnnnnnnnnnnnnnnnnnnnnnnnnnnnnnnnnnnnnnnnnnnnnnnnnnnnnnnnnnnnnnnnnnnnnnnnnnnnnnnnnnnnnnnnnnnnnnnnnnnnnnnnnnnnnnnnnnnnnnnnnnnnnnnnnnnnnnnnnnnnnnnnnnnnnnnnnnnnnnnnnnnnnnnnnnnnnnnnnnnnnnnnnnnnnnnnnnnnnnnnnnnnnnnnnnnnnnnnnnnnnnnnnnnnnnnnnnnnnnnnnnnnnnnnnnnnnnnnnnnnnnnnnnnnnnnnnnnnnnnnnnnnnnnnnnnnnnnnnnnnnnnnnnnnnnnnnnnnnnnnnnnnnnnnnnnnnnnnnnnnnnnnnnnnnnnnnnnnnnnnnnnnnnnnnnnnnnnnnnnnnnnnnnnnnnnnnnnnnnnnnnnnnnnnnnnnnnnnnnnnnnnnnnnnnnnnnnnnnnnnnnnnnnnnnnnnnnnnnnnnnnnnnnnnnnnnnnnnnnnnnnnnnnnnnnnnnnnnnnnnnnnnnnnnnnnnnnnnnnnnnnnnnnnnnnnnnnnnnnnnnnnnnnnnnnnnnnnnnnnnnnnnnnnnnnnnnnnnnnnnnnnnnnnnnnnnnnnnnnnnnnnnnnnnnnnnnnnnnnnnnnnnnnnnnnnnnnnnnnnnnnnnnnnnnnnnnnnnnnnnnnnnnnnnnnnnnnnnnnnnnnnnnnnnnnnnnnnnnnnnnnnnnnnnnnnnnnnnnnnnnnnnnnnnnnnnnnnnnnnnnnnnnnnnnnnnnnnnnnnnnnnnnnnnnnnnnnnnnnnnnnnnnnnnnnnnnnnnnnnnnnnnnnnnnnnnnnnnnnnnnnnnnnnnnnnnnnnnnnnnnnnnnnnnnnnnnnnnnnnnnnnnnnnnnnnnnnnnnnnnnnnnnnnnnnnnnnnnnnnnnnnnnnnnnnnnnnnnnnnnnnnnnnnnnnnnnnnnnnnnnnnnnnnnnnnnnnnnnnnnnnnnnnnnnnnnnnnnnnnnnnnnnnnnnnnnnnnnnnnnnnnnnnnnnnnnnnnnnnnnnnnnnnnnnnnnnnnnnnnnnnnnnnnnnnnnnnnnnnnnnnnnnnnnnnnnnnnnnnnnnnnnnnnnnnnnnnnnnnnnnnnnnnnnnnnnnnnnnnnnnnnnnnnnnnnnnnnnnnnnnnnnnnnnnnnnnnnnnnnnnnnnnnnnnnnnnnnnnnnnnnnnnnnnnnnnnnnnnnnnnnnnnnnnnnnnnnnnnnnnnnnnnnnnnnnnnnnnnnnnnnnnnnnnnnnnnnnnnnnnnnnnnnnnnnnnnnnnnnnnnnnnnnnnnnnnnnnnnnnnnnnnnnnnnnnnnnnnnnnnnnnnnnnnnnnnnnnnnnnnnnnnnnnnnnnnnnnnnnnnnnnnnnnnnnnnnnnnnnnnnnnnnnnnnnnnnnnnnnnnnnnnnnnnnnnnnnnnnnnnnnnnnnnnnnnnnnnnnnnnnnnnnnnnnnnnnnnnnnnnnnnnnnnnnnnnnnnnnnnnnnnnnnnnnnnnnnnnnnnnnnnnnnnnnnnnnnnnnnnnnnnnnnnnnnnnnnnnnnnnnnnnnnnnnnnnnnnnnnnnnnnnnnnnnnnnnnnnnnnnnnnnnnnnnnnnnnnnnnnnnnnnnnnnnnnnnnnnnnnnnnnnnnnnnnnnnnnnnnnnnnnnnnnnnnnnnnnnnnnnnnnnnnnnnnnnnnnnnnnnnnnnnnnnnnnnnnnnnnnnnnnnnnnnnnnnnnnnnnnnnnnnnnnnnnnnnnnnnnnnnnnnnnnnnnnnnnnnnnnnnnnnnnnnnnnnnnnnnnnnnnnnnnnnnnnnnnnnnnnnnnnnnnnnnnnnnnnnnnnnnnnnnnnnnnnnnnnnnnnnnnnnnnnnnnnnnnnnnnnnnnnnnnnnnnnnnnnnnnnnnnnnnnnnnnnnnnnnnnnnnnnnnnnnnnnnnnnnnnnnnnnnnnnnnnnnnnnnnnnnnnnnnnnnnnnnnnnnnnnnnnnnnnnnnnnnnnnnnnnnnnnnnnnnnnnnnnnnnnnnnnnnnnnnnnnnnnnnnnnnnnnnnnnnnnnnnnnnnnnnnnnnnnnnnnnnnnnnnnnnnnnnnnnnnnnnnnnnnnnnnnnnnnnnnnnnnnnnnnnnnnnnnnnnnnnnnnnnnnnnnnnnnnnnnnnnnnnnnnnnnnnnnnnnnnnnnnnnnnnnnnnnnnnnnnnnnnnnnnnnnnnnnnnnnnnnnnnnnnnnnnnnnnnnnnnnnnnnnnnnnnnnnnnnnnnnnnnnnnnnnnnnnnnnnnnnnnnnnnnnnnnnnnnnnnnnnnnnnnnnnnnnnnnnnnnnnnnnnnnnnnnnnnnnnnnnnnnnnnnnnnnnnnnnnnnnnnnnnnnnnnnnnnnnnnnnnnnnnnnnnnnnnnnnnnnnnnnnnnnnnnnnnnnnnnnnnnnnnnnnnnnnnnnnnnnnnnnnnnnnnnnnnnnnnnnnnnnnnnnnnnnnnnnnnnnnnnnnnnnnnnnnnnnnnnnnnnnnnnnnnnnnnnnnnnnnnnnnnnnnnnnnnnnnnnnnnnnnnnnnnnnnnnnnnnnnnnnnnnnnnnnnnnnnnnnnnnnnnnnnnnnnnnnnnnnnnnnnnnnnnnnnnnnnnnnnnnnnnnnnnnnnnnnnnnnnnnnnnnnnnnnnnnnnnnnnnnnnnnnnnnnnnnnnnnnnnnnnnnnnnnnnnnnnnnnnnnnnnnnnnnnnnnnnnnnnnnnnnnnnnnnnnnnnnnnnnnnnnnnnnnnnnnnnnnnnnnnnnnnnnnnnnnnnnnnnnnnnnnnnnnnnnnnnnnnnnnnnnnnnnnnnnnnnnnnnnnnnnnnnnnnnnnnnnnnnnnnnnnnnnnnnnnnnnnnnnnnnnnnnnnnnnnnnnnnnnnnnnnnnnnnnnnnnnnnnnnnnnnnnnnnnnnnnnnnnnnnnnnnnnnnnnnnnnnnnnnnnnnnnnnnnnnnnnnnnnnnnnnnnnnnnnnnnnnnnnnnnnnnnnnnnnnnnnnnnnnnnnnnnnnnnnnnnnnnnnnnnnnnnnnnnnnnnnnnnnnnnnnnnnnnnnnnnnnnnnnnnnnnnnnnnnnnnnnnnnnnnnnnnnnnnnnnnnnnnnnnnnnnnnnnnnnnnnnnnnnnnnnnnnnnnnnnnnnnnnnnnnnnnnnnnnnnnnnnnnnnnnnnnnnnnnnnnnnnnnnnnnnnnnnnnnnnnnnnnnnnnnnnnnnnnnnnnnnnnnnnnnnnnnnnnnnnnnnnnnnnnnnnnnnnnnnnnnnnnnnnnnnnnnnnnnnnnnnnnnnnnnnnnnnnnnnnnnnnnnnnnnnnnnnnnnnnnnnnnnnnnnnnnnnnnnnnnnnnnnnnnnnnnnnnnnnnnnnnnnnnnnnnnnnnnnnnnnnnnnnnnnnnnnnnnnnnnnnnnnnnnnnnnnnnnnnnnnnnnnnnnnnnnnnnnnnnnnnnnnnnnnnnnnnnnnnnnnnnnnnnnnnnnnnnnnnnnnnnnnnnnnnnnnnnnnnnnnnnnnnnnnnnnnnnnnnnnnnnnnnnnnnnnnnnnnnnnnnnnnnnnnnnnnnnnnnnnnnnnnnnnnnnnnnnnnnnnnnnnnnnnnnnnnnnnnnnnnnnnnnnnnnnnnnnnnnnnnnnnnnnnnnnnnnnnnnnnnnnnnnnnnnnnnnnnnnnnnnnnnnnnnnnnnnnnnnnnnnnnnnnnnnnnnnnnnnnnnnnnnnnnnnnnnnnnnnnnnnnnnnnnnnnnnnnnnnnnnnnnnnnnnnnnnnnnnnnnnnnnnnnnnnnnnnnnnnnnnnnnnnnnnnnnnnnnnnnnnnnnnnnnnnnnnnnnnnnnnnnnnnnnnnnnnnnnnnnnnnnnnnnnnnnnnnnnnnnnnnnnnnnnnnnnnnnnnnnnnnnnnnnnnnnnnnnnnnnnnnnnnnnnnnnnnnnnnnnnnnnnnnnnnnnnnnnnnnnnnnnnnnnnnnnnnnnnnnnnnnnnnnnnnnnnnnnnnnnnnnnnnnnnnnnnnnnnnnnnnnnnnnnnnnnnnnnnnnnnnnnnnnnnnnnnnnnnnnnnnnnnnnnnnnnnnnnnnnnnnnnnnnnnnnnnnnnnnnnnnnnnnnnnnnnnnnnnnnnnnnnnnnnnnnnnnnnnnnnnnnnnnnnnnnnnnnnnnnnnnnnnnnnnnnnnnnnnnnnnnnnnnnnnnnnnnnnnnnnnnnnnnnnnnnnnnnnnnnnnnnnnnnnnnnnnnnnnnnnnnnnnnnnnnnnnnnnnnnnnnnnnnnnnnnnnnnnnnnnnnnnnnnnnnnnnnnnnnnnnnnnnnnnnnnnnnnnnnnnnnnnnnnnnnnnnnnnnnnnnnnnnnnnnnnnnnnnnnnnnnnnnnnnnnnnnnnnnnnnnnnnnnnnnnnnnnnnnnnnnnnnnnnnnnnnnnnnnnnnnnnnnnnnnnnnnnnnnnnnnnnnnnnnnnnnnnnnnnnnnnnnnnnnnnnnnnnnnnnnnnnnnnnnnnnnnnnnnnnnnnnnnnnnnnnnnnnnnnnnnnnnnnnnnnnnnnnnnnnnnnnnnnnnnnnnnnnnnnnnnnnnnnnnnnnnnnnnnnnnnnnnnnnnnnnnnnnnnnnnnnnnnnnnnnnnnnnnnnnnnnnnnnnnnnnnnnnnnnnnnnnnnnnnnnnnnnnnnnnnnnnnnnnnnnnnnnnnnnnnnnnnnnnnnnnnnnnnnnnnnnnnnnnnnnnnnnnnnnnnnnnnnnnnnnnnnnnnnnnnnnnnnnnnnnnnnnnnnnnnnnnnnnnnnnnnnnnnnnnnnnnnnnnnnnnnnnnnnnnnnnnnnnnnnnnnnnnnnnnnnnnnnnnnnnnnnnnnnnnnnnnnnnnnnnnnnnnnnnnnnnnnnnnnnnnnnnnnnnnnnnnnnnnnnnnnnnnnnnnnnnnnnnnnnnnnnnnnnnnnnnnnnnnnnnnnnnnnnnnnnnnnnnnnnnnnnnnnnnnnnnnnnnnnnnnnnnnnnnnnnnnnnnnnnnnnnnnnnnnnnnnnnnnnnnnnnnnnnnnnnnnnnnnnnnnnnnnnnnnnnnnnnnnnnnnnnnnnnnnnnnnnnnnnnnnnnnnnnnnnnnnnnnnnnnnnnnnnnnnnnnnnnnnnnnnnnnnnnnnnnnnnnnnnnnnnnnnnnnnnnnnnnnnnnnnnnnnnnnnnnnnnnnnnnnnnnnnnnnnnnnnnnnnnnnnnnnnnnnnnnnnnnnnnnnnnnnnnnnnnnnnnnnnnnnnnnnnnnnnnnnnnnnnnnnnnnnnnnnnnnnnnnnnnnnnnnnnnnnnnnnnnnnnnnnnnnnnnnnnnnnnnnnnnnnnnnnnnnnnnnnnnnnnnnnnnnnnnnnnnnnnnnnnnnnnnnnnnnnnnnnnnnnnnnnnnnnnnnnnnnnnnnnnnnnnnnnnnnnnnnnnnnnnnnnnnnnnnnnnnnnnnnnnnnnnnnnnnnnnnnnnnnnnnnnnnnnnnnnnnnnnnnnnnnnnnnnnnnnnnnnnnnnnnnnnnnnnnnnnnnnnnnnnnnnnnnnnnnnnnnnnnnnnnnnnnnnnnnnnnnnnnnnnnnnnnnnnnnnnnnnnnnnnnnnnnnnnnnnnnnnnnnnnnnnnnnnnnnnnnnnnnnnnnnnnnnnnnnnnnnnnnnnnnnnnnnnnnnnnnnnnnnnnnnnnnnnnnnnnnnnnnnnnnnnnnnnnnnnnnnnnnnnnnnnnnnnnnnnnnnnnnnnnnnnnnnnnnnnnnnnnnnnnnnnnnnnnnnnnnnnnnnnnnnnnnnnnnnnnnnnnnnnnnnnnnnnnnnnnnnnnnnnnnnnnnnnnnnnnnnnnnnnnnnnnnnnnnnnnnnnnnnnnnnnnnnnnnnnnnnnnnnnnnnnnnnnnnnnnnnnnnnnnnnnnnnnnnnnnnnnnnnnnnnnnnnnnnnnnnnnnnnnnnnnnnnnnnnnnnnnnnnnnnnnnnnnnnnnnnnnnnnnnnnnnnnnnnnnnnnnnnnnnnnnnnnnnnnnnnnnnnnnnnnnnnnnnnnnnnnnnnnnnnnnnnnnnnnnnnnnnnnnnnnnnnnnnnnnnnnnnnnnnnnnnnnnnnnnnnnnnnnnnnnnnnnnnnnnnnnnnnnnnnnnnnnnnnnnnnnnnnnnnnnnnnnnnnnnnnnnnnnnnnnnnnnnnnnnnnnnnnnnnnnnnnnnnnnnnnnnnnnnnnnnnnnnnnnnnnnnnnnnnnnnnnnnnnnnnnnnnnnnnnnnnnnnnnnnnnnnnnnnnnnnnnnnnnnnnnnnnnnnnnnnnnnnnnnnnnnnnnnnnnnnnnnnnnnnnnnnnnnnnnnnnnnnnnnnnnnnnnnnnnnnnnnnnnnnnnnnnnnnnnnnnnnnnnnnnnnnnnnnnnnnnnnnnnnnnnnnnnnnnnnnnnnnnnnnnnnnnnnnnnnnnnnnnnnnnnnnnnnnnnnnnnnnnnnnnnnnnnnnnnnnnnnnnnnnnnnnnnnnnnnnnnnnnnnnnnnnnnnnnnnnnnnnnnnnnnnnnnnnnnnnnnnnnnnnnnnnnnnnnnnnnnnnnnnnnnnnnnnnnnnnnnnnnnnnnnnnnnnnnnnnnnnnnnnnnnnnnnnnnnnnnnnnnnnnnnnnnnnnnnnnnnnnnnnnnnnnnnnnnnnnnnnnnnnnnnnnnnnnnnnnnnnnnnnnnnnnnnnnnnnnnnnnnnnnnnnnnnnnnnnnnnnnnnnnnnnnnnnnnnnnnnnnnnnnnnnnnnnnnnnnnnnnnnnnnnnnnnnnnnnnnnnnnnnnnnnnnnnnnnnnnnnnnnnnnnnnnnnnnnnnnnnnnnnnnnnnnnnnnnnnnnnnnnnnnnnnnnnnnnnnnnnnnnnnnnnnnnnnnnnnnnnnnnnnnnnnnnnnnnnnnnnnnnnnnnnnnnnnnnnnnnnnnnnnnnnnnnnnnnnnnnnnnnnnnnnnnnnnnnnnnnnnnnnnnnnnnnnnnnnnnnnnnnnnnnnnnnnnnnnnnnnnnnnnnnnnnnnnnnnnnnnnnnnnnnnnnnnnnnnnnnnnnnnnnnnnnnnnnnnnnnnnnnnnnnnnnnnnnnnnnnnnnnnnnnnnnnnnnnnnnnnnnnnnnnnnnnnnnnnnnnnnnnnnnnnnnnnnnnnnnnnnnnnnnnnnnnnnnnnnnnnnnnnnnnnnnnnnnnnnnnnnnnnnnnnnnnnnnnnnnnnnnnnnnnnnnnnnnnnnnnnnnnnnnnnnnnnnnnnnnnnnnnnnnnnnnnnnnnnnnnnnnnnnnnnnnnnnnnnnnnnnnnnnnnnnnnnnnnnnnnnnnnnnnnnnnnnnnnnnnnnnnnnnnnnnnnnnnnnnnnnnnnnnnnnnnnnnnnnnnnnnnnnnnnnnnnnnnnnnnnnnnnnnnnnnnnnnnnnnnnnnnnnnnnnnnnnnnnnnnnnnnnnnnnnnnnnnnnnnnnnnnnnnnnnnnnnnnnnnnnnnnnnnnnnnnnnnnnnnnnnnnnnnnnnnnnnnnnnnnnnnnnnnnnnnnnnnnnnnnnnnnnnnnnnnnnnnnnnnnnnnnnnnnnnnnnnnnnnnnnnnnnnnnnnnnnnnnnnnnnnnnnnnnnnnnnnnnnnnnnnnnnnnnnnnnnnnnnnnnnnnnnnnnnnnnnnnnnnnnnnnnnnnnnnnnnnnnnnnnnnnnnnnnnnnnnnnnnnnnnnnnnnnnnnnnnnnnnnnnnnnnnnnnnnnnnnnnnnnnnnnnnnnnnnnnnnnnnnnnnnnnnnnnnnnnnnnnnnnnnnnnnnnnnnnnnnnnnnnnnnnnnnnnnnnnnnnnnnnnnnnnnnnnnnnnnnnnnnnnnnnnnnnnnnnnnnnnnnnnnnnnnnnnnnnnnnnnnnnnnnnnnnnnnnnnnnnnnnnnnnnnnnnnnnnnnnnnnnnnnnnnnnnnnnnnnnnnnnnnnnnnnnnnnnnnnnnnnnnnnnnnnnnnnnnnnnnnnnnnnnnnnnnnnnnnnnnnnnnnnnnnnnnnnnnnnnnnnnnnnnnnnnnnnnnnnnnnnnnnnnnnnnnnnnnnnnnnnnnnnnnnnnnnnnnnnnnnnnnnnnnnnnnnnnnnnnnnnnnnnnnnnnnnnnnnnnnnnnnnnnnnnnnnnnnnnnnnnnnnnnnnnnnnnnnnnnnnnnnnnnnnnnnnnnnnnnnnnnnnnnnnnnnnnnnnnnnnnnnnnnnnnnnnnnnnnnnnnnnnnnnnnnnnnnnnnnnnnnnnnnnnnnnnnnnnnnnnnnnnnnnnnnnnnnnnnnnnnnnnnnnnnnnnnnnnnnnnnnnnnnnnnnnnnnnnnnnnnnnnnnnnnnnnnnnnnnnnnnnnnnnnnnnnnnnnnnnnnnnnnnnnnnnnnnnnnnnnnnnnnnnnnnnnnnnnnnnnnnnnnnnnnnnnnnnnnnnnnnnnnnnnnnnnnnnnnnnnnnnnnnnnnnnnnnnnnnnnnnnnnnnnnnnnnnnnnnnnnnnnnnnnnnnnnnnnnnnnnnnnnnnnnnnnnnnnnnnnnnnnnnnnnnnnnnnnnnnnnnnnnnnnnnnnnnnnnnnnnnnnnnnnnnnnnnnnnnnnnnnnnnnnnnnnnnnnnnnnnnnnnnnnnnnnnnnnnnnnnnnnnnnnnnnnnnnnnnnnnnnnnnnnnnnnnnnnnnnnnnnnnnnnnnnnnnnnnnnnnnnnnnnnnnnnnnnnnnnnnnnnnnnnnnnnnnnnnnnnnnnnnnnnnnnnnnnnnnnnnnnnnnnnnnnnnnnnnnnnnnnnnnnnnnnnnnnnnnnnnnnnnnnnnnnnnnnnnnnnnnnnnnnnnnnnnnnnnnnnnnnnnnnnnnnnnnnnnnnnnnnnnnnnnnnnnnnnnnnnnnnnnnnnnnnnnnnnnnnnnnnnnnnnnnnnnnnnnnnnnnnnnnnnnnnnnnnnnnnnnnnnnnnnnnnnnnnnnnnnnnnnnnnnnnnnnnnnnnnnnnnnnnnnnnnnnnnnnnnnnnnnnnnnnnnnnnnnnnnnnnnnnnnnnnnnnnnnnnnnnnnnnnnnnnnnnnnnnnnnnnnnnnnnnnnnnnnnnnnnnnnnnnnnnnnnnnnnnnnnnnnnnnnnnnnnnnnnnnnnnnnnnnnnnnnnnnnnnnnnnnnnnnnnnnnnnnnnnnnnnnnnnnnnnnnnnnnnnnnnnnnnnnnnnnnnnnnnnnnnnnnnnnnnnnnnnnnnnnnnnnnnnnnnnnnnnnnnnnnnnnnnnnnnnnnnnnnnnnnnnnnnnnnnnnnnnnnnnnnnnnnnnnnnnnnnnnnnnnnnnnnnnnnnnnnnnnnnnnnnnnnnnnnnnnnnnnnnnnnnnnnnnnnnnnnnnnnnnnnnnnnnnnnnnnnnnnnnnnnnnnnnnnnnnnnnnnnnnnnnnnnnnnnnnnnnnnnnnnnnnnnnnnnnnnnnnnnnnnnnnnnnnnnnnnnnnnnnnnnnnnnnnnnnnnnnnnnnnnnnnnnnnnnnnnnnnnnnnnnnnnnnnnnnnnnnnnnnnnnnnnnnnnnnnnnnnnnnnnnnnnnnnnnnnnnnnnnnnnnnnnnnnnnnnnnnnnnnnnnnnnnnnnnnnnnnnnnnnnnnnnnnnnnnnnnnnnnnnnnnnnnnnnnnnnnnnnnnnnnnnnnnnnnnnnnnnnnnnnnnnnnnnnnnnnnnnnnnnnnnnnnnnnnnnnnnnnnnnnnnnnnnnnnnnnnnnnnnnnnnnnnnnnnnnnnnnnnnnnnnnnnnnnnnnnnnnnnnnnnnnnnnnnnnnnnnnnnnnnnnnnnnnnnnnnnnnnnnnnnnnnnnnnnnnnnnnnnnnnnnnnnnnnnnnnnnnnnnnnnnnnnnnnnnnnnnnnnnnnnnnnnnnnnnnnnnnnnnnnnnnnnnnnnnnnnnnnnnnnnnnnnnnnnnnnnnnnnnnnnnnnnnnnnnnnnnnnnnnnnnnnnnnnnnnnnnnnnnnnnnnnnnnnnnnnnnnnnnnnnnnnnnnnnnnnnnnnnnnnnnnnnnnnnnnnnnnnnnnnnnnnnnnnnnnnnnnnnnnnnnnnnnnnnnnnnnnnnnnnnnnnnnnnnnnnnnnnnnnnnnnnnnnnnnnnnnnnnnnnnnnnnnnnnnnnnnnnnnnnnnnnnnnnnnnnnnnnnnnnnnnnnnnnnnnnnnnnnnnnnnnnnnnnnnnnnnnnnnnnnnnnnnnnnnnnnnnnnnnnnnnnnnnnnnnnnnnnnnnnnnnnnnnnnnnnnnnnnnnnnnnnnnnnnnnnnnnnnnnnnnnnnnnnnnnnnnnnnnnnnnnnnnnnnnnnnnnnnnnnnnnnnnnnnnnnnnnnnnnnnnnnnnnnnnnnnnnnnnnnnnnnnnnnnnnnnnnnnnnnnnnnnnnnnnnnnnnnnnnnnnnnnnnnnnnnnnnnnnnnnnnnnnnnnnnnnnnnnnnnnnnnnnnnnnnnnnnnnnnnnnnnnnnnnnnnnnnnnnnnnnnnnnnnnnnnnnnnnnnnnnnnnnnnnnnnnnnnnnnnnnnnnnnnnnnnnnnnnnnnnnnnnnnnnnnnnnnnnnnnnnnnnnnnnnnnnnnnnnnnnnnnnnnnnnnnnnnnnnnnnnnnnnnnnnnnnnnnnnnnnnnnnnnnnnnnnnnnnnnnnnnnnnnnnnnnnnnnnnnnnnnnnnnnnnnnnnnnnnnnnnnnnnnnnnnnnnnnnnnnnnnnnnnnnnnnnnnnnnnnnnnnnnnnnnnnnnnnnnnnnnnnnnnnnnnnnnnnnnnnnnnnnnnnnnnnnnnnnnnnnnnnnnnnnnnnnnnnnnnnnnnnnnnnnnnnnnnnnnnnnnnnnnnnnnnnnnnnnnnnnnnnnnnnnnnnnnnnnnnnnnnnnnnnnnnnnnnnnnnnnnnnnnnnnnnnnnnnnnnnnnnnnnnnnnnnnnnnnnnnnnnnnnnnnnnnnnnnnnnnnnnnnnnnnnnnnnnnnnnnnnnnnnnnnnnnnnnnnnnnnnnnnnnnnnnnnnnnnnnnnnnnnnnnnnnnnnnnnnnnnnnnnnnnnnnnnnnnnnnnnnnnnnnnnnnnnnnnnnnnnnnnnnnnnnnnnnnnnnnnnnnnnnnnnnnnnnnnnnnnnnnnnnnnnnnnnnnnnnnnnnnnnnnnnnnnnnnnnnnnnnnnnnnnnnnnnnnnnnnnnnnnnnnnnnnnnnnnnnnnnnnnnnnnnnnnnnnnnnnnnnnnnnnnnnnnnnnnnnnnnnnnnnnnnnnnnnnnnnnnnnnnnnnnnnnnnnnnnnnnnnnnnnnnnnnnnnnnnnnnnnnnnnnnnnnnnnnnnnnnnnnnnnnnnnnnnnnnnnnnnnnnnnnnnnnnnnnnnnnnnnnnnnnnnnnnnnnnnnnnnnnnnnnnnnnnnnnnnnnnnnnnnnnnnnnnnnnnnnnnnnnnnnnnnnnnnnnnnnnnnnnnnnnnnnnnnnnnnnnnnnnnnnnnnnnnnnnnnnnnnnnnnnnnnnnnnnnnnnnnnnnnnnnnnnnnnnnnnnnnnnnnnnnnnnnnnnnnnnnnnnnnnnnnnnnnnnnnnnnnnnnnnnnnnnnnnnnnnnnnnnnnnnnnnnnnnnnnnnnnnnnnnnnnnnnnnnnnnnnnnnnnnnnnnnnnnnnnnnnnnnnnnnnnnnnnnnnnnnnnnnnnnnnnnnnnnnnnnnnnnnnnnnnnnnnnnnnnnnnnnnnnnnnnnnnnnnnnnnnnnnnnnnnnnnnnnnnnnnnnnnnnnnnnnnnnnnnnnnnnnnnnnnnnnnnnnnnnnnnnnnnnnnnnnnnnnnnnnnnnnnnnnnnnnnnnnnnnnnnnnnnnnnnnnnnnnnnnnnnnnnnnnnnnnnnnnnnnnnnnnnnnnnnnnnnnnnnnnnnnnnnnnnnnnnnnnnnnnnnnnnnnnnnnnnnnnnnnnnnnnnnnnnnnnnnnnnnnnnnnnnnnnnnnnnnnnnnnnnnnnnnnnnnnnnnnnnnnnnnnnnnnnnnnnnnnnnnnnnnnnnnnnnnnnnnnnnnnnnnnnnnnnnnnnnnnnnnnnnnnnnnnnnnnnnnnnnnnnnnnnnnnnnnnnnnnnnnnnnnnnnnnnnnnnnnnnnnnnnnnnnnnnnnnnnnnnnnnnnnnnnnnnnnnnnnnnnnnnnnnnnnnnnnnnnnnnnnnnnnnnnnnnnnnnnnnnnnnnnnnnnnnnnnnnnnnnnnnnnnnnnnnnnnnnnnnnnnnnnnnnnnnnnnnnnnnnnnnnnnnnnnnnnnnnnnnnnnnnnnnnnnnnnnnnnnnnnnnnnnnnnnnnnnnnnnnnnnnnnnnnnnnnnnnnnnnnnnnnnnnnnnnnnnnnnnnnnnnnnnnnnnnnnnnnnnnnnnnnnnnnnnnnnnnnnnnnnnnnnnnnnnnnnnnnnnnnnnnnnnnnnnnnnnnnnnnnnnnnnnnnnnnnnnnnnnnnnnnnnnnnnnnnnnnnnnnnnnnnnnnnnnnnnnnnnnnnnnnnnnnnnnnnnnnnnnnnnnnnnnnnnnnnnnnnnnnnnnnnnnnnnnnnnnnnnnnnnnnnnnnnnnnnnnnnnnnnnnnnnnnnnnnnnnnnnnnnnnnnnnnnnnnnnnnnnnnnnnnnnnnnnnnnnnnnnnnnnnnnnnnnnnnnnnnnnnnnnnnnnnnnnnnnnnnnnnnnnnnnnnnnnnnnnnnnnnnnnnnnnnnnnnnnnnnnnnnnnnnnnnnnnnnnnnnnnnnnnnnnnnnnnnnnnnnnnnnnnnnnnnnnnnnnnnnnnnnnnnnnnnnnnnnnnnnnnnnnnnnnnnnnnnnnnnnnnnnnnnnnnnnnnnnnnnnnnnnnnnnnnnnnnnnnnnnnnnnnnnnnnnnnnnnnnnnnnnnnnnnnnnnnnnnnnnnnnnnnnnnnnnnnnnnnnnnnnnnnnnnnnnnnnnnnnnnnnnnnnnnnnnnnnnnnnnnnnnnnnnnnnnnnnnnnnnnnnnnnnnnnnnnnnnnnnnnnnnnnnnnnnnnnnnnnnnnnnnnnnnnnnnnnnnnnnnnnnnnnnnnnnnnnnnnnnnnnnnnnnnnnnnnnnnnnnnnnnnnnnnnnnnnnnnnnnnnnnnnnnnnnnnnnnnnnnnnnnnnnnnnnnnnnnnnnnnnnnnnnnnnnnnnnnnnnnnnnnnnnnnnnnnnnnnnnnnnnnnnnnnnnnnnnnnnnnnnnnnnnnnnnnnnnnnnnnnnnnnnnnnnnnnnnnnnnnnnnnnnnnnnnnnnnnnnnnnnnnnnnnnnnnnnnnnnnnnnnnnnnnnnnnnnnnnnnnnnnnnnnnnnnnnnnnnnnnnnnnnnnnnnnnnnnnnnnnnnnnnnnnnnnnnnnnnnnnnnnnnnnnnnnnnnnnnnnnnnnnnnnnnnnnnnnnnnnnnnnnnnnnnnnnnnnnnnnnnnnnnnnnnnnnnnnnnnnnnnnnnnnnnnnnnnnnnnnnnnnnnnnnnnnnnnnnnnnnnnnnnnnnnnnnnnnnnnnnnnnnnnnnnnnnnnnnnnnnnnnnnnnnnnnnnnnnnnnnnnnnnnnnnnnnnnnnnnnnnnnnnnnnnnnnnnnnnnnnnnnnnnnnnnnnnnnnnnnnnnnnnnnnnnnnnnnnnnnnnnnnnnnnnnnnnnnnnnnnnnnnnnnnnnnnnnnnnnnnnnnnnnnnnnnnnnnnnnnnnnnnnnnnnnnnnnnnnnnnnnnnnnnnnnnnnnnnnnnnnnnnnnnnnnnnnnnnnnnnnnnnnnnnnnnnnnnnnnnnnnnnnnnnnnnnnnnnnnnnnnnnnnnnnnnnnnnnnnnnnnnnnnnnnnnnnnnnnnnnnnnnnnnnnnnnnnnnnnnnnnnnnnnnnnnnnnnnnnnnnnnnnnnnnnnnnnnnnnnnnnnnnnnnnnnnnnnnnnnnnnnnnnnnnnnnnnnnnnnnnnnnnnnnnnnnnnnnnnnnnnnnnnnnnnnnnnnnnnnnnnnnnnnnnnnnnnnnnnnnnnnnnnnnnnnnnnnnnnnnnnnnnnnnnnnnnnnnnnnnnnnnnnnnnnnnnnnnnnnnnnnnnnnnnnnnnnnnnnnnnnnnnnnnnnnnnnnnnnnnnnnnnnnnnnnnnnnnnnnnnnnnnnnnnnnnnnnnnnnnnnnnnnnnnnnnnnnnnnnnnnnnnnnnnnnnnnnnnnnnnnnnnnnnnnnnnnnnnnnnnnnnnnnnnnnnnnnnnnnnnnnnnnnnnnnnnnnnnnnnnnnnnnnnnnnnnnnnnnnnnnnnnnnnnnnnnnnnnnnnnnnnnnnnnnnnnnnnnnnnnnnnnnnnnnnnnnnnnnnnnnnnnnnnnnnnnnnnnnnnnnnnnnnnnnnnnnnnnnnnnnnnnnnnnnnnnnnnnnnnnnnnnnnnnnnnnnnnnnnnnnnnnnnnnnnnnnnnnnnnnnnnnnnnnnnnnnnnnnnnnnnnnnnnnnnnnnnnnnnnnnnnnnnnnnnnnnnnnnnnnnnnnnnnnnnnnnnnnnnnnnnnnnnnnnnnnnnnnnnnnnnnnnnnnnnnnnnnnnnnnnnnnnnnnnnnnnnnnnnnnnnnnnnnnnnnnnnnnnnnnnnnnnnnnnnnnnnnnnnnnnnnnnnnnnnnnnnnnnnnnnnnnnnnnnnnnnnnnnnnnnnnnnnnnnnnnnnnnnnnnnnnnnnnnnnnnnnnnnnnnnnnnnnnnnnnnnnnnnnnnnnnnnnnnnnnnnnnnnnnnnnnnnnnnnnnnnnnnnnnnnnnnnnnnnnnnnnnnnnnnnnnnnnnnnnnnnnnnnnnnnnnnnnnnnnnnnnnnnnnnnnnnnnnnnnnnnnnnnnnnnnnnnnnnnnnnnnnnnnnnnnnnnnnnnnnnnnnnnnnnnnnnnnnnnnnnnnnnnnnnnnnnnnnnnnnnnnnnnnnnnnnnnnnnnnnnnnnnnnnnnnnnnnnnnnnnnnnnnnnnnnnnnnnnnnnnnnnnnnnnnnnnnnnnnnnnnnnnnnnnnnnnnnnnnnnnnnnnnnnnnnnnnnnnnnnnnnnnnnnnnnnnnnnnnnnnnnnnnnnnnnnnnnnnnnnnnnnnnnnnnnnnnnnnnnnnnnnnnnnnnnnnnnnnnnnnnnnnnnnnnnnnnnnnnnnnnnnnnnnnnnnnnnnnnnnnnnnnnnnnnnnnnnnnnnnnnnnnnnnnnnnnnnnnnnnnnnnnnnnnnnnnnnnnnnnnnnnnnnnnnnnnnnnnnnnnnnnnnnnnnnnnnnnnnnnnnnnnnnnnnnnnnnnnnnnnnnnnnnnnnnnnnnnnnnnnnnnnnnnnnnnnnnnnnnnnnnnnnnnnnnnnnnnnnnnnnnnnnnnnnnnnnnnnnnnnnnnnnnnnnnnnnnnnnnnnnnnnnnnnnnnnnnnnnnnnnnnnnnnnnnnnnnnnnnnnnnnnnnnnnnnnnnnnnnnnnnnnnnnnnnnnnnnnnnnnnnnnnnnnnnnnnnnnnnnnnnnnnnnnnnnnnnnnnnnnnnnnnnnnnnnnnnnnnnnnnnnnnnnnnnnnnnnnnnnnnnnnnnnnnnnnnnnnnnnnnnnnnnnnnnnnnnnnnnnnnnnnnnnnnnnnnnnnnnnnnnnnnnnnnnnnnnnnnnnnnnnnnnnnnnnnnnnnnnnnnnnnnnnnnnnnnnnnnnnnnnnnnnnnnnnnnnnnnnnnnnnnnnnnnnnnnnnnnnnnnnnnnnnnnnnnnnnnnnnnnnnnnnnnnnnnnnnnnnnnnnnnnnnnnnnnnnnnnnnnnnnnnnnnnnnnnnnnnnnnnnnnnnnnnnnnnnnnnnnnnnnnnnnnnnnnnnnnnnnnnnnnnnnnnnnnnnnnnnnnnnnnnnnnnnnnnnnnnnnnnnnnnnnnnnnnnnnnnnnnnnnnnnnnnnnnnnnnnnnnnnnnnnnnnnnnnnnnnnnnnnnnnnnnnnnnnnnnnnnnnnnnnnnnnnnnnnnnnnnnnnnnnnnnnnnnnnnnnnnnnnnnnnnnnnnnnnnnnnnnnnnnnnnnnnnnnnnnnnnnnnnnnnnnnnnnnnnnnnnnnnnnnnnnnnnnnnnnnnnnnnnnnnnnnnnnnnnnnnnnnnnnnnnnnnnnnnnnnnnnnnnnnnnnnnnnnnnnnnnnnnnnnnnnnnnnnnnnnnnnnnnnnnnnnnnnnnnnnnnnnnnnnnnnnnnnnnnnnnnnnnnnnnnnnnnnnnnnnnnnnnnnnnnnnnnnnnnnnnnnnnnnnnnnnnnnnnnnnnnnnnnnnnnnnnnnnnnnnnnnnnnnnnnnnnnnnnnnnnnnnnnnnnnnnnnnnnnnnnnnnnnnnnnnnnnnnnnnnnnnnnnnnnnnnnnnnnnnnnnnnnnnnnnnnnnnnnnnnnnnnnnnnnnnnnnnnnnnnnnnnnnnnnnnnnnnnnnnnnnnnnnnnnnnnnnnnnnnnnnnnnnnnnnnnnnnnnnnnnnnnnnnnnnnnnnnnnnnnnnnnnnnnnnnnnnnnnnnnnnnnnnnnnnnnnnnnnnnnnnnnnnnnnnnnnnnnnnnnnnnnnnnnnnnnnnnnnnnnnnnnnnnnnnnnnnnnnnnnnnnnnnnnnnnnnnnnnnnnnnnnnnnnnnnnnnnnnnnnnnnnnnnnnnnnnnnnnnnnnnnnnnnnnnnnnnnnnnnnnnnnnnnnnnnnnnnnnnnnnnnnnnnnnnnnnnnnnnnnnnnnnnnnnnnnnnnnnnnnnnnnnnnnnnnnnnnnnnnnnnnnnnnnnnnnnnnnnnnnnnnnnnnnnnnnnnnnnnnnnnnnnnnnnnnnnnnnnnnnnnnnnnnnnnnnnnnnnnnnnnnnnnnnnnnnnnnnnnnnnnnnnnnnnnnnnnnnnnnnnnnnnnnnnnnnnnnnnnnnnnnnnnnnnnnnnnnnnnnnnnnnnnnnnnnnnnnnnnnnnnnnnnnnnnnnnnnnnnnnnnnnnnnnnnnnnnnnnnnnnnnnnnnnnnnnnnnnnnnnnnnnnnnnnnnnnnnnnnnnnnnnnnnnnnnnnnnnnnnnnnnnnnnnnnnnnnnnnnnnnnnnnnnnnnnnnnnnnnnnnnnnnnnnnnnnnnnnnnnnnnnnnnnnnnnnnnnnnnnnnnnnnnnnnnnnnnnnnnnnnnnnnnnnnnnnnnnnnnnnnnnnnnnnnnnnnnnnnnnnnnnnnnnnnnnnnnnnnnnnnnnnnnnnnnnnnnnnnnnnnnnnnnnnnnnnnnnnnnnnnnnnnnnnnnnnnnnnnnnnnnnnnnnnnnnnnnnnnnnnnnnnnnnnnnnnnnnnnnnnnnnnnnnnnnnnnnnnnnnnnnnnnnnnnnnnnnnnnnnnnnnnnnnnnnnnnnnnnnnnnnnnnnnnnnnnnnnnnnnnnnnnnnnnnnnnnnnnnnnnnnnnnnnnnnnnnnnnnnnnnnnnnnnnnnnnnnnnnnnnnnnnnnnnnnnnnnnnnnnnnnnnnnnnnnnnnnnnnnnnnnnnnnnnnnnnnnnnnnnnnnnnnnnnnnnnnnnnnnnnnnnnnnnnnnnnnnnnnnnnnnnnnnnnnnnnnnnnnnnnnnnnnnnnnnnnnnnnnnnnnnnnnnnnnnnnnnnnnnnnnnnnnnnnnnnnnnnnnnnnnnnnnnnnnnnnnnnnnnnnnnnnnnnnnnnnnnnnnnnnnnnnnnnnnnnnnnnnnnnnnnnnnnnnnnnnnnnnnnnnnnnnnnnnnnnnnnnnnnnnnnnnnnnnnnnnnnnnnnnnnnnnnnnnnnnnnnnnnnnnnnnnnnnnnnnnnnnnnnnnnnnnnnnnnnnnnnnnnnnnnnnnnnnnnnnnnnnnnnnnnnnnnnnnnnnnnnnnnnnnnnnnnnnnnnnnnnnnnnnnnnnnnnnnnnnnnnnnnnnnnnnnnnnnnnnnnnnnnnnnnnnnnnnnnnnnnnnnnnnnnnnnnnnnnnnnnnnnnnnnnnnnnnnnnnnnnnnnnnnnnnnnnnnnnnnnnnnnnnnnnnnnnnnnnnnnnnnnnnnnnnnnnnnnnnnnnnnnnnnnnnnnnnnnnnnnnnnnnnnnnnnnnnnnnnnnnnnnnnnnnnnnnnnnnnnnnnnnnnnnnnnnnnnnnnnnnnnnnnnnnnnnnnnnnnnnnnnnnnnnnnnnnnnnnnnnnnnnnnnnnnnnnnnnnnnnnnnnnnnnnnnnnnnnnnnnnnnnnnnnnnnnnnnnnnnnnnnnnnnnnnnnnnnnnnnnnnnnnnnnnnnnnnnnnnnnnnnnnnnnnnnnnnnnnnnnnnnnnnnnnnnnnnnnnnnnnnnnnnnnnnnnnnnnnnnnnnnnnnnnnnnnnnnnnnnnnnnnnnnnnnnnnnnnnnnnnnnnnnnnnnnnnnnnnnnnnnnnnnnnnnnnnnnnnnnnnnnnnnnnnnnnnnnnnnnnnnnnnnnnnnnnnnnnnnnnnnnnnnnnnnnnnnnnnnnnnnnnnnnnnnnnnnnnnnnnnnnnnnnnnnnnnnnnnnnnnnnnnnnnnnnnnnnnnnnnnnnnnnnnnnnnnnnnnnnnnnnnnnnnnnnnnnnnnnnnnnnnnnnnnnnnnnnnnnnnnnnnnnnnnnnnnnnnnnnnnnnnnnnnnnnnnnnnnnnnnnnnnnnnnnnnnnnnnnnnnnnnnnnnnnnnnnnnnnnnnnnnnnnnnnnnnnnnnnnnnnnnnnnnnnnnnnnnnnnnnnnnnnnnnnnnnnnnnnnnnnnnnnnnnnnnnnnnnnnnnnnnnnnnnnnnnnnnnnnnnnnnnnnnnnnnnnnnnnnnnnnnnnnnnnnnnnnnnnnnnnnnnnnnnnnnnnnnnnnnnnnnnnnnnnnnnnnnnnnnnnnnnnnnnnnnnnnnnnnnnnnnnnnnnnnnnnnnnnnnnnnnnnnnnnnnnnnnnnnnnnnnnnnnnnnnnnnnnnnnnnnnnnnnnnnnnnnnnnnnnnnnnnnnnnnnnnnnnnnnnnnnnnnnnnnnnnnnnnnnnnnnnnnnnnnnnnnnnnnnnnnnnnnnnnnnnnnnnnnnnnnnnnnnnnnnnnnnnnnnnnnnnnnnnnnnnnnnnnnnnnnnnnnnnnnnnnnnnnnnnnnnnnnnnnnnnnnnnnnnnnnnnnnnnnnnnnnnnnnnnnnnnnnnnnnnnnnnnnnnnnnnnnnnnnnnnnnnnnnnnnnnnnnnnnnnnnnnnnnnnnnnnnnnnnnnnnnnnnnnnnnnnnnnnnnnnnnnnnnnnnnnnnnnnnnnnnnnnnnnnnnnnnnnnnnnnnnnnnnnnnnnnnnnnnnnnnnnnnnnnnnnnnnnnnnnnnnnnnnnnnnnnnnnnnnnnnnnnnnnnnnnnnnnnnnnnnnnnnnnnnnnnnnnnnnnnnnnnnnnnnnnnnnnnnnnnnnnnnnnnnnnnnnnnnnnnnnnnnnnnnnnnnnnnnnnnnnnnnnnnnnnnnnnnnnnnnnnnnnnnnnnnnnnnnnnnnnnnnnnnnnnnnnnnnnnnnnnnnnnnnnnnnnnnnnnnnnnnnnnnnnnnnnnnnnnnnnnnnnnnnnnnnnnnnnnnnnnnnnnnnnnnnnnnnnnnnnnnnnnnnnnnnnnnnnnnnnnnnnnnnnnnnnnnnnnnnnnnnnnnnnnnnnnnnnnnnnnnnnnnnnnnnnnnnnnnnnnnnnnnnnnnnnnnnnnnnnnnnnnnnnnnnnnnnnnnnnnnnnnnnnnnnnnnnnnnnnnnnnnnnnnnnnnnnnnnnnnnnnnnnnnnnnnnnnnnnnnnnnnnnnnnnnnnnnnnnnnnnnnnnnnnnnnnnnnnnnnnnnnnnnnnnnnnnnnnnnnnnnnnnnnnnnnnnnnnnnnnnnnnnnnnnnnnnnnnnnnnnnnnnnnnnnnnnnnnnnnnnnnnnnnnnnnnnnnnnnnnnnnnnnnnnnnnnnnnnnnnnnnnnnnnnnnnnnnnnnnnnnnnnnnnnnnnnnnnnnnnnnnnnnnnnnnnnnnnnnnnnnnnnnnnnnnnnnnnnnnnnnnnnnnnnnnnnnnnnnnnnnnnnnnnnnnnnnnnnnnnnnnnnnnnnnnnnnnnnnnnnnnnnnnnnnnnnnnnnnnnnnnnnnnnnnnnnnnnnnnnnnnnnnnnnnnnnnnnnnnnnnnnnnnnnnnnnnnnnnnnnnnnnnnnnnnnnnnnnnnnnnnnnnnnnnnnnnnnnnnnnnnnnnnnnnnnnnnnnnnnnnnnnnnnnnnnnnnnnnnnnnnnnnnnnnnnnnnnnnnnnnnnnnnnnnnnnnnnnnnnnnnnnnnnnnnnnnnnnnnnnnnnnnnnnnnnnnnnnnnnnnnnnnnnnnnnnnnnnnnnnnnnnnnnnnnnnnnnnnnnnnnnnnnnnnnnnnnnnnnnnnnnnnnnnnnnnnnnnnnnnnnnnnnnnnnnnnnnnnnnnnnnnnnnnnnnnnnnnnnnnnnnnnnnnnnnnnnnnnnnnnnnnnnnnnnnnnnnnnnnnnnnnnnnnnnnnnnnnnnnnnnnnnnnnnnnnnnnnnnnnnnnnnnnnnnnnnnnnnnnnnnnnnnnnnnnnnnnnnnnnnnnnnnnnnnnnnnnnnnnnnnnnnnnnnnnnnnnnnnnnnnnnnnnnnnnnnnnnnnnnnnnnnnnnnnnnnnnnnnnnnnnnnnnnnnnnnnnnnnnnnnnnnnnnnnnnnnnnnnnnnnnnnnnnnnnnnnnnnnnnnnnnnnnnnnnnnnnnnnnnnnnnnnnnnnnnnnnnnnnnnnnnnnnnnnnnnnnnnnnnnnnnnnnnnnnnnnnnnnnnnnnnnnnnnnnnnnnnnnnnnnnnnnnnnnnnnnnnnnnnnnnnnnnnnnnnnnnnnnnnnnnnnnnnnnnnnnnnnnnnnnnnnnnnnnnnnnnnnnnnnnnnnnnnnnnnnnnnnnnnnnnnnnnnnnnnnnnnnnnnnnnnnnnnnnnnnnnnnnnnnnnnnnnnnnnnnnnnnnnnnnnnnnnnnnnnnnnnnnnnnnnnnnnnnnnnnnnnnnnnnnnnnnnnnnnnnnnnnnnnnnnnnnnnnnnnnnnnnnnnnnnnnnnnnnnnnnnnnnnnnnnnnnnnnnnnnnnnnnnnnnnnnnnnnnnnnnnnnnnnnnnnnnnnnnnnnnnnnnnnnnnnnnnnnnnnnnnnnnnnnnnnnnnnnnnnnnnnnnnnnnnnnnnnnnnnnnnnnnnnnnnnnnnnnnnnnnnnnnnnnnnnnnnnnnnnnnnnnnnnnnnnnnnnnnnnnnnnnnnnnnnnnnnnnnnnnnnnnnnnnnnnnnnnnnnnnnnnnnnnnnnnnnnnnnnnnnnnnnnnnnnnnnnnnnnnnnnnnnnnnnnnnnnnnnnnnnnnnnnnnnnnnnnnnnnnnnnnnnnnnnnnnnnnnnnnnnnnnnnnnnnnnnnnnnnnnnnnnnnnnnnnnnnnnnnnnnnnnnnnnnnnnnnnnnnnnnnnnnnnnnnnnnnnnnnnnnnnnnnnnnnnnnnnnnnnnnnnnnnnnnnnnnnnnnnnnnnnnnnnnnnnnnnnnnnnnnnnnnnnnnnnnnnnnnnnnnnnnnnnnnnnnnnnnnnnnnnnnnnnnnnnnnnnnnnnnnnnnnnnnnnnnnnnnnnnnnnnnnnnnnnnnnnnnnnnnnnnnnnnnnnnnnnnnnnnnnnnnnnnnnnnnnnnnnnnnnnnnnnnnnnnnnnnnnnnnnnnnnnnnnnnnnnnnnnnnnnnnnnnnnnnnnnnnnnnnnnnnnnnnnnnnnnnnnnnnnnnnnnnnnnnnnnnnnnnnnnnnnnnnnnnnnnnnnnnnnnnnnnnnnnnnnnnnnnnnnnnnnnnnnnnnnnnnnnnnnnnnnnnnnnnnnnnnnnnnnnnnnnnnnnnnnnnnnnnnnnnnnnnnnnnnnnnnnnnnnnnnnnnnnnnnnnnnnnnnnnnnnnnnnnnnnnnnnnnnnnnnnnnnnnnnnnnnnnnnnnnnnnnnnnnnnnnnnnnnnnnnnnnnnnnnnnnnnnnnnnnnnnnnnnnnnnnnnnnnnnnnnnnnnnnnnnnnnnnnnnnnnnnnnnnnnnnnnnnnnnnnnnnnnnnnnnnnnnnnnnnnnnnnnnnnnnnnnnnnnnnnnnnnnnnnnnnnnnnnnnnnnnnnnnnnnnnnnnnnnnnnnnnnnnnnnnnnnnnnnnnnnnnnnnnnnnnnnnnnnnnnnnnnnnnnnnnnnnnnnnnnnnnnnnnnnnnnnnnnnnnnnnnnnnnnnnnnnnnnnnnnnnnnnnnnnnnnnnnnnnnnnnnnnnnnnnnnnnnnnnnnnnnnnnnnnnnnnnnnnnnnnnnnnnnnnnnnnnnnnnnnnnnnnnnnnnnnnnnnnnnnnnnnnnnnnnnnnnnnnnnnnnnnnnnnnnnnnnnnnnnnnnnnnnnnnnnnnnnnnnnnnnnnnnnnnnnnnnnnnnnnnnnnnnnnnnnnnnnnnnnnnnnnnnnnnnnnnnnnnnnnnnnnnnnnnnnnnnnnnnnnnnnnnnnnnnnnnnnnnnnnnnnnnnnnnnnnnnnnnnnnnnnnnnnnnnnnnnnnnnnnnnnnnnnnnnnnnnnnnnnnnnnnnnnnnnnnnnnnnnnnnnnnnnnnnnnnnnnnnnnnnnnnnnnnnnnnnnnnnnnnnnnnnnnnnnnnnnnnnnnnnnnnnnnnnnnnnnnnnnnnnnnnnnnnnnnnnnnnnnnnnnnnnnnnnnnnnnnnnnnnnnnnnnnnnnnnnnnnnnnnnnnnnnnnnnnnnnnnnnnnnnnnnnnnnnnnnnnnnnnnnnnnnnnnnnnnnnnnnnnnnnnnnnnnnnnnnnnnnnnnnnnnnnnnnnnnnnnnnnnnnnnnnnnnnnnnnnnnnnnnnnnnnnnnnnnnnnnnnnnnnnnnnnnnnnnnnnnnnnnnnnnnnnnnnnnnnnnnnnnnnnnnnnnnnnnnnnnnnnnnnnnnnnnnnnnnnnnnnnnnnnnnnnnnnnnnnnnnnnnnnnnnnnnnnnnnnnnnnnnnnnnnnnnnnnnnnnnnnnnnnnnnnnnnnnnnnnnnnnnnnnnnnnnnnnnnnnnnnnnnnnnnnnnnnnnnnnnnnnnnnnnnnnnnnnnnnnnnnnnnnnnnnnnnnnnnnnnnnnnnnnnnnnnnnnnnnnnnnnnnnnnnnnnnnnnnnnnnnnnnnnnnnnnnnnnnnnnnnnnnnnnnnnnnnnnnnnnnnnnnnnnnnnnnnnnnnnnnnnnnnnnnnnnnnnnnnnnnnnnnnnnnnnnnnnnnnnnnnnnnnnnnnnnnnnnnnnnnnnnnnnnnnnnnnnnnnnnnnnnnnnnnnnnnnnnnnnnnnnnnnnnnnnnnnnnnnnnnnnnnnnnnnnnnnnnnnnnnnnnnnnnnnnnnnnnnnnnnnnnnnnnnnnnnnnnnnnnnnnnnnnnnnnnnnnnnnnnnnnnnnnnnnnnnnnnnnnnnnnnnnnnnnnnnnnnnnnnnnnnnnnnnnnnnnnnnnnnnnnnnnnnnnnnnnnnnnnnnnnnnnnnnnnnnnnnnnnnnnnnnnnnnnnnnnnnnnnnnnnnnnnnnnnnnnnnnnnnnnnnnnnnnnnnnnnnnnnnnnnnnnnnnnnnnnnnnnnnnnnnnnnnnnnnnnnnnnnnnnnnnnnnnnnnnnnnnnnnnnnnnnnnnnnnnnnnnnnnnnnnnnnnnnnnnnnnnnnnnnnnnnnnnnnnnnnnnnnnnnnnnnnnnnnnnnnnnnnnnnnnnnnnnnnnnnnnnnnnnnnnnnnnnnnnnnnnnnnnnnnnnnnnnnnnnnnnnnnnnnnnnnnnnnnnnnnnnnnnnnnnnnnnnnnnnnnnnnnnnnnnnnnnnnnnnnnnnnnnnnnnnnnnnnnnnnnnnnnnnnnnnnnnnnnnnnnnnnnnnnnnnnnnnnnnnnnnnnnnnnnnnnnnnnnnnnnnnnnnnnnnnnnnnnnnnnnnnnnnnnnnnnnnnnnnnnnnnnnnnnnnnnnnnnnnnnnnnnnnnnnnnnnnnnnnnnnnnnnnnnnnnnnnnnnnnnnnnnnnnnnnnnnnnnnnnnnnnnnnnnnnnnnnnnnnnnnnnnnnnnnnnnnnnnnnnnnnnnnnnnnnnnnnnnnnnnnnnnnnnnnnnnnnnnnnnnnnnnnnnnnnnnnnnnnnnnnnnnnnnnnnnnnnnnnnnnnnnnnnnnnnnnnnnnnnnnnnnnnnnnnnnnnnnnnnnnnnnnnnnnnnnnnnnnnnnnnnnnnnnnnnnnnnnnnnnnnnnnnnnnnnnnnnnnnnnnnnnnnnnnnnnnnnnnnnnnnnnnnnnnnnnnnnnnnnnnnnnnnnnnnnnnnnnnnnnnnnnnnnnnnnnnnnnnnnnnnnnnnnnnnnnnnnnnnnnnnnnnnnnnnnnnnnnnnnnnnnnnnnnnnnnnnnnnnnnnnnnnnnnnnnnnnnnnnnnnnnnnnnnnnnnnnnnnnnnnnnnnnnnnnnnnnnnnnnnnnnnnnnnnnnnnnnnnnnnnnnnnnnnnnnnnnnnnnnnnnnnnnnnnnnnnnnnnnnnnnnnnnnnnnnnnnnnnnnnnnnnnnnnnnnnnnnnnnnnnnnnnnnnnnnnnnnnnnnnnnnnnnnnnnnnnnnnnnnnnnnnnnnnnnnnnnnnnnnnnnnnnnnnnnnnnnnnnnnnnnnnnnnnnnnnnnnnnnnnnnnnnnnnnnnnnnnnnnnnnnnnnnnnnnnnnnnnnnnnnnnnnnnnnnnnnnnnnnnnnnnnnnnnnnnnnnnnnnnnnnnnnnnnnnnnnnnnnnnnnnnnnnnnnnnnnnnnnnnnnnnnnnnnnnnnnnnnnnnnnnnnnnnnnnnnnnnnnnnnnnnnnnnnnnnnnnnnnnnnnnnnnnnnnnnnnnnnnnnnnnnnnnnnnnnnnnnnnnnnnnnnnnnnnnnnnnnnnnnnnnnnnnnnnnnnnnnnnnnnnnnnnnnnnnnnnnnnnnnnnnnnnnnnnnnnnnnnnnnnnnnnnnnnnnnnnnnnnnnnnnnnnnnnnnnnnnnnnnnnnnnnnnnnnnnnnnnnnnnnnnnnnnnnnnnnnnnnnnnnnnnnnnnnnnnnnnnnnnnnnnnnnnnnnnnnnnnnnnnnnnnnnnnnnnnnnnnnnnnnnnnnnnnnnnnnnnnnnnnnnnnnnnnnnnnnnnnnnnnnnnnnnnnnnnnnnnnnnnnnnnnnnnnnnnnnnnnnnnnnnnnnnnnnnnnnnnnnnnnnnnnnnnnnnnnnnnnnnnnnnnnnnnnnnnnnnnnnnnnnnnnnnnnnnnnnnnnnnnnnnnnnnnnnnnnnnnnnnnnnnnnnnnnnnnnnnnnnnnnnnnnnnnnnnnnnnnnnnnnnnnnnnnnnnnnnnnnnnnnnnnnnnnnnnnnnnnnnnnnnnnnnnnnnnnnnnnnnnnnnnnnnnnnnnnnnnnnnnnnnnnnnnnnnnnnnnnnnnnnnnnnnnnnnnnnnnnnnnnnnnnnnnnnnnnnnnnnnnnnnnnnnnnnnnnnnnnnnnnnnnnnnnnnnnnnnnnnnnnnnnnnnnnnnnnnnnnnnnnnnnnnnnnnnnnnnnnnnnnnnnnnnnnnnnnnnnnnnnnnnnnnnnnnnnnnnnnnnnnnnnnnnnnnnnnnnnnnnnnnnnnnnnnnnnnnnnnnnnnnnnnnnnnnnnnnnnnnnnnnnnnnnnnnnnnnnnnnnnnnnnnnnnnnnnnnnnnnnnnnnnnnnnnnnnnnnnnnnnnnnnnnnnnnnnnnnnnnnnnnnnnnnnnnnnnnnnnnnnnnnnnnnnnnnnnnnnnnnnnnnnnnnnnnnnnnnnnnnnnnnnnnnnnnnnnnnnnnnnnnnnnnnnnnnnnnnnnnnnnnnnnnnnnnnnnnnnnnnnnnnnnnnnnnnnnnnnnnnnnnnnnnnnnnnnnnnnnnnnnnnnnnnnnnnnnnnnnnnnnnnnnnnnnnnnnnnnnnnnnnnnnnnnnnnnnnnnnnnnnnnnnnnnnnnnnnnnnnnnnnnnnnnnnnnnnnnnnnnnnnnnnnnnnnnnnnnnnnnnnnnnnnnnnnnnnnnnnnnnnnnnnnnnnnnnnnnnnnnnnnnnnnnnnnnnnnnnnnnnnnnnnnnnnnnnnnnnnnnnnnnnnnnnnnnnnnnnnnnnnnnnnnnnnnnnnnnnnnnnnnnnnnnnnnnnnnnnnnnnnnnnnnnnnnnnnnnnnnnnnnnnnnnnnnnnnnnnnnnnnnnnnnnnnnnnnnnnnnnnnnnnnnnnnnnnnnnnnnnnnnnnnnnnnnnnnnnnnnnnnnnnnnnnnnnnnnnnnnnnnnnnnnnnnnnnnnnnnnnnnnnnnnnnnnnnnnnnnnnnnnnnnnnnnnnnnnnnnnnnnnnnnnnnnnnnnnnnnnnnnnnnnnnnnnnnnnnnnnnnnnnnnnnnnnnnnnnnnnnnnnnnnnnnnnnnnnnnnnnnnnnnnnnnnnnnnnnnnnnnnnnnnnnnnnnnnnnnnnnnnnnnnnnnnnnnnnnnnnnnnnnnnnnnnnnnnnnnnnnnnnnnnnnnnnnnnnnnnnnnnnnnnnnnnnnnnnnnnnnnnnnnnnnnnnnnnnnnnnnnnnnnnnnnnnnnnnnnnnnnnnnnnnnnnnnnnnnnnnnnnnnnnnnnnnnnnnnnnnnnnnnnnnnnnnnnnnnnnnnnnnnnnnnnnnnnnnnnnnnnnnnnnnnnnnnnnnnnnnnnnnnnnnnnnnnnnnnnnnnnnnnnnnnnnnnnnnnnnnnnnnnnnnnnnnnnnnnnnnnnnnnnnnnnnnnnnnnnnnnnnnnnnnnnnnnnnnnnnnnnnnnnnnnnnnnnnnnnnnnnnnnnnnnnnnnnnnnnnnnnnnnnnnnnnnnnnnnnnnnnnnnnnnnnnnnnnnnnnnnnnnnnnnnnnnnnnnnnnnnnnnnnnnnnnnnnnnnnnnnnnnnnnnnnnnnnnnnnnnnnnnnnnnnnnnnnnnnnnnnnnnnnnnnnnnnnnnnnnnnnnnnnnnnnnnnnnnnnnnnnnnnnnnnnnnnnnnnnnnnnnnnnnnnnnnnnnnnnnnnnnnnnnnnnnnnnnnnnnnnnnnnnnnnnnnnnnnnnnnnnnnnnnnnnnnnnnnnnnnnnnnnnnnnnnnnnnnnnnnnnnnnnnnnnnnnnnnnnnnnnnnnnnnnnnnnnnnnnnnnnnnnnnnnnnnnnnnnnnnnnnnnnnnnnnnnnnnnnnnnnnnnnnnnnnnnnnnnnnnnnnnnnnnnnnnnnnnnnnnnnnnnnnnnnnnnnnnnnnnnnnnnnnnnnnnnnnnnnnnnnnnnnnnnnnnnnnnnnnnnnnnnnnnnnnnnnnnnnnnnnnnnnnnnnnnnnnnnnnnnnnnnnnnnnnnnnnnnnnnnnnnnnnnnnnnnnnnnnnnnnnnnnnnnnnnnnnnnnnnnnnnnnnnnnnnnnnnnnnnnnnnnnnnnnnnnnnnnnnnnnnnnnnnnnnnnnnnnnnnnnnnnnnnnnnnnnnnnnnnnnnnnnnnnnnnnnnnnnnnnnnnnnnnnnnnnnnnnnnnnnnnnnnnnnnnnnnnnnnnnnnnnnnnnnnnnnnnnnnnnnnnnnnnnnnnnnnnnnnnnnnnnnnnnnnnnnnnnnnnnnnnnnnnnnnnnnnnnnnnnnnnnnnnnnnnnnnnnnnnnnnnnnnnnnnnnnnnnnnnnnnnnnnnnnnnnnnnnnnnnnnnnnnnnnnnnnnnnnnnnnnnnnnnnnnnnnnnnnnnnnnnnnnnnnnnnnnnnnnnnnnnnnnnnnnnnnnnnnnnnnnnnnnnnnnnnnnnnnnnnnnnnnnnnnnnnnnnnnnnnnnnnnnnnnnnnnnnnnnnnnnnnnnnnnnnnnnnnnnnnnnnnnnnnnnnnnnnnnnnnnnnnnnnnnnnnnnnnnnnnnnnnnnnnnnnnnnnnnnnnnnnnnnnnnnnnnnnnnnnnnnnnnnnnnnnnnnnnnnnnnnnnnnnnnnnnnnnnnnnnnnnnnnnnnnnnnnnnnnnnnnnnnnnnnnnnnnnnnnnnnnnnnnnnnnnnnnnnnnnnnnnnnnnnnnnnnnnnnnnnnnnnnnnnnnncaacctttcacacgcgcagcgtgatccgcgcccctccgacccgctccccgctacagccactttcccaccttcccaccttcccacgttcccaccggacagtgaactgttcccgcccggagggcgcacgagcgttgccagggacgcagtccctggtacacgagcaacttctaacttctgttctccgcgccccgccgcggccaccttcccaccttcccacctggtgtgacgaatccgtctcgcatcccttcgcccgcaccgccggcgctccccagtcacccgccgccttgcattgcggactcaatgaggccaagataacacatatcacgtttgaccgggacataaaccggcggagaccccgccgcttggacaaggaacgaagcatgcccttcaatctcctgactgaagcgtggattccagtactgtggatcgacggacaaccggggcgagtcggcattcgcgacgccctcacccgggcgggaatgattcggcagatcgccgcctcgaatccaatggacaacgtggccctgctccgctttttgctggccgtgcttatgtggtgcaaggaggacgcgaagtcttctttggcggcgctggacgacaggggcgccggcataccggagaactggctcgcgaagctggaggaaaacaagcccgcgttcaatctgttgggtgacggtaagcggttctatcaggacgaattgctgaagggcaaggaatgtcggccgatcgccgatctgctcgtagagttccctggagccgattcggtgaatttcatgcgccacgttgtgcacggttcctacggattctgccccgcgtgttgcgccatgggaatcttgcgactctcggcctgggctccggcgaacaaattttatcccgcatcagttaacccgggctctgcggcatacgcgtttattgaagggaagaatctgttccacaccctttgcaggaatcttccagatgcaaattcacgaaccgatcaggctccctggttgggtagcgagcagccaagttcgcctgacgcagtagccaagcttgcctggcggccccgcaagttgtggttgaacatagcagagaacaccggtctttgtgcgtactgtgggcaaaccggaaggttgatcgacagtctatgtattgagaaagggtggcccactcctgtcacgagggggcagcaacttggcaaggatgtcttgtctgaatttcaaacacttcacgctgattacaaggcgaagacgaccgaaaggcgtaaggtggccgacaaggtcgtcaaggccgcgcctgtcatcgttaagtgcaggatggctgcgctcgcgcaagccgattcccatgcggagctagcgcccgaagacaagagcgttgcagcgaagattgcacgggtcatcgaccagttgttccgggcgggcaaccagaaggtcatcaaggaattgaccgggaagcccacgaaggaagagacgcccatgcttggtcagcaggatacgcagctgaagaagttctgggttgaagacccacaccttctcaaagaagccgagcccatcaggctgcctgacctgagccaggatgttggtctgcacgcctcgaagttctggcgagatgccttgcgtctgcgcggcaccaaggcacttgccatcggcatagtcggcgacgggaagtacgtcttccacgacacgccgtctgtccgtttacccggcaccgtcgcgactacgctggcgaagcttacaagcgattgcgctcaaatcctgcgcggcaaaggcacgaaaaaaaagccaaacgaaagcagcgaggccaaactccggcgacgcggtatacttaagacagttacatgcaaccctgaccggcagcaccccgaaattgattcagccgcaaaattgttgacgccgaatggcgaggctctgattcgtgaccggctgagccagctcaatgcgtcggcgggaaatgatccaaacgaagagaaagcattgctacatgaagtatatgcgcccgtggtggaacaggttatcgcttcggtaacacccggctcgccgcttcgccggcgggccgccaagaatggtgcccaagccctgctcaccaaaaagatcaaagaactggtcggaaagcacggtcaaccttcgaacacgagtgcccctgagggcgcactacctgcgagcacgaaacgagggggcacaaatggagaccagacatgagccagaccgcggaatacgtgcgacgactgtcaaacttgcaggagggccagcgctcccagctgcgccgcgtggccggacagccgctcgacgcaacgctgcagggtttcgacctcttcacgggtctctggtggccgttacgcgcaataagtccggccacgccgcgccgcgagccttcgtggcttgtagccaaactcttcagcgccttccacgtgccgcacatgcggccggaatcggccgcaggaccctctttgcctgcggtcttgggccgctgtgaaccgccgcgtcctgcttgcacggacgccgaaccgcttagttccgctgtgccggaccgcgagccgggcaagagccagttcattgcggcgcgcaagcatcgccgtcgcttcgacgcattgctttgctcggctctgtcgtcgctggagccacatttgtgctgggccctgggagaggtgtcccgcgcggtcgcggggcacgtgccgcatgcgaaggatgtcaaggggatcgactgggtgtatctgctcgatgacctctggctctgggacggacagtacaatccccaccacccaccgcagaagaatcggctggacgctcatgaacggctcgtgcattgtggtgaagctcaccgtacaccacaggacttatgggcttgcgagtatctgaatgcggcaaatcatctactcggaaggagaacatgaacatgctcatcgaaattcacatgatccaaaaccacaacccggccaacctcaaccgggacgatctaggcgcaccgaagacctgcatcttcgccggcgtgacccgggcgcgcatctccagccagtgcctcaaacgcagcatccgacgcagtccggagttttcagccgctttggaaaaggacggcggcgtacgtacacggcggctgattgaggcgattgcaaaagaggcggctggcgaaggcaatccaccgaaaaaagaacattgcgaggccattcggaaagtctttgtggatggcggggtcggcctcaaggatgacaacactttcgacatactcttctttcttccccaatccgccatcacgaaaatgggtgccgccgtgcgcgaggcaaacggcgacctgggcaagagatttgccgagatcatgcgcaactccgtgaagacccccgacatagcactttgcgggcgtatgaccgaattcaaggctaagggaccgtttgagggactcaaaggccagttcacggttgaggccgccctctcagccgcccatgccatctcgactcacgccgcgaccaacgaggtggactacttcaccgccgctgatgacgtggccgggcaggatgccggcgcgggccatgtcaaggaggccatgtttaactccgcctgcttctacaaacacttcgtcattgacttcgagcagttggtgaagaacctcgcgaatgatacggatctcgcccgcaagacggtacgatgtttccttgaagcagccgccagggccaacccctccggcaaacagcatgcattcgcggcgttcaatctaccggacggagttctggtcgaggtcaaaaccaattcggcgacgcccatcagttacgccaacgccttcgccgaccccgtgccggaaaaatcggaacgcggtctgatcggcgaaagcgtcgccagacttgggcagtatgcccacgatctcattgaaggctacgggatcgaggccgaccgcttctggttctcgccgaatctgcgccatcgcctgacctggatcgacaagactaagaaagaacacgagcaagaacaatcagtggtaggcccgaacgaattcggcgagttcgatcggttccttcgtacagtcatggacaaggtggaggcaggcgcgacgcctgcggggacggcgaaatgacggaaccgaacacactcttcctccgcctcgagggggctcttcaggcctggggcgatacgtcgaagatggtcatccgccggacgatggaagcacccacgaagtcaggtgtgcttgggttgctctgctgcgctctgggcatctcgcgcgaccgggcacgtcaagaactggcccgtttgcgcatgatccggatgggcgtgcggacggaccgcccgggcatccgttggtgggactaccacacggtgggggcgggaaccggcatgacgaccgcggggggcggactcaaaaccggccctcagggcaccctcatcacgcgccgggagtacctggccgacgccagcttcctcgtggcgctgcaagcggaagatcgtgcgctcgtcgatgagctggcgcacgcgctgcagcaacccaagtggccggtctttctggggcgcaggtgctgtccacccgcgcgcccggtgtatgccggcctggacgagtttcccgacctcgaagccgccctgctatctccgccttggtgcccgcgattcggcgaagatgctccacgcgatgagaataacgccccttgcagaacgattgccttggactgcctgctggaatactcgccacaagctgggcaagccgcaccgcccgacgccgaggtctggtacgacaccccggtctttttcaatccaccggtgcacgaaccacgactagttctgcgcaagcggatcactgttgccgtcggccaagccctgcagcgccgcctgcctgcgccgccgcgcccgcgcgccgactaccagaacaccgaatacaagaagcgccgcgaagcgcgcctcgtagcggatcagggcctctgcgtgttctgcaaaaaccctgccacaacggtgcaacacgttacctatcggcaggccggcgggaacgaaaccccggacgatcttcgctcgctctgccgcctctgccacgacgccgtcacgatgatcgaatatggcctgggcatggggctggaccgcatcgacccgtgcgaggcgcgctggcgtgacgcgatccttcgcacgcgcggcgagattatcgctttccgcagtgaagaaggccgccgccgcgctctacggtccgcgccgacgcaggtccgccgcgacttgctcgaagaggaggcgtcctgatgtacctttccacgctcctcataaacaccggcgacaatcccgaccgcccagactggagcatcacccgccgctggctgcgtaacctctaccgcgtccatcaacgcctgtctatggcatttccatcgcgggcagcatccaattgcgcccctcagcccaatcctgcccgaatgtcgcatgacagcgcggtgccaacaggatctgaggaaacggacgggcgtcaggcaagaaacgccgcgcactctttccttttccgcgtagacttgccggtagactcgaagcgcggcgtccgcaccccggttatactcgtgcagtcgcaccacaaacccgactgggattatgcgttcggcctcacgcccggcaagaccgatgcgcgcggccgtcccatcggcaacgctggctttctgctggcggagccgccgcaggtaaacgagtttcgccttgagcttgacgcggatgcccttctcatctgtcgcccgtcagactgcctgcgcgtgaaatctggcgacctgatacggttcctcctcagggccaaccccacgcgcaaggcccaagacggatcgcccaatggcaaacgccggcgcatcgctccgacgttcgacgaacatgcgcagtggctatcgcgcaaattcgggagcgcagccgatttgctcggcatagacaagtttgtgacctcctgggcgtacggctggcgcacgaaatacgagccgcaacccaatcagcgcatgcaatggtggtcagtgctgttcgaaggcacagccagggtgaagcacccccccgcgctaaaaggattgctcgaatccggaatcggctctgccaaggccttcggtttcggcctgctctctatcaagccgctgccacaggaggcagccgcgatcagccccccgggctaatcgcccgcgacgggctttccgatctctgacaagtagatagcgtcacgtttccgaacatcgaccggttgggcaggagttaacccgtggacgatctgcatcggctcgcgcgcttcgacgaccggctgagctatttgtacgtcgaacatgcacgcatcgaccaatgtgaaaaggccatcgccattcacgaccagagcggtacgacgcccgtgccggtggcaacgctagcgctgctgctgctcggccccggcaccaccctcactcatgccgccatgcgcagcctggcggacaacaattgcctggtagcctgggttggcgagcagggcgtacggatgtacgcacatagcacgggtggtacgcgcagcgcggcagcgctggtccgccaggccgcgctcgtgagcgatccggtgcagcgcctggctgttgtcaggcgcatgtaccgtcggcgctttcccggcacgatcgacccgcacctgacgttgcagcaactccgcgggatggaagggattcgcgttcgggaagcgtacgcggcagcgagtcgcaagactggcgtcgagtggcgcggacggcagtatgaccggcgtaagtgggccggcaccgacgacgtcaacaaagcgctttcgtgtgccaacagttgcctgtacgggatcgttcacgcggcgatcctatcggccggctactcggcagggctgggcttcatccacaccggcaagcagctttcgttcgtatacgacatcagcgacctctacaaaactgagctgacgattcccctggcctttgagatcgtcgcgggcggcggtgggccattggaacgccagacccgtttggcctgtcgcgatcggtttcgggcggcgcgccttctcgaacgcatcctgccggacatcgcatgggtgttgaatactgaggaagacccgcaggctgaggtgcttgacaccgacgccgcccatccgggccgcctgtgggatcccgatttgcccggcggggttgagggaggccagagctatggtcctgatgttgcttgaacgagtgccgacgtcgctgcgcggcgagttgacgcgctggctgctccagccgcacgcaggtgtgttcgtgggcaacgtgtcagccatggtgcgcgagaaactttgggagaagatcttaaacgagaagcgtaccggcgccgttaccatgatctatagcgccgctactgaacaggggtttgctatccgcacgtatgggcaaacgaccaaatggatagaagacttcgagggacttttgcttgtgaaaagccccgccaaaggctaaaaaaccagtgtcgtccccacgcacgtgggggtgaaccgatagcgtgctccccagtgaatttgaaatcgaggtcgtccccacgcacgtgggggtgaaccgatacccggtcgtacggcggacgagatacgggagtcgtccccacgcacgtgggggtgaaccgaatcgaagccgaaggatgctggcaccgatggcgtcgtccccacgcacgtgggggtgaaccgcccgg

SEQ ID NO: 1102 - DNA, 103635 bp, Artificial Sequence
  Synthetic Oligonucleotide
  misc_feature (1)..(96082): n is a, c, g, or t
nnnnnnnnnnnnnnnnnnnnnnnnnnnnnnnnnnnnnnnnnnnnnnnnnnnnnnnnnnnnnnnnnnnnnnnnnnnnnnnnnnnnnnnnnnnnnnnnnnnnnnnnnnnnnnnnnnnnnnnnnnnnnnnnnnnnnnnnnnnnnnnnnnnnnnnnnnnnnnnnnnnnnnnnnnnnnnnnnnnnnnnnnnnnnnnnnnnnnnnnnnnnnnnnnnnnnnnnnnnnnnnnnnnnnnnnnnnnnnnnnnnnnnnnnnnnnnnnnnnnnnnnnnnnnnnnnnnnnnnnnnnnnnnnnnnnnnnnnnnnnnnnnnnnnnnnnnnnnnnnnnnnnnnnnnnnnnnnnnnnnnnnnnnnnnnnnnnnnnnnnnnnnnnnnnnnnnnnnnnnnnnnnnnnnnnnnnnnnnnnnnnnnnnnnnnnnnnnnnnnnnnnnnnnnnnnnnnnnnnnnnnnnnnnnnnnnnnnnnnnnnnnnnnnnnnnnnnnnnnnnnnnnnnnnnnnnnnnnnnnnnnnnnnnnnnnnnnnnnnnnnnnnnnnnnnnnnnnnnnnnnnnnnnnnnnnnnnnnnnnnnnnnnnnnnnnnnnnnnnnnnnnnnnnnnnnnnnnnnnnnnnnnnnnnnnnnnnnnnnnnnnnnnnnnnnnnnnnnnnnnnnnnnnnnnnnnnnnnnnnnnnnnnnnnnnnnnnnnnnnnnnnnnnnnnnnnnnnnnnnnnnnnnnnnnnnnnnnnnnnnnnnnnnnnnnnnnnnnnnnnnnnnnnnnnnnnnnnnnnnnnnnnnnnnnnnnnnnnnnnnnnnnnnnnnnnnnnnnnnnnnnnnnnnnnnnnnnnnnnnnnnnnnnnnnnnnnnnnnnnnnnnnnnnnnnnnnnnnnnnnnnnnnnnnnnnnnnnnnnnnnnnnnnnnnnnnnnnnnnnnnnnnnnnnnnnnnnnnnnnnnnnnnnnnnnnnnnnnnnnnnnnnnnnnnnnnnnnnnnnnnnnnnnnnnnnnnnnnnnnnnnnnnnnnnnnnnnnnnnnnnnnnnnnnnnnnnnnnnnnnnnnnnnnnnnnnnnnnnnnnnnnnnnnnnnnnnnnnnnnnnnnnnnnnnnnnnnnnnnnnnnnnnnnnnnnnnnnnnnnnnnnnnnnnnnnnnnnnnnnnnnnnnnnnnnnnnnnnnnnnnnnnnnnnnnnnnnnnnnnnnnnnnnnnnnnnnnnnnnnnnnnnnnnnnnnnnnnnnnnnnnnnnnnnnnnnnnnnnnnnnnnnnnnnnnnnnnnnnnnnnnnnnnnnnnnnnnnnnnnnnnnnnnnnnnnnnnnnnnnnnnnnnnnnnnnnnnnnnnnnnnnnnnnnnnnnnnnnnnnnnnnnnnnnnnnnnnnnnnnnnnnnnnnnnnnnnnnnnnnnnnnnnnnnnnnnnnnnnnnnnnnnnnnnnnnnnnnnnnnnnnnnnnnnnnnnnnnnnnnnnnnnnnnnnnnnnnnnnnnnnnnnnnnnnnnnnnnnnnnnnnnnnnnnnnnnnnnnnnnnnnnnnnnnnnnnnnnnnnnnnnnnnnnnnnnnnnnnnnnnnnnnnnnnnnnnnnnnnnnnnnnnnnnnnnnnnnnnnnnnnnnnnnnnnnnnnnnnnnnnnnnnnnnnnnnnnnnnnnnnnnnnnnnnnnnnnnnnnnnnnnnnnnnnnnnnnnnnnnnnnnnnnnnnnnnnnnnnnnnnnnnnnnnnnnnnnnnnnnnnnnnnnnnnnnnnnnnnnnnnnnnnnnnnnnnnnnnnnnnnnnnnnnnnnnnnnnnnnnnnnnnnnnnnnnnnnnnnnnnnnnnnnnnnnnnnnnnnnnnnnnnnnnnnnnnnnnnnnnnnnnnnnnnnnnnnnnnnnnnnnnnnnnnnnnnnnnnnnnnnnnnnnnnnnnnnnnnnnnnnnnnnnnnnnnnnnnnnnnnnnnnnnnnnnnnnnnnnnnnnnnnnnnnnnnnnnnnnnnnnnnnnnnnnnnnnnnnnnnnnnnnnnnnnnnnnnnnnnnnnnnnnnnnnnnnnnnnnnnnnnnnnnnnnnnnnnnnnnnnnnnnnnnnnnnnnnnnnnnnnnnnnnnnnnnnnnnnnnnnnnnnnnnnnnnnnnnnnnnnnnnnnnnnnnnnnnnnnnnnnnnnnnnnnnnnnnnnnnnnnnnnnnnnnnnnnnnnnnnnnnnnnnnnnnnnnnnnnnnnnnnnnnnnnnnnnnnnnnnnnnnnnnnnnnnnnnnnnnnnnnnnnnnnnnnnnnnnnnnnnnnnnnnnnnnnnnnnnnnnnnnnnnnnnnnnnnnnnnnnnnnnnnnnnnnnnnnnnnnnnnnnnnnnnnnnnnnnnnnnnnnnnnnnnnnnnnnnnnnnnnnnnnnnnnnnnnnnnnnnnnnnnnnnnnnnnnnnnnnnnnnnnnnnnnnnnnnnnnnnnnnnnnnnnnnnnnnnnnnnnnnnnnnnnnnnnnnnnnnnnnnnnnnnnnnnnnnnnnnnnnnnnnnnnnnnnnnnnnnnnnnnnnnnnnnnnnnnnnnnnnnnnnnnnnnnnnnnnnnnnnnnnnnnnnnnnnnnnnnnnnnnnnnnnnnnnnnnnnnnnnnnnnnnnnnnnnnnnnnnnnnnnnnnnnnnnnnnnnnnnnnnnnnnnnnnnnnnnnnnnnnnnnnnnnnnnnnnnnnnnnnnnnnnnnnnnnnnnnnnnnnnnnnnnnnnnnnnnnnnnnnnnnnnnnnnnnnnnnnnnnnnnnnnnnnnnnnnnnnnnnnnnnnnnnnnnnnnnnnnnnnnnnnnnnnnnnnnnnnnnnnnnnnnnnnnnnnnnnnnnnnnnnnnnnnnnnnnnnnnnnnnnnnnnnnnnnnnnnnnnnnnnnnnnnnnnnnnnnnnnnnnnnnnnnnnnnnnnnnnnnnnnnnnnnnnnnnnnnnnnnnnnnnnnnnnnnnnnnnnnnnnnnnnnnnnnnnnnnnnnnnnnnnnnnnnnnnnnnnnnnnnnnnnnnnnnnnnnnnnnnnnnnnnnnnnnnnnnnnnnnnnnnnnnnnnnnnnnnnnnnnnnnnnnnnnnnnnnnnnnnnnnnnnnnnnnnnnnnnnnnnnnnnnnnnnnnnnnnnnnnnnnnnnnnnnnnnnnnnnnnnnnnnnnnnnnnnnnnnnnnnnnnnnnnnnnnnnnnnnnnnnnnnnnnnnnnnnnnnnnnnnnnnnnnnnnnnnnnnnnnnnnnnnnnnnnnnnnnnnnnnnnnnnnnnnnnnnnnnnnnnnnnnnnnnnnnnnnnnnnnnnnnnnnnnnnnnnnnnnnnnnnnnnnnnnnnnnnnnnnnnnnnnnnnnnnnnnnnnnnnnnnnnnnnnnnnnnnnnnnnnnnnnnnnnnnnnnnnnnnnnnnnnnnnnnnnnnnnnnnnnnnnnnnnnnnnnnnnnnnnnnnnnnnnnnnnnnnnnnnnnnnnnnnnnnnnnnnnnnnnnnnnnnnnnnnnnnnnnnnnnnnnnnnnnnnnnnnnnnnnnnnnnnnnnnnnnnnnnnnnnnnnnnnnnnnnnnnnnnnnnnnnnnnnnnnnnnnnnnnnnnnnnnnnnnnnnnnnnnnnnnnnnnnnnnnnnnnnnnnnnnnnnnnnnnnnnnnnnnnnnnnnnnnnnnnnnnnnnnnnnnnnnnnnnnnnnnnnnnnnnnnnnnnnnnnnnnnnnnnnnnnnnnnnnnnnnnnnnnnnnnnnnnnnnnnnnnnnnnnnnnnnnnnnnnnnnnnnnnnnnnnnnnnnnnnnnnnnnnnnnnnnnnnnnnnnnnnnnnnnnnnnnnnnnnnnnnnnnnnnnnnnnnnnnnnnnnnnnnnnnnnnnnnnnnnnnnnnnnnnnnnnnnnnnnnnnnnnnnnnnnnnnnnnnnnnnnnnnnnnnnnnnnnnnnnnnnnnnnnnnnnnnnnnnnnnnnnnnnnnnnnnnnnnnnnnnnnnnnnnnnnnnnnnnnnnnnnnnnnnnnnnnnnnnnnnnnnnnnnnnnnnnnnnnnnnnnnnnnnnnnnnnnnnnnnnnnnnnnnnnnnnnnnnnnnnnnnnnnnnnnnnnnnnnnnnnnnnnnnnnnnnnnnnnnnnnnnnnnnnnnnnnnnnnnnnnnnnnnnnnnnnnnnnnnnnnnnnnnnnnnnnnnnnnnnnnnnnnnnnnnnnnnnnnnnnnnnnnnnnnnnnnnnnnnnnnnnnnnnnnnnnnnnnnnnnnnnnnnnnnnnnnnnnnnnnnnnnnnnnnnnnnnnnnnnnnnnnnnnnnnnnnnnnnnnnnnnnnnnnnnnnnnnnnnnnnnnnnnnnnnnnnnnnnnnnnnnnnnnnnnnnnnnnnnnnnnnnnnnnnnnnnnnnnnnnnnnnnnnnnnnnnnnnnnnnnnnnnnnnnnnnnnnnnnnnnnnnnnnnnnnnnnnnnnnnnnnnnnnnnnnnnnnnnnnnnnnnnnnnnnnnnnnnnnnnnnnnnnnnnnnnnnnnnnnnnnnnnnnnnnnnnnnnnnnnnnnnnnnnnnnnnnnnnnnnnnnnnnnnnnnnnnnnnnnnnnnnnnnnnnnnnnnnnnnnnnnnnnnnnnnnnnnnnnnnnnnnnnnnnnnnnnnnnnnnnnnnnnnnnnnnnnnnnnnnnnnnnnnnnnnnnnnnnnnnnnnnnnnnnnnnnnnnnnnnnnnnnnnnnnnnnnnnnnnnnnnnnnnnnnnnnnnnnnnnnnnnnnnnnnnnnnnnnnnnnnnnnnnnnnnnnnnnnnnnnnnnnnnnnnnnnnnnnnnnnnnnnnnnnnnnnnnnnnnnnnnnnnnnnnnnnnnnnnnnnnnnnnnnnnnnnnnnnnnnnnnnnnnnnnnnnnnnnnnnnnnnnnnnnnnnnnnnnnnnnnnnnnnnnnnnnnnnnnnnnnnnnnnnnnnnnnnnnnnnnnnnnnnnnnnnnnnnnnnnnnnnnnnnnnnnnnnnnnnnnnnnnnnnnnnnnnnnnnnnnnnnnnnnnnnnnnnnnnnnnnnnnnnnnnnnnnnnnnnnnnnnnnnnnnnnnnnnnnnnnnnnnnnnnnnnnnnnnnnnnnnnnnnnnnnnnnnnnnnnnnnnnnnnnnnnnnnnnnnnnnnnnnnnnnnnnnnnnnnnnnnnnnnnnnnnnnnnnnnnnnnnnnnnnnnnnnnnnnnnnnnnnnnnnnnnnnnnnnnnnnnnnnnnnnnnnnnnnnnnnnnnnnnnnnnnnnnnnnnnnnnnnnnnnnnnnnnnnnnnnnnnnnnnnnnnnnnnnnnnnnnnnnnnnnnnnnnnnnnnnnnnnnnnnnnnnnnnnnnnnnnnnnnnnnnnnnnnnnnnnnnnnnnnnnnnnnnnnnnnnnnnnnnnnnnnnnnnnnnnnnnnnnnnnnnnnnnnnnnnnnnnnnnnnnnnnnnnnnnnnnnnnnnnnnnnnnnnnnnnnnnnnnnnnnnnnnnnnnnnnnnnnnnnnnnnnnnnnnnnnnnnnnnnnnnnnnnnnnnnnnnnnnnnnnnnnnnnnnnnnnnnnnnnnnnnnnnnnnnnnnnnnnnnnnnnnnnnnnnnnnnnnnnnnnnnnnnnnnnnnnnnnnnnnnnnnnnnnnnnnnnnnnnnnnnnnnnnnnnnnnnnnnnnnnnnnnnnnnnnnnnnnnnnnnnnnnnnnnnnnnnnnnnnnnnnnnnnnnnnnnnnnnnnnnnnnnnnnnnnnnnnnnnnnnnnnnnnnnnnnnnnnnnnnnnnnnnnnnnnnnnnnnnnnnnnnnnnnnnnnnnnnnnnnnnnnnnnnnnnnnnnnnnnnnnnnnnnnnnnnnnnnnnnnnnnnnnnnnnnnnnnnnnnnnnnnnnnnnnnnnnnnnnnnnnnnnnnnnnnnnnnnnnnnnnnnnnnnnnnnnnnnnnnnnnnnnnnnnnnnnnnnnnnnnnnnnnnnnnnnnnnnnnnnnnnnnnnnnnnnnnnnnnnnnnnnnnnnnnnnnnnnnnnnnnnnnnnnnnnnnnnnnnnnnnnnnnnnnnnnnnnnnnnnnnnnnnnnnnnnnnnnnnnnnnnnnnnnnnnnnnnnnnnnnnnnnnnnnnnnnnnnnnnnnnnnnnnnnnnnnnnnnnnnnnnnnnnnnnnnnnnnnnnnnnnnnnnnnnnnnnnnnnnnnnnnnnnnnnnnnnnnnnnnnnnnnnnnnnnnnnnnnnnnnnnnnnnnnnnnnnnnnnnnnnnnnnnnnnnnnnnnnnnnnnnnnnnnnnnnnnnnnnnnnnnnnnnnnnnnnnnnnnnnnnnnnnnnnnnnnnnnnnnnnnnnnnnnnnnnnnnnnnnnnnnnnnnnnnnnnnnnnnnnnnnnnnnnnnnnnnnnnnnnnnnnnnnnnnnnnnnnnnnnnnnnnnnnnnnnnnnnnnnnnnnnnnnnnnnnnnnnnnnnnnnnnnnnnnnnnnnnnnnnnnnnnnnnnnnnnnnnnnnnnnnnnnnnnnnnnnnnnnnnnnnnnnnnnnnnnnnnnnnnnnnnnnnnnnnnnnnnnnnnnnnnnnnnnnnnnnnnnnnnnnnnnnnnnnnnnnnnnnnnnnnnnnnnnnnnnnnnnnnnnnnnnnnnnnnnnnnnnnnnnnnnnnnnnnnnnnnnnnnnnnnnnnnnnnnnnnnnnnnnnnnnnnnnnnnnnnnnnnnnnnnnnnnnnnnnnnnnnnnnnnnnnnnnnnnnnnnnnnnnnnnnnnnnnnnnnnnnnnnnnnnnnnnnnnnnnnnnnnnnnnnnnnnnnnnnnnnnnnnnnnnnnnnnnnnnnnnnnnnnnnnnnnnnnnnnnnnnnnnnnnnnnnnnnnnnnnnnnnnnnnnnnnnnnnnnnnnnnnnnnnnnnnnnnnnnnnnnnnnnnnnnnnnnnnnnnnnnnnnnnnnnnnnnnnnnnnnnnnnnnnnnnnnnnnnnnnnnnnnnnnnnnnnnnnnnnnnnnnnnnnnnnnnnnnnnnnnnnnnnnnnnnnnnnnnnnnnnnnnnnnnnnnnnnnnnnnnnnnnnnnnnnnnnnnnnnnnnnnnnnnnnnnnnnnnnnnnnnnnnnnnnnnnnnnnnnnnnnnnnnnnnnnnnnnnnnnnnnnnnnnnnnnnnnnnnnnnnnnnnnnnnnnnnnnnnnnnnnnnnnnnnnnnnnnnnnnnnnnnnnnnnnnnnnnnnnnnnnnnnnnnnnnnnnnnnnnnnnnnnnnnnnnnnnnnnnnnnnnnnnnnnnnnnnnnnnnnnnnnnnnnnnnnnnnnnnnnnnnnnnnnnnnnnnnnnnnnnnnnnnnnnnnnnnnnnnnnnnnnnnnnnnnnnnnnnnnnnnnnnnnnnnnnnnnnnnnnnnnnnnnnnnnnnnnnnnnnnnnnnnnnnnnnnnnnnnnnnnnnnnnnnnnnnnnnnnnnnnnnnnnnnnnnnnnnnnnnnnnnnnnnnnnnnnnnnnnnnnnnnnnnnnnnnnnnnnnnnnnnnnnnnnnnnnnnnnnnnnnnnnnnnnnnnnnnnnnnnnnnnnnnnnnnnnnnnnnnnnnnnnnnnnnnnnnnnnnnnnnnnnnnnnnnnnnnnnnnnnnnnnnnnnnnnnnnnnnnnnnnnnnnnnnnnnnnnnnnnnnnnnnnnnnnnnnnnnnnnnnnnnnnnnnnnnnnnnnnnnnnnnnnnnnnnnnnnnnnnnnnnnnnnnnnnnnnnnnnnnnnnnnnnnnnnnnnnnnnnnnnnnnnnnnnnnnnnnnnnnnnnnnnnnnnnnnnnnnnnnnnnnnnnnnnnnnnnnnnnnnnnnnnnnnnnnnnnnnnnnnnnnnnnnnnnnnnnnnnnnnnnnnnnnnnnnnnnnnnnnnnnnnnnnnnnnnnnnnnnnnnnnnnnnnnnnnnnnnnnnnnnnnnnnnnnnnnnnnnnnnnnnnnnnnnnnnnnnnnnnnnnnnnnnnnnnnnnnnnnnnnnnnnnnnnnnnnnnnnnnnnnnnnnnnnnnnnnnnnnnnnnnnnnnnnnnnnnnnnnnnnnnnnnnnnnnnnnnnnnnnnnnnnnnnnnnnnnnnnnnnnnnnnnnnnnnnnnnnnnnnnnnnnnnnnnnnnnnnnnnnnnnnnnnnnnnnnnnnnnnnnnnnnnnnnnnnnnnnnnnnnnnnnnnnnnnnnnnnnnnnnnnnnnnnnnnnnnnnnnnnnnnnnnnnnnnnnnnnnnnnnnnnnnnnnnnnnnnnnnnnnnnnnnnnnnnnnnnnnnnnnnnnnnnnnnnnnnnnnnnnnnnnnnnnnnnnnnnnnnnnnnnnnnnnnnnnnnnnnnnnnnnnnnnnnnnnnnnnnnnnnnnnnnnnnnnnnnnnnnnnnnnnnnnnnnnnnnnnnnnnnnnnnnnnnnnnnnnnnnnnnnnnnnnnnnnnnnnnnnnnnnnnnnnnnnnnnnnnnnnnnnnnnnnnnnnnnnnnnnnnnnnnnnnnnnnnnnnnnnnnnnnnnnnnnnnnnnnnnnnnnnnnnnnnnnnnnnnnnnnnnnnnnnnnnnnnnnnnnnnnnnnnnnnnnnnnnnnnnnnnnnnnnnnnnnnnnnnnnnnnnnnnnnnnnnnnnnnnnnnnnnnnnnnnnnnnnnnnnnnnnnnnnnnnnnnnnnnnnnnnnnnnnnnnnnnnnnnnnnnnnnnnnnnnnnnnnnnnnnnnnnnnnnnnnnnnnnnnnnnnnnnnnnnnnnnnnnnnnnnnnnnnnnnnnnnnnnnnnnnnnnnnnnnnnnnnnnnnnnnnnnnnnnnnnnnnnnnnnnnnnnnnnnnnnnnnnnnnnnnnnnnnnnnnnnnnnnnnnnnnnnnnnnnnnnnnnnnnnnnnnnnnnnnnnnnnnnnnnnnnnnnnnnnnnnnnnnnnnnnnnnnnnnnnnnnnnnnnnnnnnnnnnnnnnnnnnnnnnnnnnnnnnnnnnnnnnnnnnnnnnnnnnnnnnnnnnnnnnnnnnnnnnnnnnnnnnnnnnnnnnnnnnnnnnnnnnnnnnnnnnnnnnnnnnnnnnnnnnnnnnnnnnnnnnnnnnnnnnnnnnnnnnnnnnnnnnnnnnnnnnnnnnnnnnnnnnnnnnnnnnnnnnnnnnnnnnnnnnnnnnnnnnnnnnnnnnnnnnnnnnnnnnnnnnnnnnnnnnnnnnnnnnnnnnnnnnnnnnnnnnnnnnnnnnnnnnnnnnnnnnnnnnnnnnnnnnnnnnnnnnnnnnnnnnnnnnnnnnnnnnnnnnnnnnnnnnnnnnnnnnnnnnnnnnnnnnnnnnnnnnnnnnnnnnnnnnnnnnnnnnnnnnnnnnnnnnnnnnnnnnnnnnnnnnnnnnnnnnnnnnnnnnnnnnnnnnnnnnnnnnnnnnnnnnnnnnnnnnnnnnnnnnnnnnnnnnnnnnnnnnnnnnnnnnnnnnnnnnnnnnnnnnnnnnnnnnnnnnnnnnnnnnnnnnnnnnnnnnnnnnnnnnnnnnnnnnnnnnnnnnnnnnnnnnnnnnnnnnnnnnnnnnnnnnnnnnnnnnnnnnnnnnnnnnnnnnnnnnnnnnnnnnnnnnnnnnnnnnnnnnnnnnnnnnnnnnnnnnnnnnnnnnnnnnnnnnnnnnnnnnnnnnnnnnnnnnnnnnnnnnnnnnnnnnnnnnnnnnnnnnnnnnnnnnnnnnnnnnnnnnnnnnnnnnnnnnnnnnnnnnnnnnnnnnnnnnnnnnnnnnnnnnnnnnnnnnnnnnnnnnnnnnnnnnnnnnnnnnnnnnnnnnnnnnnnnnnnnnnnnnnnnnnnnnnnnnnnnnnnnnnnnnnnnnnnnnnnnnnnnnnnnnnnnnnnnnnnnnnnnnnnnnnnnnnnnnnnnnnnnnnnnnnnnnnnnnnnnnnnnnnnnnnnnnnnnnnnnnnnnnnnnnnnnnnnnnnnnnnnnnnnnnnnnnnnnnnnnnnnnnnnnnnnnnnnnnnnnnnnnnnnnnnnnnnnnnnnnnnnnnnnnnnnnnnnnnnnnnnnnnnnnnnnnnnnnnnnnnnnnnnnnnnnnnnnnnnnnnnnnnnnnnnnnnnnnnnnnnnnnnnnnnnnnnnnnnnnnnnnnnnnnnnnnnnnnnnnnnnnnnnnnnnnnnnnnnnnnnnnnnnnnnnnnnnnnnnnnnnnnnnnnnnnnnnnnnnnnnnnnnnnnnnnnnnnnnnnnnnnnnnnnnnnnnnnnnnnnnnnnnnnnnnnnnnnnnnnnnnnnnnnnnnnnnnnnnnnnnnnnnnnnnnnnnnnnnnnnnnnnnnnnnnnnnnnnnnnnnnnnnnnnnnnnnnnnnnnnnnnnnnnnnnnnnnnnnnnnnnnnnnnnnnnnnnnnnnnnnnnnnnnnnnnnnnnnnnnnnnnnnnnnnnnnnnnnnnnnnnnnnnnnnnnnnnnnnnnnnnnnnnnnnnnnnnnnnnnnnnnnnnnnnnnnnnnnnnnnnnnnnnnnnnnnnnnnnnnnnnnnnnnnnnnnnnnnnnnnnnnnnnnnnnnnnnnnnnnnnnnnnnnnnnnnnnnnnnnnnnnnnnnnnnnnnnnnnnnnnnnnnnnnnnnnnnnnnnnnnnnnnnnnnnnnnnnnnnnnnnnnnnnnnnnnnnnnnnnnnnnnnnnnnnnnnnnnnnnnnnnnnnnnnnnnnnnnnnnnnnnnnnnnnnnnnnnnnnnnnnnnnnnnnnnnnnnnnnnnnnnnnnnnnnnnnnnnnnnnnnnnnnnnnnnnnnnnnnnnnnnnnnnnnnnnnnnnnnnnnnnnnnnnnnnnnnnnnnnnnnnnnnnnnnnnnnnnnnnnnnnnnnnnnnnnnnnnnnnnnnnnnnnnnnnnnnnnnnnnnnnnnnnnnnnnnnnnnnnnnnnnnnnnnnnnnnnnnnnnnnnnnnnnnnnnnnnnnnnnnnnnnnnnnnnnnnnnnnnnnnnnnnnnnnnnnnnnnnnnnnnnnnnnnnnnnnnnnnnnnnnnnnnnnnnnnnnnnnnnnnnnnnnnnnnnnnnnnnnnnnnnnnnnnnnnnnnnnnnnnnnnnnnnnnnnnnnnnnnnnnnnnnnnnnnnnnnnnnnnnnnnnnnnnnnnnnnnnnnnnnnnnnnnnnnnnnnnnnnnnnnnnnnnnnnnnnnnnnnnnnnnnnnnnnnnnnnnnnnnnnnnnnnnnnnnnnnnnnnnnnnnnnnnnnnnnnnnnnnnnnnnnnnnnnnnnnnnnnnnnnnnnnnnnnnnnnnnnnnnnnnnnnnnnnnnnnnnnnnnnnnnnnnnnnnnnnnnnnnnnnnnnnnnnnnnnnnnnnnnnnnnnnnnnnnnnnnnnnnnnnnnnnnnnnnnnnnnnnnnnnnnnnnnnnnnnnnnnnnnnnnnnnnnnnnnnnnnnnnnnnnnnnnnnnnnnnnnnnnnnnnnnnnnnnnnnnnnnnnnnnnnnnnnnnnnnnnnnnnnnnnnnnnnnnnnnnnnnnnnnnnnnnnnnnnnnnnnnnnnnnnnnnnnnnnnnnnnnnnnnnnnnnnnnnnnnnnnnnnnnnnnnnnnnnnnnnnnnnnnnnnnnnnnnnnnnnnnnnnnnnnnnnnnnnnnnnnnnnnnnnnnnnnnnnnnnnnnnnnnnnnnnnnnnnnnnnnnnnnnnnnnnnnnnnnnnnnnnnnnnnnnnnnnnnnnnnnnnnnnnnnnnnnnnnnnnnnnnnnnnnnnnnnnnnnnnnnnnnnnnnnnnnnnnnnnnnnnnnnnnnnnnnnnnnnnnnnnnnnnnnnnnnnnnnnnnnnnnnnnnnnnnnnnnnnnnnnnnnnnnnnnnnnnnnnnnnnnnnnnnnnnnnnnnnnnnnnnnnnnnnnnnnnnnnnnnnnnnnnnnnnnnnnnnnnnnnnnnnnnnnnnnnnnnnnnnnnnnnnnnnnnnnnnnnnnnnnnnnnnnnnnnnnnnnnnnnnnnnnnnnnnnnnnnnnnnnnnnnnnnnnnnnnnnnnnnnnnnnnnnnnnnnnnnnnnnnnnnnnnnnnnnnnnnnnnnnnnnnnnnnnnnnnnnnnnnnnnnnnnnnnnnnnnnnnnnnnnnnnnnnnnnnnnnnnnnnnnnnnnnnnnnnnnnnnnnnnnnnnnnnnnnnnnnnnnnnnnnnnnnnnnnnnnnnnnnnnnnnnnnnnnnnnnnnnnnnnnnnnnnnnnnnnnnnnnnnnnnnnnnnnnnnnnnnnnnnnnnnnnnnnnnnnnnnnnnnnnnnnnnnnnnnnnnnnnnnnnnnnnnnnnnnnnnnnnnnnnnnnnnnnnnnnnnnnnnnnnnnnnnnnnnnnnnnnnnnnnnnnnnnnnnnnnnnnnnnnnnnnnnnnnnnnnnnnnnnnnnnnnnnnnnnnnnnnnnnnnnnnnnnnnnnnnnnnnnnnnnnnnnnnnnnnnnnnnnnnnnnnnnnnnnnnnnnnnnnnnnnnnnnnnnnnnnnnnnnnnnnnnnnnnnnnnnnnnnnnnnnnnnnnnnnnnnnnnnnnnnnnnnnnnnnnnnnnnnnnnnnnnnnnnnnnnnnnnnnnnnnnnnnnnnnnnnnnnnnnnnnnnnnnnnnnnnnnnnnnnnnnnnnnnnnnnnnnnnnnnnnnnnnnnnnnnnnnnnnnnnnnnnnnnnnnnnnnnnnnnnnnnnnnnnnnnnnnnnnnnnnnnnnnnnnnnnnnnnnnnnnnnnnnnnnnnnnnnnnnnnnnnnnnnnnnnnnnnnnnnnnnnnnnnnnnnnnnnnnnnnnnnnnnnnnnnnnnnnnnnnnnnnnnnnnnnnnnnnnnnnnnnnnnnnnnnnnnnnnnnnnnnnnnnnnnnnnnnnnnnnnnnnnnnnnnnnnnnnnnnnnnnnnnnnnnnnnnnnnnnnnnnnnnnnnnnnnnnnnnnnnnnnnnnnnnnnnnnnnnnnnnnnnnnnnnnnnnnnnnnnnnnnnnnnnnnnnnnnnnnnnnnnnnnnnnnnnnnnnnnnnnnnnnnnnnnnnnnnnnnnnnnnnnnnnnnnnnnnnnnnnnnnnnnnnnnnnnnnnnnnnnnnnnnnnnnnnnnnnnnnnnnnnnnnnnnnnnnnnnnnnnnnnnnnnnnnnnnnnnnnnnnnnnnnnnnnnnnnnnnnnnnnnnnnnnnnnnnnnnnnnnnnnnnnnnnnnnnnnnnnnnnnnnnnnnnnnnnnnnnnnnnnnnnnnnnnnnnnnnnnnnnnnnnnnnnnnnnnnnnnnnnnnnnnnnnnnnnnnnnnnnnnnnnnnnnnnnnnnnnnnnnnnnnnnnnnnnnnnnnnnnnnnnnnnnnnnnnnnnnnnnnnnnnnnnnnnnnnnnnnnnnnnnnnnnnnnnnnnnnnnnnnnnnnnnnnnnnnnnnnnnnnnnnnnnnnnnnnnnnnnnnnnnnnnnnnnnnnnnnnnnnnnnnnnnnnnnnnnnnnnnnnnnnnnnnnnnnnnnnnnnnnnnnnnnnnnnnnnnnnnnnnnnnnnnnnnnnnnnnnnnnnnnnnnnnnnnnnnnnnnnnnnnnnnnnnnnnnnnnnnnnnnnnnnnnnnnnnnnnnnnnnnnnnnnnnnnnnnnnnnnnnnnnnnnnnnnnnnnnnnnnnnnnnnnnnnnnnnnnnnnnnnnnnnnnnnnnnnnnnnnnnnnnnnnnnnnnnnnnnnnnnnnnnnnnnnnnnnnnnnnnnnnnnnnnnnnnnnnnnnnnnnnnnnnnnnnnnnnnnnnnnnnnnnnnnnnnnnnnnnnnnnnnnnnnnnnnnnnnnnnnnnnnnnnnnnnnnnnnnnnnnnnnnnnnnnnnnnnnnnnnnnnnnnnnnnnnnnnnnnnnnnnnnnnnnnnnnnnnnnnnnnnnnnnnnnnnnnnnnnnnnnnnnnnnnnnnnnnnnnnnnnnnnnnnnnnnnnnnnnnnnnnnnnnnnnnnnnnnnnnnnnnnnnnnnnnnnnnnnnnnnnnnnnnnnnnnnnnnnnnnnnnnnnnnnnnnnnnnnnnnnnnnnnnnnnnnnnnnnnnnnnnnnnnnnnnnnnnnnnnnnnnnnnnnnnnnnnnnnnnnnnnnnnnnnnnnnnnnnnnnnnnnnnnnnnnnnnnnnnnnnnnnnnnnnnnnnnnnnnnnnnnnnnnnnnnnnnnnnnnnnnnnnnnnnnnnnnnnnnnnnnnnnnnnnnnnnnnnnnnnnnnnnnnnnnnnnnnnnnnnnnnnnnnnnnnnnnnnnnnnnnnnnnnnnnnnnnnnnnnnnnnnnnnnnnnnnnnnnnnnnnnnnnnnnnnnnnnnnnnnnnnnnnnnnnnnnnnnnnnnnnnnnnnnnnnnnnnnnnnnnnnnnnnnnnnnnnnnnnnnnnnnnnnnnnnnnnnnnnnnnnnnnnnnnnnnnnnnnnnnnnnnnnnnnnnnnnnnnnnnnnnnnnnnnnnnnnnnnnnnnnnnnnnnnnnnnnnnnnnnnnnnnnnnnnnnnnnnnnnnnnnnnnnnnnnnnnnnnnnnnnnnnnnnnnnnnnnnnnnnnnnnnnnnnnnnnnnnnnnnnnnnnnnnnnnnnnnnnnnnnnnnnnnnnnnnnnnnnnnnnnnnnnnnnnnnnnnnnnnnnnnnnnnnnnnnnnnnnnnnnnnnnnnnnnnnnnnnnnnnnnnnnnnnnnnnnnnnnnnnnnnnnnnnnnnnnnnnnnnnnnnnnnnnnnnnnnnnnnnnnnnnnnnnnnnnnnnnnnnnnnnnnnnnnnnnnnnnnnnnnnnnnnnnnnnnnnnnnnnnnnnnnnnnnnnnnnnnnnnnnnnnnnnnnnnnnnnnnnnnnnnnnnnnnnnnnnnnnnnnnnnnnnnnnnnnnnnnnnnnnnnnnnnnnnnnnnnnnnnnnnnnnnnnnnnnnnnnnnnnnnnnnnnnnnnnnnnnnnnnnnnnnnnnnnnnnnnnnnnnnnnnnnnnnnnnnnnnnnnnnnnnnnnnnnnnnnnnnnnnnnnnnnnnnnnnnnnnnnnnnnnnnnnnnnnnnnnnnnnnnnnnnnnnnnnnnnnnnnnnnnnnnnnnnnnnnnnnnnnnnnnnnnnnnnnnnnnnnnnnnnnnnnnnnnnnnnnnnnnnnnnnnnnnnnnnnnnnnnnnnnnnnnnnnnnnnnnnnnnnnnnnnnnnnnnnnnnnnnnnnnnnnnnnnnnnnnnnnnnnnnnnnnnnnnnnnnnnnnnnnnnnnnnnnnnnnnnnnnnnnnnnnnnnnnnnnnnnnnnnnnnnnnnnnnnnnnnnnnnnnnnnnnnnnnnnnnnnnnnnnnnnnnnnnnnnnnnnnnnnnnnnnnnnnnnnnnnnnnnnnnnnnnnnnnnnnnnnnnnnnnnnnnnnnnnnnnnnnnnnnnnnnnnnnnnnnnnnnnnnnnnnnnnnnnnnnnnnnnnnnnnnnnnnnnnnnnnnnnnnnnnnnnnnnnnnnnnnnnnnnnnnnnnnnnnnnnnnnnnnnnnnnnnnnnnnnnnnnnnnnnnnnnnnnnnnnnnnnnnnnnnnnnnnnnnnnnnnnnnnnnnnnnnnnnnnnnnnnnnnnnnnnnnnnnnnnnnnnnnnnnnnnnnnnnnnnnnnnnnnnnnnnnnnnnnnnnnnnnnnnnnnnnnnnnnnnnnnnnnnnnnnnnnnnnnnnnnnnnnnnnnnnnnnnnnnnnnnnnnnnnnnnnnnnnnnnnnnnnnnnnnnnnnnnnnnnnnnnnnnnnnnnnnnnnnnnnnnnnnnnnnnnnnnnnnnnnnnnnnnnnnnnnnnnnnnnnnnnnnnnnnnnnnnnnnnnnnnnnnnnnnnnnnnnnnnnnnnnnnnnnnnnnnnnnnnnnnnnnnnnnnnnnnnnnnnnnnnnnnnnnnnnnnnnnnnnnnnnnnnnnnnnnnnnnnnnnnnnnnnnnnnnnnnnnnnnnnnnnnnnnnnnnnnnnnnnnnnnnnnnnnnnnnnnnnnnnnnnnnnnnnnnnnnnnnnnnnnnnnnnnnnnnnnnnnnnnnnnnnnnnnnnnnnnnnnnnnnnnnnnnnnnnnnnnnnnnnnnnnnnnnnnnnnnnnnnnnnnnnnnnnnnnnnnnnnnnnnnnnnnnnnnnnnnnnnnnnnnnnnnnnnnnnnnnnnnnnnnnnnnnnnnnnnnnnnnnnnnnnnnnnnnnnnnnnnnnnnnnnnnnnnnnnnnnnnnnnnnnnnnnnnnnnnnnnnnnnnnnnnnnnnnnnnnnnnnnnnnnnnnnnnnnnnnnnnnnnnnnnnnnnnnnnnnnnnnnnnnnnnnnnnnnnnnnnnnnnnnnnnnnnnnnnnnnnnnnnnnnnnnnnnnnnnnnnnnnnnnnnnnnnnnnnnnnnnnnnnnnnnnnnnnnnnnnnnnnnnnnnnnnnnnnnnnnnnnnnnnnnnnnnnnnnnnnnnnnnnnnnnnnnnnnnnnnnnnnnnnnnnnnnnnnnnnnnnnnnnnnnnnnnnnnnnnnnnnnnnnnnnnnnnnnnnnnnnnnnnnnnnnnnnnnnnnnnnnnnnnnnnnnnnnnnnnnnnnnnnnnnnnnnnnnnnnnnnnnnnnnnnnnnnnnnnnnnnnnnnnnnnnnnnnnnnnnnnnnnnnnnnnnnnnnnnnnnnnnnnnnnnnnnnnnnnnnnnnnnnnnnnnnnnnnnnnnnnnnnnnnnnnnnnnnnnnnnnnnnnnnnnnnnnnnnnnnnnnnnnnnnnnnnnnnnnnnnnnnnnnnnnnnnnnnnnnnnnnnnnnnnnnnnnnnnnnnnnnnnnnnnnnnnnnnnnnnnnnnnnnnnnnnnnnnnnnnnnnnnnnnnnnnnnnnnnnnnnnnnnnnnnnnnnnnnnnnnnnnnnnnnnnnnnnnnnnnnnnnnnnnnnnnnnnnnnnnnnnnnnnnnnnnnnnnnnnnnnnnnnnnnnnnnnnnnnnnnnnnnnnnnnnnnnnnnnnnnnnnnnnnnnnnnnnnnnnnnnnnnnnnnnnnnnnnnnnnnnnnnnnnnnnnnnnnnnnnnnnnnnnnnnnnnnnnnnnnnnnnnnnnnnnnnnnnnnnnnnnnnnnnnnnnnnnnnnnnnnnnnnnnnnnnnnnnnnnnnnnnnnnnnnnnnnnnnnnnnnnnnnnnnnnnnnnnnnnnnnnnnnnnnnnnnnnnnnnnnnnnnnnnnnnnnnnnnnnnnnnnnnnnnnnnnnnnnnnnnnnnnnnnnnnnnnnnnnnnnnnnnnnnnnnnnnnnnnnnnnnnnnnnnnnnnnnnnnnnnnnnnnnnnnnnnnnnnnnnnnnnnnnnnnnnnnnnnnnnnnnnnnnnnnnnnnnnnnnnnnnnnnnnnnnnnnnnnnnnnnnnnnnnnnnnnnnnnnnnnnnnnnnnnnnnnnnnnnnnnnnnnnnnnnnnnnnnnnnnnnnnnnnnnnnnnnnnnnnnnnnnnnnnnnnnnnnnnnnnnnnnnnnnnnnnnnnnnnnnnnnnnnnnnnnnnnnnnnnnnnnnnnnnnnnnnnnnnnnnnnnnnnnnnnnnnnnnnnnnnnnnnnnnnnnnnnnnnnnnnnnnnnnnnnnnnnnnnnnnnnnnnnnnnnnnnnnnnnnnnnnnnnnnnnnnnnnnnnnnnnnnnnnnnnnnnnnnnnnnnnnnnnnnnnnnnnnnnnnnnnnnnnnnnnnnnnnnnnnnnnnnnnnnnnnnnnnnnnnnnnnnnnnnnnnnnnnnnnnnnnnnnnnnnnnnnnnnnnnnnnnnnnnnnnnnnnnnnnnnnnnnnnnnnnnnnnnnnnnnnnnnnnnnnnnnnnnnnnnnnnnnnnnnnnnnnnnnnnnnnnnnnnnnnnnnnnnnnnnnnnnnnnnnnnnnnnnnnnnnnnnnnnnnnnnnnnnnnnnnnnnnnnnnnnnnnnnnnnnnnnnnnnnnnnnnnnnnnnnnnnnnnnnnnnnnnnnnnnnnnnnnnnnnnnnnnnnnnnnnnnnnnnnnnnnnnnnnnnnnnnnnnnnnnnnnnnnnnnnnnnnnnnnnnnnnnnnnnnnnnnnnnnnnnnnnnnnnnnnnnnnnnnnnnnnnnnnnnnnnnnnnnnnnnnnnnnnnnnnnnnnnnnnnnnnnnnnnnnnnnnnnnnnnnnnnnnnnnnnnnnnnnnnnnnnnnnnnnnnnnnnnnnnnnnnnnnnnnnnnnnnnnnnnnnnnnnnnnnnnnnnnnnnnnnnnnnnnnnnnnnnnnnnnnnnnnnnnnnnnnnnnnnnnnnnnnnnnnnnnnnnnnnnnnnnnnnnnnnnnnnnnnnnnnnnnnnnnnnnnnnnnnnnnnnnnnnnnnnnnnnnnnnnnnnnnnnnnnnnnnnnnnnnnnnnnnnnnnnnnnnnnnnnnnnnnnnnnnnnnnnnnnnnnnnnnnnnnnnnnnnnnnnnnnnnnnnnnnnnnnnnnnnnnnnnnnnnnnnnnnnnnnnnnnnnnnnnnnnnnnnnnnnnnnnnnnnnnnnnnnnnnnnnnnnnnnnnnnnnnnnnnnnnnnnnnnnnnnnnnnnnnnnnnnnnnnnnnnnnnnnnnnnnnnnnnnnnnnnnnnnnnnnnnnnnnnnnnnnnnnnnnnnnnnnnnnnnnnnnnnnnnnnnnnnnnnnnnnnnnnnnnnnnnnnnnnnnnnnnnnnnnnnnnnnnnnnnnnnnnnnnnnnnnnnnnnnnnnnnnnnnnnnnnnnnnnnnnnnnnnnnnnnnnnnnnnnnnnnnnnnnnnnnnnnnnnnnnnnnnnnnnnnnnnnnnnnnnnnnnnnnnnnnnnnnnnnnnnnnnnnnnnnnnnnnnnnnnnnnnnnnnnnnnnnnnnnnnnnnnnnnnnnnnnnnnnnnnnnnnnnnnnnnnnnnnnnnnnnnnnnnnnnnnnnnnnnnnnnnnnnnnnnnnnnnnnnnnnnnnnnnnnnnnnnnnnnnnnnnnnnnnnnnnnnnnnnnnnnnnnnnnnnnnnnnnnnnnnnnnnnnnnnnnnnnnnnnnnnnnnnnnnnnnnnnnnnnnnnnnnnnnnnnnnnnnnnnnnnnnnnnnnnnnnnnnnnnnnnnnnnnnnnnnnnnnnnnnnnnnnnnnnnnnnnnnnnnnnnnnnnnnnnnnnnnnnnnnnnnnnnnnnnnnnnnnnnnnnnnnnnnnnnnnnnnnnnnnnnnnnnnnnnnnnnnnnnnnnnnnnnnnnnnnnnnnnnnnnnnnnnnnnnnnnnnnnnnnnnnnnnnnnnnnnnnnnnnnnnnnnnnnnnnnnnnnnnnnnnnnnnnnnnnnnnnnnnnnnnnnnnnnnnnnnnnnnnnnnnnnnnnnnnnnnnnnnnnnnnnnnnnnnnnnnnnnnnnnnnnnnnnnnnnnnnnnnnnnnnnnnnnnnnnnnnnnnnnnnnnnnnnnnnnnnnnnnnnnnnnnnnnnnnnnnnnnnnnnnnnnnnnnnnnnnnnnnnnnnnnnnnnnnnnnnnnnnnnnnnnnnnnnnnnnnnnnnnnnnnnnnnnnnnnnnnnnnnnnnnnnnnnnnnnnnnnnnnnnnnnnnnnnnnnnnnnnnnnnnnnnnnnnnnnnnnnnnnnnnnnnnnnnnnnnnnnnnnnnnnnnnnnnnnnnnnnnnnnnnnnnnnnnnnnnnnnnnnnnnnnnnnnnnnnnnnnnnnnnnnnnnnnnnnnnnnnnnnnnnnnnnnnnnnnnnnnnnnnnnnnnnnnnnnnnnnnnnnnnnnnnnnnnnnnnnnnnnnnnnnnnnnnnnnnnnnnnnnnnnnnnnnnnnnnnnnnnnnnnnnnnnnnnnnnnnnnnnnnnnnnnnnnnnnnnnnnnnnnnnnnnnnnnnnnnnnnnnnnnnnnnnnnnnnnnnnnnnnnnnnnnnnnnnnnnnnnnnnnnnnnnnnnnnnnnnnnnnnnnnnnnnnnnnnnnnnnnnnnnnnnnnnnnnnnnnnnnnnnnnnnnnnnnnnnnnnnnnnnnnnnnnnnnnnnnnnnnnnnnnnnnnnnnnnnnnnnnnnnnnnnnnnnnnnnnnnnnnnnnnnnnnnnnnnnnnnnnnnnnnnnnnnnnnnnnnnnnnnnnnnnnnnnnnnnnnnnnnnnnnnnnnnnnnnnnnnnnnnnnnnnnnnnnnnnnnnnnnnnnnnnnnnnnnnnnnnnnnnnnnnnnnnnnnnnnnnnnnnnnnnnnnnnnnnnnnnnnnnnnnnnnnnnnnnnnnnnnnnnnnnnnnnnnnnnnnnnnnnnnnnnnnnnnnnnnnnnnnnnnnnnnnnnnnnnnnnnnnnnnnnnnnnnnnnnnnnnnnnnnnnnnnnnnnnnnnnnnnnnnnnnnnnnnnnnnnnnnnnnnnnnnnnnnnnnnnnnnnnnnnnnnnnnnnnnnnnnnnnnnnnnnnnnnnnnnnnnnnnnnnnnnnnnnnnnnnnnnnnnnnnnnnnnnnnnnnnnnnnnnnnnnnnnnnnnnnnnnnnnnnnnnnnnnnnnnnnnnnnnnnnnnnnnnnnnnnnnnnnnnnnnnnnnnnnnnnnnnnnnnnnnnnnnnnnnnnnnnnnnnnnnnnnnnnnnnnnnnnnnnnnnnnnnnnnnnnnnnnnnnnnnnnnnnnnnnnnnnnnnnnnnnnnnnnnnnnnnnnnnnnnnnnnnnnnnnnnnnnnnnnnnnnnnnnnnnnnnnnnnnnnnnnnnnnnnnnnnnnnnnnnnnnnnnnnnnnnnnnnnnnnnnnnnnnnnnnnnnnnnnnnnnnnnnnnnnnnnnnnnnnnnnnnnnnnnnnnnnnnnnnnnnnnnnnnnnnnnnnnnnnnnnnnnnnnnnnnnnnnnnnnnnnnnnnnnnnnnnnnnnnnnnnnnnnnnnnnnnnnnnnnnnnnnnnnnnnnnnnnnnnnnnnnnnnnnnnnnnnnnnnnnnnnnnnnnnnnnnnnnnnnnnnnnnnnnnnnnnnnnnnnnnnnnnnnnnnnnnnnnnnnnnnnnnnnnnnnnnnnnnnnnnnnnnnnnnnnnnnnnnnnnnnnnnnnnnnnnnnnnnnnnnnnnnnnnnnnnnnnnnnnnnnnnnnnnnnnnnnnnnnnnnnnnnnnnnnnnnnnnnnnnnnnnnnnnnnnnnnnnnnnnnnnnnnnnnnnnnnnnnnnnnnnnnnnnnnnnnnnnnnnnnnnnnnnnnnnnnnnnnnnnnnnnnnnnnnnnnnnnnnnnnnnnnnnnnnnnnnnnnnnnnnnnnnnnnnnnnnnnnnnnnnnnnnnnnnnnnnnnnnnnnnnnnnnnnnnnnnnnnnnnnnnnnnnnnnnnnnnnnnnnnnnnnnnnnnnnnnnnnnnnnnnnnnnnnnnnnnnnnnnnnnnnnnnnnnnnnnnnnnnnnnnnnnnnnnnnnnnnnnnnnnnnnnnnnnnnnnnnnnnnnnnnnnnnnnnnnnnnnnnnnnnnnnnnnnnnnnnnnnnnnnnnnnnnnnnnnnnnnnnnnnnnnnnnnnnnnnnnnnnnnnnnnnnnnnnnnnnnnnnnnnnnnnnnnnnnnnnnnnnnnnnnnnnnnnnnnnnnnnnnnnnnnnnnnnnnnnnnnnnnnnnnnnnnnnnnnnnnnnnnnnnnnnnnnnnnnnnnnnnnnnnnnnnnnnnnnnnnnnnnnnnnnnnnnnnnnnnnnnnnnnnnnnnnnnnnnnnnnnnnnnnnnnnnnnnnnnnnnnnnnnnnnnnnnnnnnnnnnnnnnnnnnnnnnnnnnnnnnnnnnnnnnnnnnnnnnnnnnnnnnnnnnnnnnnnnnnnnnnnnnnnnnnnnnnnnnnnnnnnnnnnnnnnnnnnnnnnnnnnnnnnnnnnnnnnnnnnnnnnnnnnnnnnnnnnnnnnnnnnnnnnnnnnnnnnnnnnnnnnnnnnnnnnnnnnnnnnnnnnnnnnnnnnnnnnnnnnnnnnnnnnnnnnnnnnnnnnnnnnnnnnnnnnnnnnnnnnnnnnnnnnnnnnnnnnnnnnnnnnnnnnnnnnnnnnnnnnnnnnnnnnnnnnnnnnnnnnnnnnnnnnnnnnnnnnnnnnnnnnnnnnnnnnnnnnnnnnnnnnnnnnnnnnnnnnnnnnnnnnnnnnnnnnnnnnnnnnnnnnnnnnnnnnnnnnnnnnnnnnnnnnnnnnnnnnnnnnnnnnnnnnnnnnnnnnnnnnnnnnnnnnnnnnnnnnnnnnnnnnnnnnnnnnnnnnnnnnnnnnnnnnnnnnnnnnnnnnnnnnnnnnnnnnnnnnnnnnnnnnnnnnnnnnnnnnnnnnnnnnnnnnnnnnnnnnnnnnnnnnnnnnnnnnnnnnnnnnnnnnnnnnnnnnnnnnnnnnnnnnnnnnnnnnnnnnnnnnnnnnnnnnnnnnnnnnnnnnnnnnnnnnnnnnnnnnnnnnnnnnnnnnnnnnnnnnnnnnnnnnnnnnnnnnnnnnnnnnnnnnnnnnnnnnnnnnnnnnnnnnnnnnnnnnnnnnnnnnnnnnnnnnnnnnnnnnnnnnnnnnnnnnnnnnnnnnnnnnnnnnnnnnnnnnnnnnnnnnnnnnnnnnnnnnnnnnnnnnnnnnnnnnnnnnnnnnnnnnnnnnnnnnnnnnnnnnnnnnnnnnnnnnnnnnnnnnnnnnnnnnnnnnnnnnnnnnnnnnnnnnnnnnnnnnnnnnnnnnnnnnnnnnnnnnnnnnnnnnnnnnnnnnnnnnnnnnnnnnnnnnnnnnnnnnnnnnnnnnnnnnnnnnnnnnnnnnnnnnnnnnnnnnnnnnnnnnnnnnnnnnnnnnnnnnnnnnnnnnnnnnnnnnnnnnnnnnnnnnnnnnnnnnnnnnnnnnnnnnnnnnnnnnnnnnnnnnnnnnnnnnnnnnnnnnnnnnnnnnnnnnnnnnnnnnnnnnnnnnnnnnnnnnnnnnnnnnnnnnnnnnnnnnnnnnnnnnnnnnnnnnnnnnnnnnnnnnnnnnnnnnnnnnnnnnnnnnnnnnnnnnnnnnnnnnnnnnnnnnnnnnnnnnnnnnnnnnnnnnnnnnnnnnnnnnnnnnnnnnnnnnnnnnnnnnnnnnnnnnnnnnnnnnnnnnnnnnnnnnnnnnnnnnnnnnnnnnnnnnnnnnnnnnnnnnnnnnnnnnnnnnnnnnnnnnnnnnnnnnnnnnnnnnnnnnnnnnnnnnnnnnnnnnnnnnnnnnnnnnnnnnnnnnnnnnnnnnnnnnnnnnnnnnnnnnnnnnnnnnnnnnnnnnnnnnnnnnnnnnnnnnnnnnnnnnnnnnnnnnnnnnnnnnnnnnnnnnnnnnnnnnnnnnnnnnnnnnnnnnnnnnnnnnnnnnnnnnnnnnnnnnnnnnnnnnnnnnnnnnnnnnnnnnnnnnnnnnnnnnnnnnnnnnnnnnnnnnnnnnnnnnnnnnnnnnnnnnnnnnnnnnnnnnnnnnnnnnnnnnnnnnnnnnnnnnnnnnnnnnnnnnnnnnnnnnnnnnnnnnnnnnnnnnnnnnnnnnnnnnnnnnnnnnnnnnnnnnnnnnnnnnnnnnnnnnnnnnnnnnnnnnnnnnnnnnnnnnnnnnnnnnnnnnnnnnnnnnnnnnnnnnnnnnnnnnnnnnnnnnnnnnnnnnnnnnnnnnnnnnnnnnnnnnnnnnnnnnnnnnnnnnnnnnnnnnnnnnnnnnnnnnnnnnnnnnnnnnnnnnnnnnnnnnnnnnnnnnnnnnnnnnnnnnnnnnnnnnnnnnnnnnnnnnnnnnnnnnnnnnnnnnnnnnnnnnnnnnnnnnnnnnnnnnnnnnnnnnnnnnnnnnnnnnnnnnnnnnnnnnnnnnnnnnnnnnnnnnnnnnnnnnnnnnnnnnnnnnnnnnnnnnnnnnnnnnnnnnnnnnnnnnnnnnnnnnnnnnnnnnnnnnnnnnnnnnnnnnnnnnnnnnnnnnnnnnnnnnnnnnnnnnnnnnnnnnnnnnnnnnnnnnnnnnnnnnnnnnnnnnnnnnnnnnnnnnnnnnnnnnnnnnnnnnnnnnnnnnnnnnnnnnnnnnnnnnnnnnnnnnnnnnnnnnnnnnnnnnnnnnnnnnnnnnnnnnnnnnnnnnnnnnnnnnnnnnnnnnnnnnnnnnnnnnnnnnnnnnnnnnnnnnnnnnnnnnnnnnnnnnnnnnnnnnnnnnnnnnnnnnnnnnnnnnnnnnnnnnnnnnnnnnnnnnnnnnnnnnnnnnnnnnnnnnnnnnnnnnnnnnnnnnnnnnnnnnnnnnnnnnnnnnnnnnnnnnnnnnnnnnnnnnnnnnnnnnnnnnnnnnnnnnnnnnnnnnnnnnnnnnnnnnnnnnnnnnnnnnnnnnnnnnnnnnnnnnnnnnnnnnnnnnnnnnnnnnnnnnnnnnnnnnnnnnnnnnnnnnnnnnnnnnnnnnnnnnnnnnnnnnnnnnnnnnnnnnnnnnnnnnnnnnnnnnnnnnnnnnnnnnnnnnnnnnnnnnnnnnnnnnnnnnnnnnnnnnnnnnnnnnnnnnnnnnnnnnnnnnnnnnnnnnnnnnnnnnnnnnnnnnnnnnnnnnnnnnnnnnnnnnnnnnnnnnnnnnnnnnnnnnnnnnnnnnnnnnnnnnnnnnnnnnnnnnnnnnnnnnnnnnnnnnnnnnnnnnnnnnnnnnnnnnnnnnnnnnnnnnnnnnnnnnnnnnnnnnnnnnnnnnnnnnnnnnnnnnnnnnnnnnnnnnnnnnnnnnnnnnnnnnnnnnnnnnnnnnnnnnnnnnnnnnnnnnnnnnnnnnnnnnnnnnnnnnnnnnnnnnnnnnnnnnnnnnnnnnnnnnnnnnnnnnnnnnnnnnnnnnnnnnnnnnnnnnnnnnnnnnnnnnnnnnnnnnnnnnnnnnnnnnnnnnnnnnnnnnnnnnnnnnnnnnnnnnnnnnnnnnnnnnnnnnnnnnnnnnnnnnnnnnnnnnnnnnnnnnnnnnnnnnnnnnnnnnnnnnnnnnnnnnnnnnnnnnnnnnnnnnnnnnnnnnnnnnnnnnnnnnnnnnnnnnnnnnnnnnnnnnnnnnnnnnnnnnnnnnnnnnnnnnnnnnnnnnnnnnnnnnnnnnnnnnnnnnnnnnnnnnnnnnnnnnnnnnnnnnnnnnnnnnnnnnnnnnnnnnnnnnnnnnnnnnnnnnnnnnnnnnnnnnnnnnnnnnnnnnnnnnnnnnnnnnnnnnnnnnnnnnnnnnnnnnnnnnnnnnnnnnnnnnnnnnnnnnnnnnnnnnnnnnnnnnnnnnnnnnnnnnnnnnnnnnnnnnnnnnnnnnnnnnnnnnnnnnnnnnnnnnnnnnnnnnnnnnnnnnnnnnnnnnnnnnnnnnnnnnnnnnnnnnnnnnnnnnnnnnnnnnnnnnnnnnnnnnnnnnnnnnnnnnnnnnnnnnnnnnnnnnnnnnnnnnnnnnnnnnnnnnnnnnnnnnnnnnnnnnnnnnnnnnnnnnnnnnnnnnnnnnnnnnnnnnnnnnnnnnnnnnnnnnnnnnnnnnnnnnnnnnnnnnnnnnnnnnnnnnnnnnnnnnnnnnnnnnnnnnnnnnnnnnnnnnnnnnnnnnnnnnnnnnnnnnnnnnnnnnnnnnnnnnnnnnnnnnnnnnnnnnnnnnnnnnnnnnnnnnnnnnnnnnnnnnnnnnnnnnnnnnnnnnnnnnnnnnnnnnnnnnnnnnnnnnnnnnnnnnnnnnnnnnnnnnnnnnnnnnnnnnnnnnnnnnnnnnnnnnnnnnnnnnnnnnnnnnnnnnnnnnnnnnnnnnnnnnnnnnnnnnnnnnnnnnnnnnnnnnnnnnnnnnnnnnnnnnnnnnnnnnnnnnnnnnnnnnnnnnnnnnnnnnnnnnnnnnnnnnnnnnnnnnnnnnnnnnnnnnnnnnnnnnnnnnnnnnnnnnnnnnnnnnnnnnnnnnnnnnnnnnnnnnnnnnnnnnnnnnnnnnnnnnnnnnnnnnnnnnnnnnnnnnnnnnnnnnnnnnnnnnnnnnnnnnnnnnnnnnnnnnnnnnnnnnnnnnnnnnnnnnnnnnnnnnnnnnnnnnnnnnnnnnnnnnnnnnnnnnnnnnnnnnnnnnnnnnnnnnnnnnnnnnnnnnnnnnnnnnnnnnnnnnnnnnnnnnnnnnnnnnnnnnnnnnnnnnnnnnnnnnnnnnnnnnnnnnnnnnnnnnnnnnnnnnnnnnnnnnnnnnnnnnnnnnnnnnnnnnnnnnnnnnnnnnnnnnnnnnnnnnnnnnnnnnnnnnnnnnnnnnnnnnnnnnnnnnnnnnnnnnnnnnnnnnnnnnnnnnnnnnnnnnnnnnnnnnnnnnnnnnnnnnnnnnnnnnnnnnnnnnnnnnnnnnnnnnnnnnnnnnnnnnnnnnnnnnnnnnnnnnnnnnnnnnnnnnnnnnnnnnnnnnnnnnnnnnnnnnnnnnnnnnnnnnnnnnnnnnnnnnnnnnnnnnnnnnnnnnnnnnnnnnnnnnnnnnnnnnnnnnnnnnnnnnnnnnnnnnnnnnnnnnnnnnnnnnnnnnnnnnnnnnnnnnnnnnnnnnnnnnnnnnnnnnnnnnnnnnnnnnnnnnnnnnnnnnnnnnnnnnnnnnnnnnnnnnnnnnnnnnnnnnnnnnnnnnnnnnnnnnnnnnnnnnnnnnnnnnnnnnnnnnnnnnnnnnnnnnnnnnnnnnnnnnnnnnnnnnnnnnnnnnnnnnnnnnnnnnnnnnnnnnnnnnnnnnnnnnnnnnnnnnnnnnnnnnnnnnnnnnnnnnnnnnnnnnnnnnnnnnnnnnnnnnnnnnnnnnnnnnnnnnnnnnnnnnnnnnnnnnnnnnnnnnnnnnnnnnnnnnnnnnnnnnnnnnnnnnnnnnnnnnnnnnnnnnnnnnnnnnnnnnnnnnnnnnnnnnnnnnnnnnnnnnnnnnnnnnnnnnnnnnnnnnnnnnnnnnnnnnnnnnnnnnnnnnnnnnnnnnnnnnnnnnnnnnnnnnnnnnnnnnnnnnnnnnnnnnnnnnnnnnnnnnnnnnnnnnnnnnnnnnnnnnnnnnnnnnnnnnnnnnnnnnnnnnnnnnnnnnnnnnnnnnnnnnnnnnnnnnnnnnnnnnnnnnnnnnnnnnnnnnnnnnnnnnnnnnnnnnnnnnnnnnnnnnnnnnnnnnnnnnnnnnnnnnnnnnnnnnnnnnnnnnnnnnnnnnnnnnnnnnnnnnnnnnnnnnnnnnnnnnnnnnnnnnnnnnnnnnnnnnnnnnnnnnnnnnnnnnnnnnnnnnnnnnnnnnnnnnnnnnnnnnnnnnnnnnnnnnnnnnnnnnnnnnnnnnnnnnnnnnnnnnnnnnnnnnnnnnnnnnnnnnnnnnnnnnnnnnnnnnnnnnnnnnnnnnnnnnnnnnnnnnnnnnnnnnnnnnnnnnnnnnnnnnnnnnnnnnnnnnnnnnnnnnnnnnnnnnnnnnnnnnnnnnnnnnnnnnnnnnnnnnnnnnnnnnnnnnnnnnnnnnnnnnnnnnnnnnnnnnnnnnnnnnnnnnnnnnnnnnnnnnnnnnnnnnnnnnnnnnnnnnnnnnnnnnnnnnnnnnnnnnnnnnnnnnnnnnnnnnnnnnnnnnnnnnnnnnnnnnnnnnnnnnnnnnnnnnnnnnnnnnnnnnnnnnnnnnnnnnnnnnnnnnnnnnnnnnnnnnnnnnnnnnnnnnnnnnnnnnnnnnnnnnnnnnnnnnnnnnnnnnnnnnnnnnnnnnnnnnnnnnnnnnnnnnnnnnnnnnnnnnnnnnnnnnnnnnnnnnnnnnnnnnnnnnnnnnnnnnnnnnnnnnnnnnnnnnnnnnnnnnnnnnnnnnnnnnnnnnnnnnnnnnnnnnnnnnnnnnnnnnnnnnnnnnnnnnnnnnnnnnnnnnnnnnnnnnnnnnnnnnnnnnnnnnnnnnnnnnnnnnnnnnnnnnnnnnnnnnnnnnnnnnnnnnnnnnnnnnnnnnnnnnnnnnnnnnnnnnnnnnnnnnnnnnnnnnnnnnnnnnnnnnnnnnnnnnnnnnnnnnnnnnnnnnnnnnnnnnnnnnnnnnnnnnnnnnnnnnnnnnnnnnnnnnnnnnnnnnnnnnnnnnnnnnnnnnnnnnnnnnnnnnnnnnnnnnnnnnnnnnnnnnnnnnnnnnnnnnnnnnnnnnnnnnnnnnnnnnnnnnnnnnnnnnnnnnnnnnnnnnnnnnnnnnnnnnnnnnnnnnnnnnnnnnnnnnnnnnnnnnnnnnnnnnnnnnnnnnnnnnnnnnnnnnnnnnnnnnnnnnnnnnnnnnnnnnnnnnnnnnnnnnnnnnnnnnnnnnnnnnnnnnnnnnnnnnnnnnnnnnnnnnnnnnnnnnnnnnnnnnnnnnnnnnnnnnnnnnnnnnnnnnnnnnnnnnnnnnnnnnnnnnnnnnnnnnnnnnnnnnnnnnnnnnnnnnnnnnnnnnnnnnnnnnnnnnnnnnnnnnnnnnnnnnnnnnnnnnnnnnnnnnnnnnnnnnnnnnnnnnnnnnnnnnnnnnnnnnnnnnnnnnnnnnnnnnnnnnnnnnnnnnnnnnnnnnnnnnnnnnnnnnnnnnnnnnnnnnnnnnnnnnnnnnnnnnnnnnnnnnnnnnnnnnnnnnnnnnnnnnnnnnnnnnnnnnnnnnnnnnnnnnnnnnnnnnnnnnnnnnnnnnnnnnnnnnnnnnnnnnnnnnnnnnnnnnnnnnnnnnnnnnnnnnnnnnnnnnnnnnnnnnnnnnnnnnnnnnnnnnnnnnnnnnnnnnnnnnnnnnnnnnnnnnnnnnnnnnnnnnnnnnnnnnnnnnnnnnnnnnnnnnnnnnnnnnnnnnnnnnnnnnnnnnnnnnnnnnnnnnnnnnnnnnnnnnnnnnnnnnnnnnnnnnnnnnnnnnnnnnnnnnnnnnnnnnnnnnnnnnnnnnnnnnnnnnnnnnnnnnnnnnnnnnnnnnnnnnnnnnnnnnnnnnnnnnnnnnnnnnnnnnnnnnnnnnnnnnnnnnnnnnnnnnnnnnnnnnnnnnnnnnnnnnnnnnnnnnnnnnnnnnnnnnnnnnnnnnnnnnnnnnnnnnnnnnnnnnnnnnnnnnnnnnnnnnnnnnnnnnnnnnnnnnnnnnnnnnnnnnnnnnnnnnnnnnnnnnnnnnnnnnnnnnnnnnnnnnnnnnnnnnnnnnnnnnnnnnnnnnnnnnnnnnnnnnnnnnnnnnnnnnnnnnnnnnnnnnnnnnnnnnnnnnnnnnnnnnnnnnnnnnnnnnnnnnnnnnnnnnnnnnnnnnnnnnnnnnnnnnnnnnnnnnnnnnnnnnnnnnnnnnnnnnnnnnnnnnnnnnnnnnnnnnnnnnnnnnnnnnnnnnnnnnnnnnnnnnnnnnnnnnnnnnnnnnnnnnnnnnnnnnnnnnnnnnnnnnnnnnnnnnnnnnnnnnnnnnnnnnnnnnnnnnnnnnnnnnnnnnnnnnnnnnnnnnnnnnnnnnnnnnnnnnnnnnnnnnnnnnnnnnnnnnnnnnnnnnnnnnnnnnnnnnnnnnnnnnnnnnnnnnnnnnnnnnnnnnnnnnnnnnnnnnnnnnnnnnnnnnnnnnnnnnnnnnnnnnnnnnnnnnnnnnnnnnnnnnnnnnnnnnnnnnnnnnnnnnnnnnnnnnnnnnnnnnnnnnnnnnnnnnnnnnnnnnnnnnnnnnnnnnnnnnnnnnnnnnnnnnnnnnnnnnnnnnnnnnnnnnnnnnnnnnnnnnnnnnnnnnnnnnnnnnnnnnnnnnnnnnnnnnnnnnnnnnnnnnnnnnnnnnnnnnnnnnnnnnnnnnnnnnnnnnnnnnnnnnnnnnnnnnnnnnnnnnnnnnnnnnnnnnnnnnnnnnnnnnnnnnnnnnnnnnnnnnnnnnnnnnnnnnnnnnnnnnnnnnnnnnnnnnnnnnnnnnnnnnnnnnnnnnnnnnnnnnnnnnnnnnnnnnnnnnnnnnnnnnnnnnnnnnnnnnnnnnnnnnnnnnnnnnnnnnnnnnnnnnnnnnnnnnnnnnnnnnnnnnnnnnnnnnnnnnnnnnnnnnnnnnnnnnnnnnnnnnnnnnnnnnnnnnnnnnnnnnnnnnnnnnnnnnnnnnnnnnnnnnnnnnnnnnnnnnnnnnnnnnnnnnnnnnnnnnnnnnnnnnnnnnnnnnnnnnnnnnnnnnnnnnnnnnnnnnnnnnnnnnnnnnnnnnnnnnnnnnnnnnnnnnnnnnnnnnnnnnnnnnnnnnnnnnnnnnnnnnnnnnnnnnnnnnnnnnnnnnnnnnnnnnnnnnnnnnnnnnnnnnnnnnnnnnnnnnnnnnnnnnnnnnnnnnnnnnnnnnnnnnnnnnnnnnnnnnnnnnnnnnnnnnnnnnnnnnnnnnnnnnnnnnnnnnnnnnnnnnnnnnnnnnnnnnnnnnnnnnnnnnnnnnnnnnnnnnnnnnnnnnnnnnnnnnnnnnnnnnnnnnnnnnnnnnnnnnnnnnnnnnnnnnnnnnnnnnnnnnnnnnnnnnnnnnnnnnnnnnnnnnnnnnnnnnnnnnnnnnnnnnnnnnnnnnnnnnnnnnnnnnnnnnnnnnnnnnnnnnnnnnnnnnnnnnnnnnnnnnnnnnnnnnnnnnnnnnnnnnnnnnnnnnnnnnnnnnnnnnnnnnnnnnnnnnnnnnnnnnnnnnnnnnnnnnnnnnnnnnnnnnnnnnnnnnnnnnnnnnnnnnnnnnnnnnnnnnnnnnnnnnnnnnnnnnnnnnnnnnnnnnnnnnnnnnnnnnnnnnnnnnnnnnnnnnnnnnnnnnnnnnnnnnnnnnnnnnnnnnnnnnnnnnnnnnnnnnnnnnnnnnnnnnnnnnnnnnnnnnnnnnnnnnnnnnnnnnnnnnnnnnnnnnnnnnnnnnnnnnnnnnnnnnnnnnnnnnnnnnnnnnnnnnnnnnnnnnnnnnnnnnnnnnnnnnnnnnnnnnnnnnnnnnnnnnnnnnnnnnnnnnnnnnnnnnnnnnnnnnnnnnnnnnnnnnnnnnnnnnnnnnnnnnnnnnnnnnnnnnnnnnnnnnnnnnnnnnnnnnnnnnnnnnnnnnnnnnnnnnnnnnnnnnnnnnnnnnnnnnnnnnnnnnnnnnnnnnnnnnnnnnnnnnnnnnnnnnnnnnnnnnnnnnnnnnnnnnnnnnnnnnnnnnnnnnnnnnnnnnnnnnnnnnnnnnnnnnnnnnnnnnnnnnnnnnnnnnnnnnnnnnnnnnnnnnnnnnnnnnnnnnnnnnnnnnnnnnnnnnnnnnnnnnnnnnnnnnnnnnnnnnnnnnnnnnnnnnnnnnnnnnnnnnnnnnnnnnnnnnnnnnnnnnnnnnnnnnnnnnnnnnnnnnnnnnnnnnnnnnnnnnnnnnnnnnnnnnnnnnnnnnnnnnnnnnnnnnnnnnnnnnnnnnnnnnnnnnnnnnnnnnnnnnnnnnnnnnnnnnnnnnnnnnnnnnnnnnnnnnnnnnnnnnnnnnnnnnnnnnnnnnnnnnnnnnnnnnnnnnnnnnnnnnnnnnnnnnnnnnnnnnnnnnnnnnnnnnnnnnnnnnnnnnnnnnnnnnnnnnnnnnnnnnnnnnnnnnnnnnnnnnnnnnnnnnnnnnnnnnnnnnnnnnnnnnnnnnnnnnnnnnnnnnnnnnnnnnnnnnnnnnnnnnnnnnnnnnnnnnnnnnnnnnnnnnnnnnnnnnnnnnnnnnnnnnnnnnnnnnnnnnnnnnnnnnnnnnnnnnnnnnnnnnnnnnnnnnnnnnnnnnnnnnnnnnnnnnnnnnnnnnnnnnnnnnnnnnnnnnnnnnnnnnnnnnnnnnnnnnnnnnnnnnnnnnnnnnnnnnnnnnnnnnnnnnnnnnnnnnnnnnnnnnnnnnnnnnnnnnnnnnnnnnnnnnnnnnnnnnnnnnnnnnnnnnnnnnnnnnnnnnnnnnnnnnnnnnnnnnnnnnnnnnnnnnnnnnnnnnnnnnnnnnnnnnnnnnnnnnnnnnnnnnnnnnnnnnnnnnnnnnnnnnnnnnnnnnnnnnnnnnnnnnnnnnnnnnnnnnnnnnnnnnnnnnnnnnnnnnnnnnnnnnnnnnnnnnnnnnnnnnnnnnnnnnnnnnnnnnnnnnnnnnnnnnnnnnnnnnnnnnnnnnnnnnnnnnnnnnnnnnnnnnnnnnnnnnnnnnnnnnnnnnnnnnnnnnnnnnnnnnnnnnnnnnnnnnnnnnnnnnnnnnnnnnnnnnnnnnnnnnnnnnnnnnnnnnnnnnnnnnnnnnnnnnnnnnnnnnnnnnnnnnnnnnnnnnnnnnnnnnnnnnnnnnnnnnnnnnnnnnnnnnnnnnnnnnnnnnnnnnnnnnnnnnnnnnnnnnnnnnnnnnnnnnnnnnnnnnnnnnnnnnnnnnnnnnnnnnnnnnnnnnnnnnnnnnnnnnnnnnnnnnnnnnnnnnnnnnnnnnnnnnnnnnnnnnnnnnnnnnnnnnnnnnnnnnnnnnnnnnnnnnnnnnnnnnnnnnnnnnnnnnnnnnnnnnnnnnnnnnnnnnnnnnnnnnnnnnnnnnnnnnnnnnnnnnnnnnnnnnnnnnnnnnnnnnnnnnnnnnnnnnnnnnnnnnnnnnnnnnnnnnnnnnnnnnnnnnnnnnnnnnnnnnnnnnnnnnnnnnnnnnnnnnnnnnnnnnnnnnnnnnnnnnnnnnnnnnnnnnnnnnnnnnnnnnnnnnnnnnnnnnnnnnnnnnnnnnnnnnnnnnnnnnnnnnnnnnnnnnnnnnnnnnnnnnnnnnnnnnnnnnnnnnnnnnnnnnnnnnnnnnnnnnnnnnnnnnnnnnnnnnnnnnnnnnnnnnnnnnnnnnnnnnnnnnnnnnnnnnnnnnnnnnnnnnnnnnnnnnnnnnnnnnnnnnnnnnnnnnnnnnnnnnnnnnnnnnnnnnnnnnnnnnnnnnnnnnnnnnnnnnnnnnnnnnnnnnnnnnnnnnnnnnnnnnnnnnnnnnnnnnnnnnnnnnnnnnnnnnnnnnnnnnnnnnnnnnnnnnnnnnnnnnnnnnnnnnnnnnnnnnnnnnnnnnnnnnnnnnnnnnnnnnnnnnnnnnnnnnnnnnnnnnnnnnnnnnnnnnnnnnnnnnnnnnnnnnnnnnnnnnnnnnnnnnnnnnnnnnnnnnnnnnnnnnnnnnnnnnnnnnnnnnnnnnnnnnnnnnnnnnnnnnnnnnnnnnnnnnnnnnnnnnnnnnnnnnnnnnnnnnnnnnnnnnnnnnnnnnnnnnnnnnnnnnnnnnnnnnnnnnnnnnnnnnnnnnnnnnnnnnnnnnnnnnnnnnnnnnnnnnnnnnnnnnnnnnnnnnnnnnnnnnnnnnnnnnnnnnnnnnnnnnnnnnnnnnnnnnnnnnnnnnnnnnnnnnnnnnnnnnnnnnnnnnnnnnnnnnnnnnnnnnnnnnnnnnnnnnnnnnnnnnnnnnnnnnnnnnnnnnnnnnnnnnnnnnnnnnnnnnnnnnnnnnnnnnnnnnnnnnnnnnnnnnnnnnnnnnnnnnnnnnnnnnnnnnnnnnnnnnnnnnnnnnnnnnnnnnnnnnnnnnnnnnnnnnnnnnnnnnnnnnnnnnnnnnnnnnnnnnnnnnnnnnnnnnnnnnnnnnnnnnnnnnnnnnnnnnnnnnnnnnnnnnnnnnnnnnnnnnnnnnnnnnnnnnnnnnnnnnnnnnnnnnnnnnnnnnnnnnnnnnnnnnnnnnnnnnnnnnnnnnnnnnnnnnnnnnnnnnnnnnnnnnnnnnnnnnnnnnnnnnnnnnnnnnnnnnnnnnnnnnnnnnnnnnnnnnnnnnnnnnnnnnnnnnnnnnnnnnnnnnnnnnnnnnnnnnnnnnnnnnnnnnnnnnnnnnnnnnnnnnnnnnnnnnnnnnnnnnnnnnnnnnnnnnnnnnnnnnnnnnnnnnnnnnnnnnnnnnnnnnnnnnnnnnnnnnnnnnnnnnnnnnnnnnnnnnnnnnnnnnnnnnnnnnnnnnnnnnnnnnnnnnnnnnnnnnnnnnnnnnnnnnnnnnnnnnnnnnnnnnnnnnnnnnnnnnnnnnnnnnnnnnnnnnnnnnnnnnnnnnnnnnnnnnnnnnnnnnnnnnnnnnnnnnnnnnnnnnnnnnnnnnnnnnnnnnnnnnnnnnnnnnnnnnnnnnnnnnnnnnnnnnnnnnnnnnnnnnnnnnnnnnnnnnnnnnnnnnnnnnnnnnnnnnnnnnnnnnnnnnnnnnnnnnnnnnnnnnnnnnnnnnnnnnnnnnnnnnnnnnnnnnnnnnnnnnnnnnnnnnnnnnnnnnnnnnnnnnnnnnnnnnnnnnnnnnnnnnnnnnnnnnnnnnnnnnnnnnnnnnnnnnnnnnnnnnnnnnnnnnnnnnnnnnnnnnnnnnnnnnnnnnnnnnnnnnnnnnnnnnnnnnnnnnnnnnnnnnnnnnnnnnnnnnnnnnnnnnnnnnnnnnnnnnnnnnnnnnnnnnnnnnnnnnnnnnnnnnnnnnnnnnnnnnnnnnnnnnnnnnnnnnnnnnnnnnnnnnnnnnnnnnnnnnnnnnnnnnnnnnnnnnnnnnnnnnnnnnnnnnnnnnnnnnnnnnnnnnnnnnnnnnnnnnnnnnnnnnnnnnnnnnnnnnnnnnnnnnnnnnnnnnnnnnnnnnnnnnnnnnnnnnnnnnnnnnnnnnnnnnnnnnnnnnnnnnnnnnnnnnnnnnnnnnnnnnnnnnnnnnnnnnnnnnnnnnnnnnnnnnnnnnnnnnnnnnnnnnnnnnnnnnnnnnnnnnnnnnnnnnnnnnnnnnnnnnnnnnnnnnnnnnnnnnnnnnnnnnnnnnnnnnnnnnnnnnnnnnnnnnnnnnnnnnnnnnnnnnnnnnnnnnnnnnnnnnnnnnnnnnnnnnnnnnnnnnnnnnnnnnnnnnnnnnnnnnnnnnnnnnnnnnnnnnnnnnnnnnnnnnnnnnnnnnnnnnnnnnnnnnnnnnnnnnnnnnnnnnnnnnnnnnnnnnnnnnnnnnnnnnnnnnnnnnnnnnnnnnnnnnnnnnnnnnnnnnnnnnnnnnnnnnnnnnnnnnnnnnnnnnnnnnnnnnnnnnnnnnnnnnnnnnnnnnnnnnnnnnnnnnnnnnnnnnnnnnnnnnnnnnnnnnnnnnnnnnnnnnnnnnnnnnnnnnnnnnnnnnnnnnnnnnnnnnnnnnnnnnnnnnnnnnnnnnnnnnnnnnnnnnnnnnnnnnnnnnnnnnnnnnnnnnnnnnnnnnnnnnnnnnnnnnnnnnnnnnnnnnnnnnnnnnnnnnnnnnnnnnnnnnnnnnnnnnnnnnnnnnnnnnnnnnnnnnnnnnnnnnnnnnnnnnnnnnnnnnnnnnnnnnnnnnnnnnnnnnnnnnnnnnnnnnnnnnnnnnnnnnnnnnnnnnnnnnnnnnnnnnnnnnnnnnnnnnnnnnnnnnnnnnnnnnnnnnnnnnnnnnnnnnnnnnnnnnnnnnnnnnnnnnnnnnnnnnnnnnnnnnnnnnnnnnnnnnnnnnnnnnnnnnnnnnnnnnnnnnnnnnnnnnnnnnnnnnnnnnnnnnnnnnnnnnnnnnnnnnnnnnnnnnnnnnnnnnnnnnnnnnnnnnnnnnnnnnnnnnnnnnnnnnnnnnnnnnnnnnnnnnnnnnnnnnnnnnnnnnnnnnnnnnnnnnnnnnnnnnnnnnnnnnnnnnnnnnnnnnnnnnnnnnnnnnnnnnnnnnnnnnnnnnnnnnnnnnnnnnnnnnnnnnnnnnnnnnnnnnnnnnnnnnnnnnnnnnnnnnnnnnnnnnnnnnnnnnnnnnnnnnnnnnnnnnnnnnnnnnnnnnnnnnnnnnnnnnnnnnnnnnnnnnnnnnnnnnnnnnnnnnnnnnnnnnnnnnnnnnnnnnnnnnnnnnnnnnnnnnnnnnnnnnnnnnnnnnnnnnnnnnnnnnnnnnnnnnnnnnnnnnnnnnnnnnnnnnnnnnnnnnnnnnnnnnnnnnnnnnnnnnnnnnnnnnnnnnnnnnnnnnnnnnnnnnnnnnnnnnnnnnnnnnnnnnnnnnnnnnnnnnnnnnnnnnnnnnnnnnnnnnnnnnnnnnnnnnnnnnnnnnnnnnnnnnnnnnnnnnnnnnnnnnnnnnnnnnnnnnnnnnnnnnnnnnnnnnnnnnnnnnnnnnnnnnnnnnnnnnnnnnnnnnnnnnnnnnnnnnnnnnnnnnnnnnnnnnnnnnnnnnnnnnnnnnnnnnnnnnnnnnnnnnnnnnnnnnnnnnnnnnnnnnnnnnnnnnnnnnnnnnnnnnnnnnnnnnnnnnnnnnnnnnnnnnnnnnnnnnnnnnnnnnnnnnnnnnnnnnnnnnnnnnnnnnnnnnnnnnnnnnnnnnnnnnnnnnnnnnnnnnnnnnnnnnnnnnnnnnnnnnnnnnnnnnnnnnnnnnnnnnnnnnnnnnnnnnnnnnnnnnnnnnnnnnnnnnnnnnnnnnnnnnnnnnnnnnnnnnnnnnnnnnnnnnnnnnnnnnnnnnnnnnnnnnnnnnnnnnnnnnnnnnnnnnnnnnnnnnnnnnnnnnnnnnnnnnnnnnnnnnnnnnnnnnnnnnnnnnnnnnnnnnnnnnnnnnnnnnnnnnnnnnnnnnnnnnnnnnnnnnnnnnnnnnnnnnnnnnnnnnnnnnnnnnnnnnnnnnnnnnnnnnnnnnnnnnnnnnnnnnnnnnnnnnnnnnnnnnnnnnnnnnnnnnnnnnnnnnnnnnnnnnnnnnnnnnnnnnnnnnnnnnnnnnnnnnnnnnnnnnnnnnnnnnnnnnnnnnnnnnnnnnnnnnnnnnnnnnnnnnnnnnnnnnnnnnnnnnnnnnnnnnnnnnnnnnnnnnnnnnnnnnnnnnnnnnnnnnnnnnnnnnnnnnnnnnnnnnnnnnnnnnnnnnnnnnnnnnnnnnnnnnnnnnnnnnnnnnnnnnnnnnnnnnnnnnnnnnnnnnnnnnnnnnnnnnnnnnnnnnnnnnnnnnnnnnnnnnnnnnnnnnnnnnnnnnnnnnnnnnnnnnnnnnnnnnnnnnnnnnnnnnnnnnnnnnnnnnnnnnnnnnnnnnnnnnnnnnnnnnnnnnnnnnnnnnnnnnnnnnnnnnnnnnnnnnnnnnnnnnnnnnnnnnnnnnnnnnnnnnnnnnnnnnnnnnnnnnnnnnnnnnnnnnnnnnnnnnnnnnnnnnnnnnnnnnnnnnnnnnnnnnnnnnnnnnnnnnnnnnnnnnnnnnnnnnnnnnnnnnnnnnnnnnnnnnnnnnnnnnnnnnnnnnnnnnnnnnnnnnnnnnnnnnnnnnnnnnnnnnnnnnnnnnnnnnnnnnnnnnnnnnnnnnnnnnnnnnnnnnnnnnnnnnnnnnnnnnnnnnnnnnnnnnnnnnnnnnnnnnnnnnnnnnnnnnnnnnnnnnnnnnnnnnnnnnnnnnnnnnnnnnnnnnnnnnnnnnnnnnnnnnnnnnnnnnnnnnnnnnnnnnnnnnnnnnnnnnnnnnnnnnnnnnnnnnnnnnnnnnnnnnnnnnnnnnnnnnnnnnnnnnnnnnnnnnnnnnnnnnnnnnnnnnnnnnnnnnnnnnnnnnnnnnnnnnnnnnnnnnnnnnnnnnnnnnnnnnnnnnnnnnnnnnnnnnnnnnnnnnnnnnnnnnnnnnnnnnnnnnnnnnnnnnnnnnnnnnnnnnnnnnnnnnnnnnnnnnnnnnnnnnnnnnnnnnnnnnnnnnnnnnnnnnnnnnnnnnnnnnnnnnnnnnnnnnnnnnnnnnnnnnnnnnnnnnnnnnnnnnnnnnnnnnnnnnnnnnnnnnnnnnnnnnnnnnnnnnnnnnnnnnnnnnnnnnnnnnnnnnnnnnnnnnnnnnnnnnnnnnnnnnnnnnnnnnnnnnnnnnnnnnnnnnnnnnnnnnnnnnnnnnnnnnnnnnnnnnnnnnnnnnnnnnnnnnnnnnnnnnnnnnnnnnnnnnnnnnnnnnnnnnnnnnnnnnnnnnnnnnnnnnnnnnnnnnnnnnnnnnnnnnnnnnnnnnnnnnnnnnnnnnnnnnnnnnnnnnnnnnnnnnnnnnnnnnnnnnnnnnnnnnnnnnnnnnnnnnnnnnnnnnnnnnnnnnnnnnnnnnnnnnnnnnnnnnnnnnnnnnnnnnnnnnnnnnnnnnnnnnnnnnnnnnnnnnnnnnnnnnnnnnnnnnnnnnnnnnnnnnnnnnnnnnnnnnnnnnnnnnnnnnnnnnnnnnnnnnnnnnnnnnnnnnnnnnnnnnnnnnnnnnnnnnnnnnnnnnnnnnnnnnnnnnnnnnnnnnnnnnnnnnnnnnnnnnnnnnnnnnnnnnnnnnnnnnnnnnnnnnnnnnnnnnnnnnnnnnnnnnnnnnnnnnnnnnnnnnnnnnnnnnnnnnnnnnnnnnnnnnnnnnnnnnnnnnnnnnnnnnnnnnnnnnnnnnnnnnnnnnnnnnnnnnnnnnnnnnnnnnnnnnnnnnnnnnnnnnnnnnnnnnnnnnnnnnnnnnnnnnnnnnnnnnnnnnnnnnnnnnnnnnnnnnnnnnnnnnnnnnnnnnnnnnnnnnnnnnnnnnnnnnnnnnnnnnnnnnnnnnnnnnnnnnnnnnnnnnnnnnnnnnnnnnnnnnnnnnnnnnnnnnnnnnnnnnnnnnnnnnnnnnnnnnnnnnnnnnnnnnnnnnnnnnnnnnnnnnnnnnnnnnnnnnnnnnnnnnnnnnnnnnnnnnnnnnnnnnnnnnnnnnnnnnnnnnnnnnnnnnnnnnnnnnnnnnnnnnnnnnnnnnnnnnnnnnnnnnnnnnnnnnnnnnnnnnnnnnnnnnnnnnnnnnnnnnnnnnnnnnnnnnnnnnnnnnnnnnnnnnnnnnnnnnnnnnnnnnnnnnnnnnnnnnnnnnnnnnnnnnnnnnnnnnnnnnnnnnnnnnnnnnnnnnnnnnnnnnnnnnnnnnnnnnnnnnnnnnnnnnnnnnnnnnnnnnnnnnnnnnnnnnnnnnnnnnnnnnnnnnnnnnnnnnnnnnnnnnnnnnnnnnnnnnnnnnnnnnnnnnnnnnnnnnnnnnnnnnnnnnnnnnnnnnnnnnnnnnnnnnnnnnnnnnnnnnnnnnnnnnnnnnnnnnnnnnnnnnnnnnnnnnnnnnnnnnnnnnnnnnnnnnnnnnnnnnnnnnnnnnnnnnnnnnnnnnnnnnnnnnnnnnnnnnnnnnnnnnnnnnnnnnnnnnnnnnnnnnnnnnnnnnnnnnnnnnnnnnnnnnnnnnnnnnnnnnnnnnnnnnnnnnnnnnnnnnnnnnnnnnnnnnnnnnnnnnnnnnnnnnnnnnnnnnnnnnnnnnnnnnnnnnnnnnnnnnnnnnnnnnnnnnnnnnnnnnnnnnnnnnnnnnnnnnnnnnnnnnnnnnnnnnnnnnnnnnnnnnnnnnnnnnnnnnnnnnnnnnnnnnnnnnnnnnnnnnnnnnnnnnnnnnnnnnnnnnnnnnnnnnnnnnnnnnnnnnnnnnnnnnnnnnnnnnnnnnnnnnnnnnnnnnnnnnnnnnnnnnnnnnnnnnnnnnnnnnnnnnnnnnnnnnnnnnnnnnnnnnnnnnnnnnnnnnnnnnnnnnnnnnnnnnnnnnnnnnnnnnnnnnnnnnnnnnnnnnnnnnnnnnnnnnnnnnnnnnnnnnnnnnnnnnnnnnnnnnnnnnnnnnnnnnnnnnnnnnnnnnnnnnnnnnnnnnnnnnnnnnnnnnnnnnnnnnnnnnnnnnnnnnnnnnnnnnnnnnnnnnnnnnnnnnnnnnnnnnnnnnnnnnnnnnnnnnnnnnnnnnnnnnnnnnnnnnnnnnnnnnnnnnnnnnnnnnnnnnnnnnnnnnnnnnnnnnnnnnnnnnnnnnnnnnnnnnnnnnnnnnnnnnnnnnnnnnnnnnnnnnnnnnnnnnnnnnnnnnnnnnnnnnnnnnnnnnnnnnnnnnnnnnnnnnnnnnnnnnnnnnnnnnnnnnnnnnnnnnnnnnnnnnnnnnnnnnnnnnnnnnnnnnnnnnnnnnnnnnnnnnnnnnnnnnnnnnnnnnnnnnnnnnnnnnnnnnnnnnnnnnnnnnnnnnnnnnnnnnnnnnnnnnnnnnnnnnnnnnnnnnnnnnnnnnnnnnnnnnnnnnnnnnnnnnnnnnnnnnnnnnnnnnnnnnnnnnnnnnnnnnnnnnnnnnnnnnnnnnnnnnnnnnnnnnnnnnnnnnnnnnnnnnnnnnnnnnnnnnnnnnnnnnnnnnnnnnnnnnnnnnnnnnnnnnnnnnnnnnnnnnnnnnnnnnnnnnnnnnnnnnnnnnnnnnnnnnnnnnnnnnnnnnnnnnnnnnnnnnnnnnnnnnnnnnnnnnnnnnnnnnnnnnnnnnnnnnnnnnnnnnnnnnnnnnnnnnnnnnnnnnnnnnnnnnnnnnnnnnnnnnnnnnnnnnnnnnnnnnnnnnnnnnnnnnnnnnnnnnnnnnnnnnnnnnnnnnnnnnnnnnnnnnnnnnnnnnnnnnnnnnnnnnnnnnnnnnnnnnnnnnnnnnnnnnnnnnnnnnnnnnnnnnnnnnnnnnnnnnnnnnnnnnnnnnnnnnnnnnnnnnnnnnnnnnnnnnnnnnnnnnnnnnnnnnnnnnnnnnnnnnnnnnnnnnnnnnnnnnnnnnnnnnnnnnnnnnnnnnnnnnnnnnnnnnnnnnnnnnnnnnnnnnnnnnnnnnnnnnnnnnnnnnnnnnnnnnnnnnnnnnnnnnnnnnnnnnnnnnnnnnnnnnnnnnnnnnnnnnnnnnnnnnnnnnnnnnnnnnnnnnnnnnnnnnnnnnnnnnnnnnnnnnnnnnnnnnnnnnnnnnnnnnnnnnnnnnnnnnnnnnnnnnnnnnnnnnnnnnnnnnnnnnnnnnnnnnnnnnnnnnnnnnnnnnnnnnnnnnnnnnnnnnnnnnnnnnnnnnnnnnnnnnnnnnnnnnnnnnnnnnnnnnnnnnnnnnnnnnnnnnnnnnnnnnnnnnnnnnnnnnnnnnnnnnnnnnnnnnnnnnnnnnnnnnnnnnnnnnnnnnnnnnnnnnnnnnnnnnnnnnnnnnnnnnnnnnnnnnnnnnnnnnnnnnnnnnnnnnnnnnnnnnnnnnnnnnnnnnnnnnnnnnnnnnnnnnnnnnnnnnnnnnnnnnnnnnnnnnnnnnnnnnnnnnnnnnnnnnnnnnnnnnnnnnnnnnnnnnnnnnnnnnnnnnnnnnnnnnnnnnnnnnnnnnnnnnnnnnnnnnnnnnnnnnnnnnnnnnnnnnnnnnnnnnnnnnnnnnnnnnnnnnnnnnnnnnnnnnnnnnnnnnnnnnnnnnnnnnnnnnnnnnnnnnnnnnnnnnnnnnnnnnnnnnnnnnnnnnnnnnnnnnnnnnnnnnnnnnnnnnnnnnnnnnnnnnnnnnnnnnnnnnnnnnnnnnnnnnnnnnnnnnnnnnnnnnnnnnnnnnnnnnnnnnnnnnnnnnnnnnnnnnnnnnnnnnnnnnnnnnnnnnnnnnnnnnnnnnnnnnnnnnnnnnnnnnnnnnnnnnnnnnnnnnnnnnnnnnnnnnnnnnnnnnnnnnnnnnnnnnnnnnnnnnnnnnnnnnnnnnnnnnnnnnnnnnnnnnnnnnnnnnnnnnnnnnnnnnnnnnnnnnnnnnnnnnnnnnnnnnnnnnnnnnnnnnnnnnnnnnnnnnnnnnnnnnnnnnnnnnnnnnnnnnnnnnnnnnnnnnnnnnnnnnnnnnnnnnnnnnnnnnnnnnnnnnnnnnnnnnnnnnnnnnnnnnnnnnnnnnnnnnnnnnnnnnnnnnnnnnnnnnnnnnnnnnnnnnnnnnnnnnnnnnnnnnnnnnnnnnnnnnnnnnnnnnnnnnnnnnnnnnnnnnnnnnnnnnnnnnnnnnnnnnnnnnnnnnnnnnnnnnnnnnnnnnnnnnnnnnnnnnnnnnnnnnnnnnnnnnnnnnnnnnnnnnnnnnnnnnnnnnnnnnnnnnnnnnnnnnnnnnnnnnnnnnnnnnnnnnnnnnnnnnnnnnnnnnnnnnnnnnnnnnnnnnnnnnnnnnnnnnnnnnnnnnnnnnnnnnnnnnnnnnnnnnnnnnnnnnnnnnnnnnnnnnnnnnnnnnnnnnnnnnnnnnnnnnnnnnnnnnnnnnnnnnnnnnnnnnnnnnnnnnnnnnnnnnnnnnnnnnnnnnnnnnnnnnnnnnnnnnnnnnnnnnnnnnnnnnnnnnnnnnnnnnnnnnnnnnnnnnnnnnnnnnnnnnnnnnnnnnnnnnnnnnnnnnnnnnnnnnnnnnnnnnnnnnnnnnnnnnnnnnnnnnnnnnnnnnnnnnnnnnnnnnnnnnnnnnnnnnnnnnnnnnnnnnnnnnnnnnnnnnnnnnnnnnnnnnnnnnnnnnnnnnnnnnnnnnnnnnnnnnnnnnnnnnnnnnnnnnnnnnnnnnnnnnnnnnnnnnnnnnnnnnnnnnnnnnnnnnnnnnnnnnnnnnnnnnnnnnnnnnnnnnnnnnnnnnnnnnnnnnnnnnnnnnnnnnnnnnnnnnnnnnnnnnnnnnnnnnnnnnnnnnnnnnnnnnnnnnnnnnnnnnnnnnnnnnnnnnnnnnnnnnnnnnnnnnnnnnnnnnnnnnnnnnnnnnnnnnnnnnnnnnnnnnnnnnnnnnnnnnnnnnnnnnnnnnnnnnnnnnnnnnnnnnnnnnnnnnnnnnnnnnnnnnnnnnnnnnnnnnnnnnnnnnnnnnnnnnnnnnnnnnnnnnnnnnnnnnnnnnnnnnnnnnnnnnnnnnnnnnnnnnnnnnnnnnnnnnnnnnnnnnnnnnnnnnnnnnnnnnnnnnnnnnnnnnnnnnnnnnnnnnnnnnnnnnnnnnnnnnnnnnnnnnnnnnnnnnnnnnnnnnnnnnnnnnnnnnnnnnnnnnnnnnnnnnnnnnnnnnnnnnnnnnnnnnnnnnnnnnnnnnnnnnnnnnnnnnnnnnnnnnnnnnnnnnnnnnnnnnnnnnnnnnnnnnnnnnnnnnnnnnnnnnnnnnnnnnnnnnnnnnnnnnnnnnnnnnnnnnnnnnnnnnnnnnnnnnnnnnnnnnnnnnnnnnnnnnnnnnnnnnnnnnnnnnnnnnnnnnnnnnnnnnnnnnnnnnnnnnnnnnnnnnnnnnnnnnnnnnnnnnnnnnnnnnnnnnnnnnnnnnnnnnnnnnnnnnnnnnnnnnnnnnnnnnnnnnnnnnnnnnnnnnnnnnnnnnnnnnnnnnnnnnnnnnnnnnnnnnnnnnnnnnnnnnnnnnnnnnnnnnnnnnnnnnnnnnnnnnnnnnnnnnnnnnnnnnnnnnnnnnnnnnnnnnnnnnnnnnnnnnnnnnnnnnnnnnnnnnnnnnnnnnnnnnnnnnnnnnnnnnnnnnnnnnnnnnnnnnnnnnnnnnnnnnnnnnnnnnnnnnnnnnnnnnnnnnnnnnnnnnnnnnnnnnnnnnnnnnnnnnnnnnnnnnnnnnnnnnnnnnnnnnnnnnnnnnnnnnnnnnnnnnnnnnnnnnnnnnnnnnnnnnnnnnnnnnnnnnnnnnnnnnnnnnnnnnnnnnnnnnnnnnnnnnnnnnnnnnnnnnnnnnnnnnnnnnnnnnnnnnnnnnnnnnnnnnnnnnnnnnnnnnnnnnnnnnnnnnnnnnnnnnnnnnnnnnnnnnnnnnnnnnnnnnnnnnnnnnnnnnnnnnnnnnnnnnnnnnnnnnnnnnnnnnnnnnnnnnnnnnnnnnnnnnnnnnnnnnnnnnnnnnnnnnnnnnnnnnnnnnnnnnnnnnnnnnnnnnnnnnnnnnnnnnnnnnnnnnnnnnnnnnnnnnnnnnnnnnnnnnnnnnnnnnnnnnnnnnnnnnnnnnnnnnnnnnnnnnnnnnnnnnnnnnnnnnnnnnnnnnnnnnnnnnnnnnnnnnnnnnnnnnnnnnnnnnnnnnnnnnnnnnnnnnnnnnnnnnnnnnnnnnnnnnnnnnnnnnnnnnnnnnnnnnnnnnnnnnnnnnnnnnnnnnnnnnnnnnnnnnnnnnnnnnnnnnnnnnnnnnnnnnnnnnnnnnnnnnnnnnnnnnnnnnnnnnnnnnnnnnnnnnnnnnnnnnnnnnnnnnnnnnnnnnnnnnnnnnnnnnnnnnnnnnnnnnnnnnnnnnnnnnnnnnnnnnnnnnnnnnnnnnnnnnnnnnnnnnnnnnnnnnnnnnnnnnnnnnnnnnnnnnnnnnnnnnnnnnnnnnnnnnnnnnnnnnnnnnnnnnnnnnnnnnnnnnnnnnnnnnnnnnnnnnnnnnnnnnnnnnnnnnnnnnnnnnnnnnnnnnnnnnnnnnnnnnnnnnnnnnnnnnnnnnnnnnnnnnnnnnnnnnnnnnnnnnnnnnnnnnnnnnnnnnnnnnnnnnnnnnnnnnnnnnnnnnnnnnnnnnnnnnnnnnnnnnnnnnnnnnnnnnnnnnnnnnnnnnnnnnnnnnnnnnnnnnnnnnnnnnnnnnnnnnnnnnnnnnnnnnnnnnnnnnnnnnnnnnnnnnnnnnnnnnnnnnnnnnnnnnnnnnnnnnnnnnnnnnnnnnnnnnnnnnnnnnnnnnnnnnnnnnnnnnnnnnnnnnnnnnnnnnnnnnnnnnnnnnnnnnnnnnnnnnnnnnnnnnnnnnnnnnnnnnnnnnnnnnnnnnnnnnnnnnnnnnnnnnnnnnnnnnnnnnnnnnnnnnnnnnnnnnnnnnnnnnnnnnnnnnnnnnnnnnnnnnnnnnnnnnnnnnnnnnnnnnnnnnnnnnnnnnnnnnnnnnnnnnnnnnnnnnnnnnnnnnnnnnnnnnnnnnnnnnnnnnnnnnnnnnnnnnnnnnnnnnnnnnnnnnnnnnnnnnnnnnnnnnnnnnnnnnnnnnnnnnnnnnnnnnnnnnnnnnnnnnnnnnnnnnnnnnnnnnnnnnnnnnnnnnnnnnnnnnnnnnnnnnnnnnnnnnnnnnnnnnnnnnnnnnnnnnnnnnnnnnnnnnnnnnnnnnnnnnnnnnnnnnnnnnnnnnnnnnnnnnnnnnnnnnnnnnnnnnnnnnnnnnnnnnnnnnnnnnnnnnnnnnnnnnnnnnnnnnnnnnnnnnnnnnnnnnnnnnnnnnnnnnnnnnnnnnnnnnnnnnnnnnnnnnnnnnnnnnnnnnnnnnnnnnnnnnnnnnnnnnnnnnnnnnnnnnnnnnnnnnnnnnnnnnnnnnnnnnnnnnnnnnnnnnnnnnnnnnnnnnnnnnnnnnnnnnnnnnnnnnnnnnnnnnnnnnnnnnnnnnnnnnnnnnnnnnnnnnnnnnnnnnnnnnnnnnnnnnnnnnnnnnnnnnnnnnnnnnnnnnnnnnnnnnnnnnnnnnnnnnnnnnnnnnnnnnnnnnnnnnnnnnnnnnnnnnnnnnnnnnnnnnnnnnnnnnnnnnnnnnnnnnnnnnnnnnnnnnnnnnnnnnnnnnnnnnnnnnnnnnnnnnnnnnnnnnnnnnnnnnnnnnnnnnnnnnnnnnnnnnnnnnnnnnnnnnnnnnnnnnnnnnnnnnnnnnnnnnnnnnnnnnnnnnnnnnnnnnnnnnnnnnnnnnnnnnnnnnnnnnnnnnnnnnnnnnnnnnnnnnnnnnnnnnnnnnnnnnnnnnnnnnnnnnnnnnnnnnnnnnnnnnnnnnnnnnnnnnnnnnnnnnnnnnnnnnnnnnnnnnnnnnnnnnnnnnnnnnnnnnnnnnnnnnnnnnnnnnnnnnnnnnnnnnnnnnnnnnnnnnnnnnnnnnnnnnnnnnnnnnnnnnnnnnnnnnnnnnnnnnnnnnnnnnnnnnnnnnnnnnnnnnnnnnnnnnnnnnnnnnnnnnnnnnnnnnnnnnnnnnnnnnnnnnnnnnnnnnnnnnnnnnnnnnnnnnnnnnnnnnnnnnnnnnnnnnnnnnnnnnnnnnnnnnnnnnnnnnnnnnnnnnnnnnnnnnnnnnnnnnnnnnnnnnnnnnnnnnnnnnnnnnnnnnnnnnnnnnnnnnnnnnnnnnnnnnnnnnnnnnnnnnnnnnnnnnnnnnnnnnnnnnnnnnnnnnnnnnnnnnnnnnnnnnnnnnnnnnnnnnnnnnnnnnnnnnnnnnnnnnnnnnnnnnnnnnnnnnnnnnnnnnnnnnnnnnnnnnnnnnnnnnnnnnnnnnnnnnnnnnnnnnnnnnnnnnnnnnnnnnnnnnnnnnnnnnnnnnnnnnnnnnnnnnnnnnnnnnnnnnnnnnnnnnnnnnnnnnnnnnnnnnnnnnnnnnnnnnnnnnnnnnnnnnnnnnnnnnnnnnnnnnnnnnnnnnnnnnnnnnnnnnnnnnnnnnnnnnnnnnnnnnnnnnnnnnnnnnnnnnnnnnnnnnnnnnnnnnnnnnnnnnnnnnnnnnnnnnnnnnnnnnnnnnnnnnnnnnnnnnnnnnnnnnnnnnnnnnnnnnnnnnnnnnnnnnnnnnnnnnnnnnnnnnnnnnnnnnnnnnnnnnnnnnnnnnnnnnnnnnnnnnnnnnnnnnnnnnnnnnnnnnnnnnnnnnnnnnnnnnnnnnnnnnnnnnnnnnnnnnnnnnnnnnnnnnnnnnnnnnnnnnnnnnnnnnnnnnnnnnnnnnnnnnnnnnnnnnnnnnnnnnnnnnnnnnnnnnnnnnnnnnnnnnnnnnnnnnnnnnnnnnnnnnnnnnnnnnnnnnnnnnnnnnnnnnnnnnnnnnnnnnnnnnnnnnnnnnnnnnnnnnnnnnnnnnnnnnnnnnnnnnnnnnnnnnnnnnnnnnnnnnnnnnnnnnnnnnnnnnnnnnnnnnnnnnnnnnnnnnnnnnnnnnnnnnnnnnnnnnnnnnnnnnnnnnnnnnnnnnnnnnnnnnnnnnnnnnnnnnnnnnnnnnnnnnnnnnnnnnnnnnnnnnnnnnnnnnnnnnnnnnnnnnnnnnnnnnnnnnnnnnnnnnnnnnnnnnnnnnnnnnnnnnnnnnnnnnnnnnnnnnnnnnnnnnnnnnnnnnnnnnnnnnnnnnnnnnnnnnnnnnnnnnnnnnnnnnnnnnnnnnnnnnnnnnnnnnnnnnnnnnnnnnnnnnnnnnnnnnnnnnnnnnnnnnnnnnnnnnnnnnnnnnnnnnnnnnnnnnnnnnnnnnnnnnnnnnnnnnnnnnnnnnnnnnnnnnnnnnnnnnnnnnnnnnnnnnnnnnnnnnnnnnnnnnnnnnnnnnnnnnnnnnnnnnnnnnnnnnnnnnnnnnnnnnnnnnnnnnnnnnnnnnnnnnnnnnnnnnnnnnnnnnnnnnnnnnnnnnnnnnnnnnnnnnnnnnnnnnnnnnnnnnnnnnnnnnnnnnnnnnnnnnnnnnnnnnnnnnnnnnnnnnnnnnnnnnnnnnnnnnnnnnnnnnnnnnnnnnnnnnnnnnnnnnnnnnnnnnnnnnnnnnnnnnnnnnnnnnnnnnnnnnnnnnnnnnnnnnnnnnnnnnnnnnnnnnnnnnnnnnnnnnnnnnnnnnnnnnnnnnnnnnnnnnnnnnnnnnnnnnnnnnnnnnnnnnnnnnnnnnnnnnnnnnnnnnnnnnnnnnnnnnnnnnnnnnnnnnnnnnnnnnnnnnnnnnnnnnnnnnnnnnnnnnnnnnnnnnnnnnnnnnnnnnnnnnnnnnnnnnnnnnnnnnnnnnnnnnnnnnnnnnnnnnnnnnnnnnnnnnnnnnnnnnnnnnnnnnnnnnnnnnnnnnnnnnnnnnnnnnnnnnnnnnnnnnnnnnnnnnnnnnnnnnnnnnnnnnnnnnnnnnnnnnnnnnnnnnnnnnnnnnnnnnnnnnnnnnnnnnnnnnnnnnnnnnnnnnnnnnnnnnnnnnnnnnnnnnnnnnnnnnnnnnnnnnnnnnnnnnnnnnnnnnnnnnnnnnnnnnnnnnnnnnnnnnnnnnnnnnnnnnnnnnnnnnnnnnnnnnnnnnnnnnnnnnnnnnnnnnnnnnnnnnnnnnnnnnnnnnnnnnnnnnnnnnnnnnnnnnnnnnnnnnnnnnnnnnnnnnnnnnnnnnnnnnnnnnnnnnnnnnnnnnnnnnnnnnnnnnnnnnnnnnnnnnnnnnnnnnnnnnnnnnnnnnnnnnnnnnnnnnnnnnnnnnnnnnnnnnnnnnnnnnnnnnnnnnnnnnnnnnnnnnnnnnnnnnnnnnnnnnnnnnnnnnnnnnnnnnnnnnnnnnnnnnnnnnnnnnnnnnnnnnnnnnnnnnnnnnnnnnnnnnnnnnnnnnnnnnnnnnnnnnnnnnnnnnnnnnnnnnnnnnnnnnnnnnnnnnnnnnnnnnnnnnnnnnnnnnnnnnnnnnnnnnnnnnnnnnnnnnnnnnnnnnnnnnnnnnnnnnnnnnnnnnnnnnnnnnnnnnnnnnnnnnnnnnnnnnnnnnnnnnnnnnnnnnnnnnnnnnnnnnnnnnnnnnnnnnnnnnnnnnnnnnnnnnnnnnnnnnnnnnnnnnnnnnnnnnnnnnnnnnnnnnnnnnnnnnnnnnnnnnnnnnnnnnnnnnnnnnnnnnnnnnnnnnnnnnnnnnnnnnnnnnnnnnnnnnnnnnnnnnnnnnnnnnnnnnnnnnnnnnnnnnnnnnnnnnnnnnnnnnnnnnnnnnnnnnnnnnnnnnnnnnnnnnnnnnnnnnnnnnnnnnnnnnnnnnnnnnnnnnnnnnnnnnnnnnnnnnnnnnnnnnnnnnnnnnnnnnnnnnnnnnnnnnnnnnnnnnnnnnnnnnnnnnnnnnnnnnnnnnnnnnnnnnnnnnnnnnnnnnnnnnnnnnnnnnnnnnnnnnnnnnnnnnnnnnnnnnnnnnnnnnnnnnnnnnnnnnnnnnnnnnnnnnnnnnnnnnnnnnnnnnnnnnnnnnnnnnnnnnnnnnnnnnnnnnnnnnnnnnnnnnnnnnnnnnnnnnnnnnnnnnnnnnnnnnnnnnnnnnnnnnnnnnnnnnnnnnnnnnnnnnnnnnnnnnnnnnnnnnnnnnnnnnnnnnnnnnnnnnnnnnnnnnnnnnnnnnnnnnnnnnnnnnnnnnnnnnnnnnnnnnnnnnnnnnnnnnnnnnnnnnnnnnnnnnnnnnnnnnnnnnnnnnnnnnnnnnnnnnnnnnnnnnnnnnnnnnnnnnnnnnnnnnnnnnnnnnnnnnnnnnnnnnnnnnnnnnnnnnnnnnnnnnnnnnnnnnnnnnnnnnnnnnnnnnnnnnnnnnnnnnnnnnnnnnnnnnnnnnnnnnnnnnnnnnnnnnnnnnnnnnnnnnnnnnnnnnnnnnnnnnnnnnnnnnnnnnnnnnnnnnnnnnnnnnnnnnnnnnnnnnnnnnnnnnnnnnnnnnnnnnnnnnnnnnnnnnnnnnnnnnnnnnnnnnnnnnnnnnnnnnnnnnnnnnnnnnnnnnnnnnnnnnnnnnnnnnnnnnnnnnnnnnnnnnnnnnnnnnnnnnnnnnnnnnnnnnnnnnnnnnnnnnnnnnnnnnnnnnnnnnnnnnnnnnnnnnnnnnnnnnnnnnnnnnnnnnnnnnnnnnnnnnnnnnnnnnnnnnnnnnnnnnnnnnnnnnnnnnnnnnnnnnnnnnnnnnnnnnnnnnnnnnnnnnnnnnnnnnnnnnnnnnnnnnnnnnnnnnnnnnnnnnnnnnnnnnnnnnnnnnnnnnnnnnnnnnnnnnnnnnnnnnnnnnnnnnnnnnnnnnnnnnnnnnnnnnnnnnnnnnnnnnnnnnnnnnnnnnnnnnnnnnnnnnnnnnnnnnnnnnnnnnnnnnnnnnnnnnnnnnnnnnnnnnnnnnnnnnnnnnnnnnnnnnnnnnnnnnnnnnnnnnnnnnnnnnnnnnnnnnnnnnnnnnnnnnnnnnnnnnnnnnnnnnnnnnnnnnnnnnnnnnnnnnnnnnnnnnnnnnnnnnnnnnnnnnnnnnnnnnnnnnnnnnnnnnnnnnnnnnnnnnnnnnnnnnnnnnnnnnnnnnnnnnnnnnnnnnnnnnnnnnnnnnnnnnnnnnnnnnnnnnnnnnnnnnnnnnnnnnnnnnnnnnnnnnnnnnnnnnnnnnnnnnnnnnnnnnnnnnnnnnnnnnnnnnnnnnnnnnnnnnnnnnnnnnnnnnnnnnnnnnnnnnnnnnnnnnnnnnnnnnnnnnnnnnnnnnnnnnnnnnnnnnnnnnnnnnnnnnnnnnnnnnnnnnnnnnnnnnnnnnnnnnnnnnnnnnnnnnnnnnnnnnnnnnnnnnnnnnnnnnnnnnnnnnnnnnnnnnnnnnnnnnnnnnnnnnnnnnnnnnnnnnnnnnnnnnnnnnnnnnnnnnnnnnnnnnnnnnnnnnnnnnnnnnnnnnnnnnnnnnnnnnnnnnnnnnnnnnnnnnnnnnnnnnnnnnnnnnnnnnnnnnnnnnnnnnnnnnnnnnnnnnnnnnnnnnnnnnnnnnnnnnnnnnnnnnnnnnnnnnnnnnnnnnnnnnnnnnnnnnnnnnnnnnnnnnnnnnnnnnnnnnnnnnnnnnnnnnnnnnnnnnnnnnnnnnnnnnnnnnnnnnnnnnnnnnnnnnnnnnnnnnnnnnnnnnnnnnnnnnnnnnnnnnnnnnnnnnnnnnnnnnnnnnnnnnnnnnnnnnnnnnnnnnnnnnnnnnnnnnnnnnnnnnnnnnnnnnnnnnnnnnnnnnnnnnnnnnnnnnnnnnnnnnnnnnnnnnnnnnnnnnnnnnnnnnnnnnnnnnnnnnnnnnnnnnnnnnnnnnnnnnnnnnnnnnnnnnnnnnnnnnnnnnnnnnnnnnnnnnnnnnnnnnnnnnnnnnnnnnnnnnnnnnnnnnnnnnnnnnnnnnnnnnnnnnnnnnnnnnnnnnnnnnnnnnnnnnnnnnnnnnnnnnnnnnnnnnnnnnnnnnnnnnnnnnnnnnnnnnnnnnnnnnnnnnnnnnnnnnnnnnnnnnnnnnnnnnnnnnnnnnnnnnnnnnnnnnnnnnnnnnnnnnnnnnnnnnnnnnnnnnnnnnnnnnnnnnnnnnnnnnnnnnnnnnnnnnnnnnnnnnnnnnnnnnnnnnnnnnnnnnnnnnnnnnnnnnnnnnnnnnnnnnnnnnnnnnnnnnnnnnnnnnnnnnnnnnnnnnnnnnnnnnnnnnnnnnnnnnnnnnnnnnnnnnnnnnnnnnnnnnnnnnnnnnnnnnnnnnnnnnnnnnnnnnnnnnnnnnnnnnnnnnnnnnnnnnnnnnnnnnnnnnnnnnnnnnnnnnnnnnnnnnnnnnnnnnnnnnnnnnnnnnnnnnnnnnnnnnnnnnnnnnnnnnnnnnnnnnnnnnnnnnnnnnnnnnnnnnnnnnnnnnnnnnnnnnnnnnnnnnnnnnnnnnnnnnnnnnnnnnnnnnnnnnnnnnnnnnnnnnnnnnnnnnnnnnnnnnnnnnnnnnnnnnnnnnnnnnnnnnnnnnnnnnnnnnnnnnnnnnnnnnnnnnnnnnnnnnnnnnnnnnnnnnnnnnnnnnnnnnnnnnnnnnnnnnnnnnnnnnnnnnnnnnnnnnnnnnnnnnnnnnnnnnnnnnnnnnnnnnnnnnnnnnnnnnnnnnnnnnnnnnnnnnnnnnnnnnnnnnnnnnnnnnnnnnnnnnnnnnnnnnnnnnnnnnnnnnnnnnnnnnnnnnnnnnnnnnnnnnnnnnnnnnnnnnnnnnnnnnnnnnnnnnnnnnnnnnnnnnnnnnnnnnnnnnnnnnnnnnnnnnnnnnnnnnnnnnnnnnnnnnnnnnnnnnnnnnnnnnnnnnnnnnnnnnnnnnnnnnnnnnnnnnnnnnnnnnnnnnnnnnnnnnnnnnnnnnnnnnnnnnnnnnnnnnnnnnnnnnnnnnnnnnnnnnnnnnnnnnnnnnnnnnnnnnnnnnnnnnnnnnnnnnnnnnnnnnnnnnnnnnnnnnnnnnnnnnnnnnnnnnnnnnnnnnnnnnnnnnnnnnnnnnnnnnnnnnnnnnnnnnnnnnnnnnnnnnnnnnnnnnnnnnnnnnnnnnnnnnnnnnnnnnnnnnnnnnnnnnnnnnnnnnnnnnnnnnnnnnnnnnnnnnnnnnnnnnnnnnnnnnnnnnnnnnnnnnnnnnnnnnnnnnnnnnnnnnnnnnnnnnnnnnnnnnnnnnnnnnnnnnnnnnnnnnnnnnnnnnnnnnnnnnnnnnnnnnnnnnnnnnnnnnnnnnnnnnnnnnnnnnnnnnnnnnnnnnnnnnnnnnnnnnnnnnnnnnnnnnnnnnnnnnnnnnnnnnnnnnnnnnnnnnnnnnnnnnnnnnnnnnnnnnnnnnnnnnnnnnnnnnnnnnnnnnnnnnnnnnnnnnnnnnnnnnnnnnnnnnnnnnnnnnnnnnnnnnnnnnnnnnnnnnnnnnnnnnnnnnnnnnnnnnnnnnnnnnnnnnnnnnnnnnnnnnnnnnnnnnnnnnnnnnnnnnnnnnnnnnnnnnnnnnnnnnnnnnnnnnnnnnnnnnnnnnnnnnnnnnnnnnnnnnnnnnnnnnnnnnnnnnnnnnnnnnnnnnnnnnnnnnnnnnnnnnnnnnnnnnnnnnnnnnnnnnnnnnnnnnnnnnnnnnnnnnnnnnnnnnnnnnnnnnnnnnnnnnnnnnnnnnnnnnnnnnnnnnnnnnnnnnnnnnnnnnnnnnnnnnnnnnnnnnnnnnnnnnnnnnnnnnnnnnnnnnnnnnnnnnnnnnnnnnnnnnnnnnnnnnnnnnnnnnnnnnnnnnnnnnnnnnnnnnnnnnnnnnnnnnnnnnnnnnnnnnnnnnnnnnnnnnnnnnnnnnnnnnnnnnnnnnnnnnnnnnnnnnnnnnnnnnnnnnnnnnnnnnnnnnnnnnnnnnnnnnnnnnnnnnnnnnnnnnnnnnnnnnnnnnnnnnnnnnnnnnnnnnnnnnnnnnnnnnnnnnnnnnnnnnnnnnnnnnnnnnnnnnnnnnnnnnnnnnnnnnnnnnnnnnnnnnnnnnnnnnnnnnnnnnnnnnnnnnnnnnnnnnnnnnnnnnnnnnnnnnnnnnnnnnnnnnnnnnnnnnnnnnnnnnnnnnnnnnnnnnnnnnnnnnnnnnnnnnnnnnnnnnnnnnnnnnnnnnnnnnnnnnnnnnnnnnnnnnnnnnnnnnnnnnnnnnnnnnnnnnnnnnnnnnnnnnnnnnnnnnnnnnnnnnnnnnnnnnnnnnnnnnnnnnnnnnnnnnnnnnnnnnnnnnnnnnnnnnnnnnnnnnnnnnnnnnnnnnnnnnnnnnnnnnnnnnnnnnnnnnnnnnnnnnnnnnnnnnnnnnnnnnnnnnnnnnnnnnnnnnnnnnnnnnnnnnnnnnnnnnnnnnnnnnnnnnnnnnnnnnnnnnnnnnnnnnnnnnnnnnnnnnnnnnnnnnnnnnnnnnnnnnnnnnnnnnnnnnnnnnnnnnnnnnnnnnnnnnnnnnnnnnnnnnnnnnnnnnnnnnnnnnnnnnnnnnnnnnnnnnnnnnnnnnnnnnnnnnnnnnnnnnnnnnnnnnnnnnnnnnnnnnnnnnnnnnnnnnnnnnnnnnnnnnnnnnnnnnnnnnnnnnnnnnnnnnnnnnnnnnnnnnnnnnnnnnnnnnnnnnnnnnnnnnnnnnnnnnnnnnnnnnnnnnnnnnnnnnnnnnnnnnnnnnnnnnnnnnnnnnnnnnnnnnnnnnnnnnnnnnnnnnnnnnnnnnnnnnnnnnnnnnnnnnnnnnnnnnnnnnnnnnnnnnnnnnnnnnnnnnnnnnnnnnnnnnnnnnnnnnnnnnnnnnnnnnnnnnnnnnnnnnnnnnnnnnnnnnnnnnnnnnnnnnnnnnnnnnnnnnnnnnnnnnnnnnnnnnnnnnnnnnnnnnnnnnnnnnnnnnnnnnnnnnnnnnnnnnnnnnnnnnnnnnnnnnnnnnnnnnnnnnnnnnnnnnnnnnnnnnnnnnnnnnnnnnnnnnnnnnnnnnnnnnnnnnnnnnnnnnnnnnnnnnnnnnnnnnnnnnnnnnnnnnnnnnnnnnnnnnnnnnnnnnnnnnnnnnnnnnnnnnnnnnnnnnnnnnnnnnnnnnnnnnnnnnnnnnnnnnnnnnnnnnnnnnnnnnnnnnnnnnnnnnnnnnnnnnnnnnnnnnnnnnnnnnnnnnnnnnnnnnnnnnnnnnnnnnnnnnnnnnnnnnnnnnnnnnnnnnnnnnnnnnnnnnnnnnnnnnnnnnnnnnnnnnnnnnnnnnnnnnnnnnnnnnnnnnnnnnnnnnnnnnnnnnnnnnnnnnnnnnnnnnnnnnnnnnnnnnnnnnnnnnnnnnnnnnnnnnnnnnnnnnnnnnnnnnnnnnnnnnnnnnnnnnnnnnnnnnnnnnnnnnnnnnnnnnnnnnnnnnnnnnnnnnnnnnnnnnnnnnnnnnnnnnnnnnnnnnnnnnnnnnnnnnnnnnnnnnnnnnnnnnnnnnnnnnnnnnnnnnnnnnnnnnnnnnnnnnnnnnnnnnnnnnnnnnnnnnnnnnnnnnnnnnnnnnnnnnnnnnnnnnnnnnnnnnnnnnnnnnnnnnnnnnnnnnnnnnnnnnnnnnnnnnnnnnnnnnnnnnnnnnnnnnnnnnnnnnnnnnnnnnnnnnnnnnnnnnnnnnnnnnnnnnnnnnnnnnnnnnnnnnnnnnnnnnnnnnnnnnnnnnnnnnnnnnnnnnnnnnnnnnnnnnnnnnnnnnnnnnnnnnnnnnnnnnnnnnnnnnnnnnnnnnnnnnnnnnnnnnnnnnnnnnnnnnnnnnnnnnnnnnnnnnnnnnnnnnnnnnnnnnnnnnnnnnnnnnnnnnnnnnnnnnnnnnnnnnnnnnnnnnnnnnnnnnnnnnnnnnnnnnnnnnnnnnnnnnnnnnnnnnnnnnnnnnnnnnnnnnnnnnnnnnnnnnnnnnnnnnnnnnnnnnnnnnnnnnnnnnnnnnnnnnnnnnnnnnnnnnnnnnnnnnnnnnnnnnnnnnnnnnnnnnnnnnnnnnnnnnnnnnnnnnnnnnnnnnnnnnnnnnnnnnnnnnnnnnnnnnnnnnnnnnnnnnnnnnnnnnnnnnnnnnnnnnnnnnnnnnnnnnnnnnnnnnnnnnnnnnnnnnnnnnnnnnnnnnnnnnnnnnnnnnnnnnnnnnnnnnnnnnnnnnnnnnnnnnnnnnnnnnnnnnnnnnnnnnnnnnnnnnnnnnnnnnnnnnnnnnnnnnnnnnnnnnnnnnnnnnnnnnnnnnnnnnnnnnnnnnnnnnnnnnnnnnnnnnnnnnnnnnnnnnnnnnnnnnnnnnnnnnnnnnnnnnnnnnnnnnnnnnnnnnnnnnnnnnnnnnnnnnnnnnnnnnnnnnnnnnnnnnnnnnnnnnnnnnnnnnnnnnnnnnnnnnnnnnnnnnnnnnnnnnnnnnnnnnnnnnnnnnnnnnnnnnnnnnnnnnnnnnnnnnnnnnnnnnnnnnnnnnnnnnnnnnnnnnnnnnnnnnnnnnnnnnnnnnnnnnnnnnnnnnnnnnnnnnnnnnnnnnnnnnnnnnnnnnnnnnnnnnnnnnnnnnnnnnnnnnnnnnnnnnnnnnnnnnnnnnnnnnnnnnnnnnnnnnnnnnnnnnnnnnnnnnnnnnnnnnnnnnnnnnnnnnnnnnnnnnnnnnnnnnnnnnnnnnnnnnnnnnnnnnnnnnnnnnnnnnnnnnnnnnnnnnnnnnnnnnnnnnnnnnnnnnnnnnnnnnnnnnnnnnnnnnnnnnnnnnnnnnnnnnnnnnnnnnnnnnnnnnnnnnnnnnnnnnnnnnnnnnnnnnnnnnnnnnnnnnnnnnnnnnnnnnnnnnnnnnnnnnnnnnnnnnnnnnnnnnnnnnnnnnnnnnnnnnnnnnnnnnnnnnnnnnnnnnnnnnnnnnnnnnnnnnnnnnnnnnnnnnnnnnnnnnnnnnnnnnnnnnnnnnnnnnnnnnnnnnnnnnnnnnnnnnnnnnnnnnnnnnnnnnnnnnnnnnnnnnnnnnnnnnnnnnnnnnnnnnnnnnnnnnnnnnnnnnnnnnnnnnnnnnnnnnnnnnnnnnnnnnnnnnnnnnnnnnnnnnnnnnnnnnnnnnnnnnnnnnnnnnnnnnnnnnnnnnnnnnnnnnnnnnnnnnnnnnnnnnnnnnnnnnnnnnnnnnnnnnnnnnnnnnnnnnnnnnnnnnnnnnnnnnnnnnnnnnnnnnnnnnnnnnnnnnnnnnnnnnnnnnnnnnnnnnnnnnnnnnnnnnnnnnnnnnnnnnnnnnnnnnnnnnnnnnnnnnnnnnnnnnnnnnnnnnnnnnnnnnnnnnnnnnnnnnnnnnnnnnnnnnnnnnnnnnnnnnnnnnnnnnnnnnnnnnnnnnnnnnnnnnnnnnnnnnnnnnnnnnnnnnnnnnnnnnnnnnnnnnnnnnnnnnnnnnnnnnnnnnnnnnnnnnnnnnnnnnnnnnnnnnnnnnnnnnnnnnnnnnnnnnnnnnnnnnnnnnnnnnnnnnnnnnnnnnnnnnnnnnnnnnnnnnnnnnnnnnnnnnnnnnnnnnnnnnnnnnnnnnnnnnnnnnnnnnnnnnnnnnnnnnnnnnnnnnnnnnnnnnnnnnnnnnnnnnnnnnnnnnnnnnnnnnnnnnnnnnnnnnnnnnnnnnnnnnnnnnnnnnnnnnnnnnnnnnnnnnnnnnnnnnnnnnnnnnnnnnnnnnnnnnnnnnnnnnnnnnnnnnnnnnnnnnnnnnnnnnnnnnnnnnnnnnnnnnnnnnnnnnnnnnnnnnnnnnnnnnnnnnnnnnnnnnnnnnnnnnnnnnnnnnnnnnnnnnnnnnnnnnnnnnnnnnnnnnnnnnnnnnnnnnnnnnnnnnnnnnnnnnnnnnnnnnnnnnnnnnnnnnnnnnnnnnnnnnnnnnnnnnnnnnnnnnnnnnnnnnnnnnnnnnnnnnnnnnnnnnnnnnnnnnnnnnnnnnnnnnnnnnnnnnnnnnnnnnnnnnnnnnnnnnnnnnnnnnnnnnnnnnnnnnnnnnnnnnnnnnnnnnnnnnnnnnnnnnnnnnnnnnnnnnnnnnnnnnnnnnnnnnnnnnnnnnnnnnnnnnnnnnnnnnnnnnnnnnnnnnnnnnnnnnnnnnnnnnnnnnnnnnnnnnnnnnnnnnnnnnnnnnnnnnnnnnnnnnnnnnnnnnnnnnnnnnnnnnnnnnnnnnnnnnnnnnnnnnnnnnnnnnnnnnnnnnnnnnnnnnnnnnnnnnnnnnnnnnnnnnnnnnnnnnnnnnnnnnnnnnnnnnnnnnnnnnnnnnnnnnnnnnnnnnnnnnnnnnnnnnnnnnnnnnnnnnnnnnnnnnnnnnnnnnnnnnnnnnnnnnnnnnnnnnnnnnnnnnnnnnnnnnnnnnnnnnnnnnnnnnnnnnnnnnnnnnnnnnnnnnnnnnnnnnnnnnnnnnnnnnnnnnnnnnnnnnnnnnnnnnnnnnnnnnnnnnnnnnnnnnnnnnnnnnnnnnnnnnnnnnnnnnnnnnnnnnnnnnnnnnnnnnnnnnnnnnnnnnnnnnnnnnnnnnnnnnnnnnnnnnnnnnnnnnnnnnnnnnnnnnnnnnnnnnnnnnnnnnnnnnnnnnnnnnnnnnnnnnnnnnnnnnnnnnnnnnnnnnnnnnnnnnnnnnnnnnnnnnnnnnnnnnnnnnnnnnnnnnnnnnnnnnnnnnnnnnnnnnnnnnnnnnnnnnnnnnnnnnnnnnnnnnnnnnnnnnnnnnnnnnnnnnnnnnnnnnnnnnnnnnnnnnnnnnnnnnnnnnnnnnnnnnnnnnnnnnnnnnnnnnnnnnnnnnnnnnnnnnnnnnnnnnnnnnnnnnnnnnnnnnnnnnnnnnnnnnnnnnnnnnnnnnnnnnnnnnnnnnnnnnnnnnnnnnnnnnnnnnnnnnnnnnnnnnnnnnnnnnnnnnnnnnnnnnnnnnnnnnnnnnnnnnnnnnnnnnnnnnnnnnnnnnnnnnnnnnnnnnnnnnnnnnnnnnnnnnnnnnnnnnnnnnnnnnnnnnnnnnnnnnnnnnnnnnnnnnnnnnnnnnnnnnnnnnnnnnnnnnnnnnnnnnnnnnnnnnnnnnnnnnnnnnnnnnnnnnnnnnnnnnnnnnnnnnnnnnnnnnnnnnnnnnnnnnnnnnnnnnnnnnnnnnnnnnnnnnnnnnnnnnnnnnnnnnnnnnnnnnnnnnnnnnnnnnnnnnnnnnnnnnnnnnnnnnnnnnnnnnnnnnnnnnnnnnnnnnnnnnnnnnnnnnnnnnnnnnnnnnnnnnnnnnnnnnnnnnnnnnnnnnnnnnnnnnnnnnnnnnnnnnnnnnnnnnnnnnnnnnnnnnnnnnnnnnnnnnnnnnnnnnnnnnnnnnnnnnnnnnnnnnnnnnnnnnnnnnnnnnnnnnnnnnnnnnnnnnnnnnnnnnnnnnnnnnnnnnnnnnnnnnnnnnnnnnnnnnnnnnnnnnnnnnnnnnnnnnnnnnnnnnnnnnnnnnnnnnnnnnnnnnnnnnnnnnnnnnnnnnnnnnnnnnnnnnnnnnnnnnnnnnnnnnnnnnnnnnnnnnnnnnnnnnnnnnnnnnnnnnnnnnnnnnnnnnnnnnnnnnnnnnnnnnnnnnnnnnnnnnnnnnnnnnnnnnnnnnnnnnnnnnnnnnnnnnnnnnnnnnnnnnnnnnnnnnnnnnnnnnnnnnnnnnnnnnnnnnnnnnnnnnnnnnnnnnnnnnnnnnnnnnnnnnnnnnnnnnnnnnnnnnnnnnnnnnnnnnnnnnnnnnnnnnnnnnnnnnnnnnnnnnnnnnnnnnnnnnnnnnnnnnnnnnnnnnnnnnnnnnnnnnnnnnnnnnnnnnnnnnnnnnnnnnnnnnnnnnnnnnnnnnnnnnnnnnnnnnnnnnnnnnnnnnnnnnnnnnnnnnnnnnnnnnnnnnnnnnnnnnnnnnnnnnnnnnnnnnnnnnnnnnnnnnnnnnnnnnnnnnnnnnnnnnnnnnnnnnnnnnnnnnnnnnnnnnnnnnnnnnnnnnnnnnnnnnnnnnnnnnnnnnnnnnnnnnnnnnnnnnnnnnnnnnnnnnnnnnnnnnnnnnnnnnnnnnnnnnnnnnnnnnnnnnnnnnnnnnnnnnnnnnnnnnnnnnnnnnnnnnnnnnnnnnnnnnnnnnnnnnnnnnnnnnnnnnnnnnnnnnnnnnnnnnnnnnnnnnnnnnnnnnnnnnnnnnnnnnnnnnnnnnnnnnnnnnnnnnnnnnnnnnnnnnnnnnnnnnnnnnnnnnnnnnnnnnnnnnnnnnnnnnnnnnnnnnnnnnnnnnnnnnnnnnnnnnnnnnnnnnnnnnnnnnnnnnnnnnnnnnnnnnnnnnnnnnnnnnnnnnnnnnnnnnnnnnnnnnnnnnnnnnnnnnnnnnnnnnnnnnnnnnnnnnnnnnnnnnnnnnnnnnnnnnnnnnnnnnnnnnnnnnnnnnnnnnnnnnnnnnnnnnnnnnnnnnnnnnnnnnnnnnnnnnnnnnnnnnnnnnnnnnnnnnnnnnnnnnnnnnnnnnnnnnnnnnnnnnnnnnnnnnnnnnnnnnnnnnnnnnnnnnnnnnnnnnnnnnnnnnnnnnnnnnnnnnnnnnnnnnnnnnnnnnnnnnnnnnnnnnnnnnnnnnnnnnnnnnnnnnnnnnnnnnnnnnnnnnnnnnnnnnnnnnnnnnnnnnnnnnnnnnnnnnnnnnnnnnnnnnnnnnnnnnnnnnnnnnnnnnnnnnnnnnnnnnnnnnnnnnnnnnnnnnnnnnnnnnnnnnnnnnnnnnnnnnnnnnnnnnnnnnnnnnnnnnnnnnnnnnnnnnnnnnnnnnnnnnnnnnnnnnnnnnnnnnnnnnnnnnnnnnnnnnnnnnnnnnnnnnnnnnnnnnnnnnnnnnnnnnnnnnnnnnnnnnnnnnnnnnnnnnnnnnnnnnnnnnnnnnnnnnnnnnnnnnnnnnnnnnnnnnnnnnnnnnnnnnnnnnnnnnnnnnnnnnnnnnnnnnnnnnnnnnnnnnnnnnnnnnnnnnnnnnnnnnnnnnnnnnnnnnnnnnnnnnnnnnnnnnnnnnnnnnnnnnnnnnnnnnnnnnnnnnnnnnnnnnnnnnnnnnnnnnnnnnnnnnnnnnnnnnnnnnnnnnnnnnnnnnnnnnnnnnnnnnnnnnnnnnnnnnnnnnnnnnnnnnnnnnnnnnnnnnnnnnnnnnnnnnnnnnnnnnnnnnnnnnnnnnnnnnnnnnnnnnnnnnnnnnnnnnnnnnnnnnnnnnnnnnnnnnnnnnnnnnnnnnnnnnnnnnnnnnnnnnnnnnnnnnnnnnnnnnnnnnnnnnnnnnnnnnnnnnnnnnnnnnnnnnnnnnnnnnnnnnnnnnnnnnnnnnnnnnnnnnnnnnnnnnnnnnnnnnnnnnnnnnnnnnnnnnnnnnnnnnnnnnnnnnnnnnnnnnnnnnnnnnnnnnnnnnnnnnnnnnnnnnnnnnnnnnnnnnnnnnnnnnnnnnnnnnnnnnnnnnnnnnnnnnnnnnnnnnnnnnnnnnnnnnnnnnnnnnnnnnnnnnnnnnnnnnnnnnnnnnnnnnnnnnnnnnnnnnnnnnnnnnnnnnnnnnnnnnnnnnnnnnnnnnnnnnnnnnnnnnnnnnnnnnnnnnnnnnnnnnnnnnnnnnnnnnnnnnnnnnnnnnnnnnnnnnnnnnnnnnnnnnnnnnnnnnnnnnnnnnnnnnnnnnnnnnnnnnnnnnnnnnnnnnnnnnnnnnnnnnnnnnnnnnnnnnnnnnnnnnnnnnnnnnnnnnnnnnnnnnnnnnnnnnnnnnnnnnnnnnnnnnnnnnnnnnnnnnnnnnnnnnnnnnnnnnnnnnnnnnnnnnnnnnnnnnnnnnnnnnnnnnnnnnnnnnnnnnnnnnnnnnnnnnnnnnnnnnnnnnnnnnnnnnnnnnnnnnnnnnnnnnnnnnnnnnnnnnnnnnnnnnnnnnnnnnnnnnnnnnnnnnnnnnnnnnnnnnnnnnnnnnnnnnnnnnnnnnnnnnnnnnnnnnnnnnnnnnnnnnnnnnnnnnnnnnnnnnnnnnnnnnnnnnnnnnnnnnnnnnnnnnnnnnnnnnnnnnnnnnnnnnnnnnnnnnnnnnnnnnnnnnnnnnnnnnnnnnnnnnnnnnnnnnnnnnnnnnnnnnnnnnnnnnnnnnnnnnnnnnnnnnnnnnnnnnnnnnnnnnnnnnnnnnnnnnnnnnnnnnnnnnnnnnnnnnnnnnnnnnnnnnnnnnnnnnnnnnnnnnnnnnnnnnnnnnnnnnnnnnnnnnnnnnnnnnnnnnnnnnnnnnnnnnnnnnnnnnnnnnnnnnnnnnnnnnnnnnnnnnnnnnnnnnnnnnnnnnnnnnnnnnnnnnnnnnnnnnnnnnnnnnnnnnnnnnnnnnnnnnnnnnnnnnnnnnnnnnnnnnnnnnnnnnnnnnnnnnnnnnnnnnnnnnnnnnnnnnnnnnnnnnnnnnnnnnnnnnnnnnnnnnnnnnnnnnnnnnnnnnnnnnnnnnnnnnnnnnnnnnnnnnnnnnnnnnnnnnnnnnnnnnnnnnnnnnnnnnnnnnnnnnnnnnnnnnnnnnnnnnnnnnnnnnnnnnnnnnnnnnnnnnnnnnnnnnnnnnnnnnnnnnnnnnnnnnnnnnnnnnnnnnnnnnnnnnnnnnnnnnnnnnnnnnnnnnnnnnnnnnnnnnnnnnnnnnnnnnnnnnnnnnnnnnnnnnnnnnnnnnnnnnnnnnnnnnnnnnnnnnnnnnnnnnnnnnnnnnnnnnnnnnnnnnnnnnnnnnnnnnnnnnnnnnnnnnnnnnnnnnnnnnnnnnnnnnnnnnnnnnnnnnnnnnnnnnnnnnnnnnnnnnnnnnnnnnnnnnnnnnnnnnnnnnnnnnnnnnnnnnnnnnnnnnnnnnnnnnnnnnnnnnnnnnnnnnnnnnnnnnnnnnnnnnnnnnnnnnnnnnnnnnnnnnnnnnnnnnnnnnnnnnnnnnnnnnnnnnnnnnnnnnnnnnnnnnnnnnnnnnnnnnnnnnnnnnnnnnnnnnnnnnnnnnnnnnnnnnnnnnnnnnnnnnnnnnnnnnnnnnnnnnnnnnnnnnnnnnnnnnnnnnnnnnnnnnnnnnnnnnnnnnnnnnnnnnnnnnnnnnnnnnnnnnnnnnnnnnnnnnnnnnnnnnnnnnnnnnnnnnnnnnnnnnnnnnnnnnnnnnnnnnnnnnnnnnnnnnnnnnnnnnnnnnnnnnnnnnnnnnnnnnnnnnnnnnnnnnnnnnnnnnnnnnnnnnnnnnnnnnnnnnnnnnnnnnnnnnnnnnnnnnnnnnnnnnnnnnnnnnnnnnnnnnnnnnnnnnnnnnnnnnnnnnnnnnnnnnnnnnnnnnnnnnnnnnnnnnnnnnnnnnnnnnnnnnnnnnnnnnnnnnnnnnnnnnnnnnnnnnnnnnnnnnnnnnnnnnnnnnnnnnnnnnnnnnnnnnnnnnnnnnnnnnnnnnnnnnnnnnnnnnnnnnnnnnnnnnnnnnnnnnnnnnnnnnnnnnnnnnnnnnnnnnnnnnnnnnnnnnnnnnnnnnnnnnnnnnnnnnnnnnnnnnnnnnnnnnnnnnnnnnnnnnnnnnnnnnnnnnnnnnnnnnnnnnnnnnnnnnnnnnnnnnnnnnnnnnnnnnnnnnnnnnnnnnnnnnnnnnnnnnnnnnnnnnnnnnnnnnnnnnnnnnnnnnnnnnnnnnnnnnnnnnnnnnnnnnnnnnnnnnnnnnnnnnnnnnnnnnnnnnnnnnnnnnnnnnnnnnnnnnnnnnnnnnnnnnnnnnnnnnnnnnnnnnnnnnnnnnnnnnnnnnnnnnnnnnnnnnnnnnnnnnnnnnnnnnnnnnnnnnnnnnnnnnnnnnnnnnnnnnnnnnnnnnnnnnnnnnnnnnnnnnnnnnnnnnnnnnnnnnnnnnnnnnnnnnnnnnnnnnnnnnnnnnnnnnnnnnnnnnnnnnnnnnnnnnnnnnnnnnnnnnnnnnnnnnnnnnnnnnnnnnnnnnnnnnnnnnnnnnnnnnnnnnnnnnnnnnnnnnnnnnnnnnnnnnnnnnnnnnnnnnnnnnnnnnnnnnnnnnnnnnnnnnnnnnnnnnnnnnnnnnnnnnnnnnnnnnnnnnnnnnnnnnnnnnnnnnnnnnnnnnnnnnnnnnnnnnnnnnnnnnnnnnnnnnnnnnnnnnnnnnnnnnnnnnnnnnnnnnnnnnnnnnnnnnnnnnnnnnnnnnnnnnnnnnnnnnnnnnnnnnnnnnnnnnnnnnnnnnnnnnnnnnnnnnnnnnnnnnnnnnnnnnnnnnnnnnnnnnnnnnnnnnnnnnnnnnnnnnnnnnnnnnnnnnnnnnnnnnnnnnnnnnnnnnnnnnnnnnnnnnnnnnnnnnnnnnnnnnnnnnnnnnnnnnnnnnnnnnnnnnnnnnnnnnnnnnnnnnnnnnnnnnnnnnnnnnnnnnnnnnnnnnnnnnnnnnnnnnnnnnnnnnnnnnnnnnnnnnnnnnnnnnnnnnnnnnnnnnnnnnnnnnnnnnnnnnnnnnnnnnnnnnnnnnnnnnnnnnnnnnnnnnnnnnnnnnnnnnnnnnnnnnnnnnnnnnnnnnnnnnnnnnnnnnnnnnnnnnnnnnnnnnnnnnnnnnnnnnnnnnnnnnnnnnnnnnnnnnnnnnnnnnnnnnnnnnnnnnnnnnnnnnnnnnnnnnnnnnnnnnnnnnnnnnnnnnnnnnnnnnnnnnnnnnnnnnnnnnnnnnnnnnnnnnnnnnnnnnnnnnnnnnnnnnnnnnnnnnnnnnnnnnnnnnnnnnnnnnnnnnnnnnnnnnnnnnnnnnnnnnnnnnnnnnnnnnnnnnnnnnnnnnnnnnnnnnnnnnnnnnnnnnnnnnnnnnnnnnnnnnnnnnnnnnnnnnnnnnnnnnnnnnnnnnnnnnnnnnnnnnnnnnnnnnnnnnnnnnnnnnnnnnnnnnnnnnnnnnnnnnnnnnnnnnnnnnnnnnnnnnnnnnnnnnnnnnnnnnnnnnnnnnnnnnnnnnnnnnnnnnnnnnnnnnnnnnnnnnnnnnnnnnnnnnnnnnnnnnnnnnnnnnnnnnnnnnnnnnnnnnnnnnnnnnnnnnnnnnnnnnnnnnnnnnnnnnnnnnnnnnnnnnnnnnnnnnnnnnnnnnnnnnnnnnnnnnnnnnnnnnnnnnnnnnnnnnnnnnnnnnnnnnnnnnnnnnnnnnnnnnnnnnnnnnnnnnnnnnnnnnnnnnnnnnnnnnnnnnnnnnnnnnnnnnnnnnnnnnnnnnnnnnnnnnnnnnnnnnnnnnnnnnnnnnnnnnnnnnnnnnnnnnnnnnnnnnnnnnnnnnnnnnnnnnnnnnnnnnnnnnnnnnnnnnnnnnnnnnnnnnnnnnnnnnnnnnnnnnnnnnnnnnnnnnnnnnnnnnnnnnnnnnnnnnnnnnnnnnnnnnnnnnnnnnnnnnnnnnnnnnnnnnnnnnnnnnnnnnnnnnnnnnnnnnnnnnnnnnnnnnnnnnnnnnnnnnnnnnnnnnnnnnnnnnnnnnnnnnnnnnnnnnnnnnnnnnnnnnnnnnnnnnnnnnnnnnnnnnnnnnnnnnnnnnnnnnnnnnnnnnnnnnnnnnnnnnnnnnnnnnnnnnnnnnnnnnnnnnnnnnnnnnnnnnnnnnnnnnnnnnnnnnnnnnnnnnnnnnnnnnnnnnnnnnnnnnnnnnnnnnnnnnnnnnnnnnnnnnnnnnnnnnnnnnnnnnnnnnnnnnnnnnnnnnnnnnnnnnnnnnnnnnnnnnnnnnnnnnnnnnnnnnnnnnnnnnnnnnnnnnnnnnnnnnnnnnnnnnnnnnnnnnnnnnnnnnnnnnnnnnnnnnnnnnnnnnnnnnnnnnnnnnnnnnnnnnnnnnnnnnnnnnnnnnnnnnnnnnnnnnnnnnnnnnnnnnnnnnnnnnnnnnnnnnnnnnnnnnnnnnnnnnnnnnnnnnnnnnnnnnnnnnnnnnnnnnnnnnnnnnnnnnnnnnnnnnnnnnnnnnnnnnnnnnnnnnnnnnnnnnnnnnnnnnnnnnnnnnnnnnnnnnnnnnnnnnnnnnnnnnnnnnnnnnnnnnnnnnnnnnnnnnnnnnnnnnnnnnnnnnnnnnnnnnnnnnnnnnnnnnnnnnnnnnnnnnnnnnnnnnnnnnnnnnnnnnnnnnnnnnnnnnnnnnnnnnnnnnnnnnnnnnnnnnnnnnnnnnnnnnnnnnnnnnnnnnnnnnnnnnnnnnnnnnnnnnnnnnnnnnnnnnnnnnnnnnnnnnnnnnnnnnnnnnnnnnnnnnnnnnnnnnnnnnnnnnnnnnnnnnnnnnnnnnnnnnnnnnnnnnnnnnnnnnnnnnnnnnnnnnnnnnnnnnnnnnnnnnnnnnnnnnnnnnnnnnnnnnnnnnnnnnnnnnnnnnnnnnnnnnnnnnnnnnnnnnnnnnnnnnnnnnnnnnnnnnnnnnnnnnnnnnnnnnnnnnnnnnnnnnnnnnnnnnnnnnnnnnnnnnnnnnnnnnnnnnnnnnnnnnnnnnnnnnnnnnnnnnnnnnnnnnnnnnnnnnnnnnnnnnnnnnnnnnnnnnnnnnnnnnnnnnnnnnnnnnnnnnnnnnnnnnnnnnnnnnnnnnnnnnnnnnnnnnnnnnnnnnnnnnnnnnnnnnnnnnnnnnnnnnnnnnnnnnnnnnnnnnnnnnnnnnnnnnnnnnnnnnnnnnnnnnnnnnnnnnnnnnnnnnnnnnnnnnnnnnnnnnnnnnnnnnnnnnnnnnnnnnnnnnnnnnnnnnnnnnnnnnnnnnnnnnnnnnnnnnnnnnnnnnnnnnnnnnnnnnnnnnnnnnnnnnnnnnnnnnnnnnnnnnnnnnnnnnnnnnnnnnnnnnnnnnnnnnnnnnnnnnnnnnnnnnnnnnnnnnnnnnnnnnnnnnnnnnnnnnnnnnnnnnnnnnnnnnnnnnnnnnnnnnnnnnnnnnnnnnnnnnnnnnnnnnnnnnnnnnnnnnnnnnnnnnnnnnnnnnnnnnnnnnnnnnnnnnnnnnnnnnnnnnnnnnnnnnnnnnnnnnnnnnnnnnnnnnnnnnnnnnnnnnnnnnnnnnnnnnnnnnnnnnnnnnnnnnnnnnnnnnnnnnnnnnnnnnnnnnnnnnnnnnnnnnnnnnnnnnnnnnnnnnnnnnnnnnnnnnnnnnnnnnnnnnnnnnnnnnnnnnnnnnnnnnnnnnnnnnnnnnnnnnnnnnnnnnnnnnnnnnnnnnnnnnnnnnnnnnnnnnnnnnnnnnnnnnnnnnnnnnnnnnnnnnnnnnnnnnnnnnnnnnnnnnnnnnnnnnnnnnnnnnnnnnnnnnnnnnnnnnnnnnnnnnnnnnnnnnnnnnnnnnnnnnnnnnnnnnnnnnnnnnnnnnnnnnnnnnnnnnnnnnnnnnnnnnnnnnnnnnnnnnnnnnnnnnnnnnnnnnnnnnnnnnnnnnnnnnnnnnnnnnnnnnnnnnnnnnnnnnnnnnnnnnnnnnnnnnnnnnnnnnnnnnnnnnnnnnnnnnnnnnnnnnnnnnnnnnnnnnnnnnnnnnnnnnnnnnnnnnnnnnnnnnnnnnnnnnnnnnnnnnnnnnnnnnnnnnnnnnnnnnnnnnnnnnnnnnnnnnnnnnnnnnnnnnnnnnnnnnnnnnnnnnnnnnnnnnnnnnnnnnnnnnnnnnnnnnnnnnnnnnnnnnnnnnnnnnnnnnnnnnnnnnnnnnnnnnnnnnnnnnnnnnnnnnnnnnnnnnnnnnnnnnnnnnnnnnnnnnnnnnnnnnnnnnnnnnnnnnnnnnnnnnnnnnnnnnnnnnnnnnnnnnnnnnnnnnnnnnnnnnnnnnnnnnnnnnnnnnnnnnnnnnnnnnnnnnnnnnnnnnnnnnnnnnnnnnnnnnnnnnnnnnnnnnnnnnnnnnnnnnnnnnnnnnnnnnnnnnnnnnnnnnnnnnnnnnnnnnnnnnnnnnnnnnnnnnnnnnnnnnnnnnnnnnnnnnnnnnnnnnnnnnnnnnnnnnnnnnnnnnnnnnnnnnnnnnnnnnnnnnnnnnnnnnnnnnnnnnnnnnnnnnnnnnnnnnnnnnnnnnnnnnnnnnnnnnnnnnnnnnnnnnnnnnnnnnnnnnnnnnnnnnnnnnnnnnnnnnnnnnnnnnnnnnnnnnnnnnnnnnnnnnnnnnnnnnnnnnnnnnnnnnnnnnnnnnnnnnnnnnnnnnnnnnnnnnnnnnnnnnnnnnnnnnnnnnnnnnnnnnnnnnnnnnnnnnnnnnnnnnnnnnnnnnnnnnnnnnnnnnnnnnnnnnnnnnnnnnnnnnnnnnnnnnnnnnnnnnnnnnnnnnnnnnnnnnnnnnnnnnnnnnnnnnnnnnnnnnnnnnnnnnnnnnnnnnnnnnnnnnnnnnnnnnnnnnnnnnnnnnnnnnnnnnnnnnnnnnnnnnnnnnnnnnnnnnnnnnnnnnnnnnnnnnnnnnnnnnnnnnnnnnnnnnnnnnnnnnnnnnnnnnnnnnnnnnnnnnnnnnnnnnnnnnnnnnnnnnnnnnnnnnnnnnnnnnnnnnnnnnnnnnnnnnnnnnnnnnnnnnnnnnnnnnnnnnnnnnnnnnnnnnnnnnnnnnnnnnnnnnnnnnnnnnnnnnnnnnnnnnnnnnnnnnnnnnnnnnnnnnnnnnnnnnnnnnnnnnnnnnnnnnnnnnnnnnnnnnnnnnnnnnnnnnnnnnnnnnnnnnnnnnnnnnnnnnnnnnnnnnnnnnnnnnnnnnnnnnnnnnnnnnnnnnnnnnnnnnnnnnnnnnnnnnnnnnnnnnnnnnnnnnnnnnnnnnnnnnnnnnnnnnnnnnnnnnnnnnnnnnnnnnnnnnnnnnnnnnnnnnnnnnnnnnnnnnnnnnnnnnnnnnnnnnnnnnnnnnnnnnnnnnnnnnnnnnnnnnnnnnnnnnnnnnnnnnnnnnnnnnnnnnnnnnnnnnnnnnnnnnnnnnnnnnnnnnnnnnnnnnnnnnnnnnnnnnnnnnnnnnnnnnnnnnnnnnnnnnnnnnnnnnnnnnnnnnnnnnnnnnnnnnnnnnnnnnnnnnnnnnnnnnnnnnnnnnnnnnnnnnnnnnnnnnnnnnnnnnnnnnnnnnnnnnnnnnnnnnnnnnnnnnnnnnnnnnnnnnnnnnnnnnnnnnnnnnnnnnnnnnnnnnnnnnnnnnnnnnnnnnnnnnnnnnnnnnnnnnnnnnnnnnnnnnnnnnnnnnnnnnnnnnnnnnnnnnnnnnnnnnnnnnnnnnnnnnnnnnnnnnnnnnnnnnnnnnnnnnnnnnnnnnnnnnnnnnnnnnnnnnnnnnnnnnnnnnnnnnnnnnnnnnnnnnnnnnnnnnnnnnnnnnnnnnnnnnnnnnnnnnnnnnnnnnnnnnnnnnnnnnnnnnnnnnnnnnnnnnnnnnnnnnnnnnnnnnnnnnnnnnnnnnnnnnnnnnnnnnnnnnnnnnnnnnnnnnnnnnnnnnnnnnnnnnnnnnnnnnnnnnnnnnnnnnnnnnnnnnnnnnnnnnnnnnnnnnnnnnnnnnnnnnnnnnnnnnnnnnnnnnnnnnnnnnnnnnnnnnnnnnnnnnnnnnnnnnnnnnnnnnnnnnnnnnnnnnnnnnnnnnnnnnnnnnnnnnnnnnnnnnnnnnnnnnnnnnnnnnnnnnnnnnnnnnnnnnnnnnnnnnnnnnnnnnnnnnnnnnnnnnnnnnnnnnnnnnnnnnnnnnnnnnnnnnnnnnnnnnnnnnnnnnnnnnnnnnnnnnnnnnnnnnnnnnnnnnnnnnnnnnnnnnnnnnnnnnnnnnnnnnnnnnnnnnnnnnnnnnnnnnnnnnnnnnnnnnnnnnnnnnnnnnnnnnnnnnnnnnnnnnnnnnnnnnnnnnnnnnnnnnnnnnnnnnnnnnnnnnnnnnnnnnnnnnnnnnnnnnnnnnnnnnnnnnnnnnnnnnnnnnnnnnnnnnnnnnnnnnnnnnnnnnnnnnnnnnnnnnnnnnnnnnnnnnnnnnnnnnnnnnnnnnnnnnnnnnnnnnnnnnnnnnnnnnnnnnnnnnnnnnnnnnnnnnnnnnnnnnnnnnnnnnnnnnnnnnnnnnnnnnnnnnnnnnnnnnnnnnnnnnnnnnnnnnnnnnnnnnnnnnnnnnnnnnnnnnnnnnnnnnnnnnnnnnnnnnnnnnnnnnnnnnnnnnnnnnnnnnnnnnnnnnnnnnnnnnnnnnnnnnnnnnnnnnnnnnnnnnnnnnnnnnnnnnnnnnnnnnnnnnnnnnnnnnnnnnnnnnnnnnnnnnnnnnnnnnnnnnnnnnnnnnnnnnnnnnnnnnnnnnnnnnnnnnnnnnnnnnnnnnnnnnnnnnnnnnnnnnnnnnnnnnnnnnnnnnnnnnnnnnnnnnnnnnnnnnnnnnnnnnnnnnnnnnnnnnnnnnnnnnnnnnnnnnnnnnnnnnnnnnnnnnnnnnnnnnnnnnnnnnnnnnnnnnnnnnnnnnnnnnnnnnnnnnnnnnnnnnnnnnnnnnnnnnnnnnnnnnnnnnnnnnnnnnnnnnnnnnnnnnnnnnnnnnnnnnnnnnnnnnnnnnnnnnnnnnnnnnnnnnnnnnnnnnnnnnnnnnnnnnnnnnnnnnnnnnnnnnnnnnnnnnnnnnnnnnnnnnnnnnnnnnnnnnnnnnnnnnnnnnnnnnnnnnnnnnnnnnnnnnnnnnnnnnnnnnnnnnnnnnnnnnnnnnnnnnnnnnnnnnnnnnnnnnnnnnnnnnnnnnnnnnnnnnnnnnnnnnnnnnnnnnnnnnnnnnnnnnnnnnnnnnnnnnnnnnnnnnnnnnnnnnnnnnnnnnnnnnnnnnnnnnnnnnnnnnnnnnnnnnnnnnnnnnnnnnnnnnnnnnnnnnnnnnnnnnnnnnnnnnnnnnnnnnnnnnnnnnnnnnnnnnnnnnnnnnnnnnnnnnnnnnnnnnnnnnnnnnnnnnnnnnnnnnnnnnnnnnnnnnnnnnnnnnnnnnnnnnnnnnnnnnnnnnnnnnnnnnnnnnnnnnnnnnnnnnnnnnnnnnnnnnnnnnnnnnnnnnnnnnnnnnnnnnnnnnnnnnnnnnnnnnnnnnnnnnnnnnnnnnnnnnnnnnnnnnnnnnnnnnnnnnnnnnnnnnnnnnnnnnnnnnnnnnnnnnnnnnnnnnnnnnnnnnnnnnnnnnnnnnnnnnnnnnnnnnnnnnnnnnnnnnnnnnnnnnnnnnnnnnnnnnnnnnnnnnnnnnnnnnnnnnnnnnnnnnnnnnnnnnnnnnnnnnnnnnnnnnnnnnnnnnnnnnnnnnnnnnnnnnnnnnnnnnnnnnnnnnnnnnnnnnnnnnnnnnnnnnnnnnnnnnnnnnnnnnnnnnnnnnnnnnnnnnnnnnnnnnnnnnnnnnnnnnnnnnnnnnnnnnnnnnnnnnnnnnnnnnnnnnnnnnnnnnnnnnnnnnnnnnnnnnnnnnnnnnnnnnnnnnnnnnnnnnnnnnnnnnnnnnnnnnnnnnnnnnnnnnnnnnnnnnnnnnnnnnnnnnnnnnnnnnnnnnnnnnnnnnnnnnnnnnnnnnnnnnnnnnnnnnnnnnnnnnnnnnnnnnnnnnnnnnnnnnnnnnnnnnnnnnnnnnnnnnnnnnnnnnnnnnnnnnnnnnnnnnnnnnnnnnnnnnnnnnnnnnnnnnnnnnnnnnnnnnnnnnnnnnnnnnnnnnnnnnnnnnnnnnnnnnnnnnnnnnnnnnnnnnnnnnnnnnnnnnnnnnnnnnnnnnnnnnnnnnnnnnnnnnnnnnnnnnnnnnnnnnnnnnnnnnnnnnnnnnnnnnnnnnnnnnnnnnnnnnnnnnnnnnnnnnnnnnnnnnnnnnnnnnnnnnnnnnnnnnnnnnnnnnnnnnnnnnnnnnnnnnnnnnnnnnnnnnnnnnnnnnnnnnnnnnnnnnnnnnnnnnnnnnnnnnnnnnnnnnnnnnnnnnnnnnnnnnnnnnnnnnnnnnnnnnnnnnnnnnnnnnnnnnnnnnnnnnnnnnnnnnnnnnnnnnnnnnnnnnnnnnnnnnnnnnnnnnnnnnnnnnnnnnnnnnnnnnnnnnnnnnnnnnnnnnnnnnnnnnnnnnnnnnnnnnnnnnnnnnnnnnnnnnnnnnnnnnnnnnnnnnnnnnnnnnnnnnnnnnnnnnnnnnnnnnnnnnnnnnnnnnnnnnnnnnnnnnnnnnnnnnnnnnnnnnnnnnnnnnnnnnnnnnnnnnnnnnnnnnnnnnnnnnnnnnnnnnnnnnnnnnnnnnnnnnnnnnnnnnnnnnnnnnnnnnnnnnnnnnnnnnnnnnnnnnnnnnnnnnnnnnnnnnnnnnnnnnnnnnnnnnnnnnnnnnnnnnnnnnnnnnnnnnnnnnnnnnnnnnnnnnnnnnnnnnnnnnnnnnnnnnnnnnnnnnnnnnnnnnnnnnnnnnnnnnnnnnnnnnnnnnnnnnnnnnnnnnnnnnnnnnnnnnnnnnnnnnnnnnnnnnnnnnnnnnnnnnnnnnnnnnnnnnnnnnnnnnnnnnnnnnnnnnnnnnnnnnnnnnnnnnnnnnnnnnnnnnnnnnnnnnnnnnnnnnnnnnnnnnnnnnnnnnnnnnnnnnnnnnnnnnnnnnnnnnnnnnnnnnnnnnnnnnnnnnnnnnnnnnnnnnnnnnnnnnnnnnnnnnnnnnnnnnnnnnnnnnnnnnnnnnnnnnnnnnnnnnnnnnnnnnnnnnnnnnnnnnnnnnnnnnnnnnnnnnnnnnnnnnnnnnnnnnnnnnnnnnnnnnnnnnnnnnnnnnnnnnnnnnnnnnnnnnnnnnnnnnnnnnnnnnnnnnnnnnnnnnnnnnnnnnnnnnnnnnnnnnnnnnnnnnnnnnnnnnnnnnnnnnnnnnnnnnnnnnnnnnnnnnnnnnnnnnnnnnnnnnnnnnnnnnnnnnnnnnnnnnnnnnnnnnnnnnnnnnnnnnnnnnnnnnnnnnnnnnnnnnnnnnnnnnnnnnnnnnnnnnnnnnnnnnnnnnnnnnnnnnnnnnnnnnnnnnnnnnnnnnnnnnnnnnnnnnnnnnnnnnnnnnnnnnnnnnnnnnnnnnnnnnnnnnnnnnnnnnnnnnnnnnnnnnnnnnnnnnnnnnnnnnnnnnnnnnnnnnnnnnnnnnnnnnnnnnnnnnnnnnnnnnnnnnnnnnnnnnnnnnnnnnnnnnnnnnnnnnnnnnnnnnnnnnnnnnnnnnnnnnnnnnnnnnnnnnnnnnnnnnnnnnnnnnnnnnnnnnnnnnnnnnnnnnnnnnnnnnnnnnnnnnnnnnnnnnnnnnnnnnnnnnnnnnnnnnnnnnnnnnnnnnnnnnnnnnnnnnnnnnnnnnnnnnnnnnnnnnnnnnnnnnnnnnnnnnnnnnnnnnnnnnnnnnnnnnnnnnnnnnnnnnnnnnnnnnnnnnnnnnnnnnnnnnnnnnnnnnnnnnnnnnnnnnnnnnnnnnnnnnnnnnnnnnnnnnnnnnnnnnnnnnnnnnnnnnnnnnnnnnnnnnnnnnnnnnnnnnnnnnnnnnnnnnnnnnnnnnnnnnnnnnnnnnnnnnnnnnnnnnnnnnnnnnnnnnnnnnnnnnnnnnnnnnnnnnnnnnnnnnnnnnnnnnnnnnnnnnnnnnnnnnnnnnnnnnnnnnnnnnnnnnnnnnnnnnnnnnnnnnnnnnnnnnnnnnnnnnnnnnnnnnnnnnnnnnnnnnnnnnnnnnnnnnnnnnnnnnnnnnnnnnnnnnnnnnnnnnnnnnnnnnnnnnnnnnnnnnnnnnnnnnnnnnnnnnnnnnnnnnnnnnnnnnnnnnnnnnnnnnnnnnnnnnnnnnnnnnnnnnnnnnnnnnnnnnnnnnnnnnnnnnnnnnnnnnnnnnnnnnnnnnnnnnnnnnnnnnnnnnnnnnnnnnnnnnnnnnnnnnnnnnnnnnnnnnnnnnnnnnnnnnnnnnnnnnnnnnnnnnnnnnnnnnnnnnnnnnnnnnnnnnnnnnnnnnnnnnnnnnnnnnnnnnnnnnnnnnnnnnnnnnnnnnnnnnnnnnnnnnnnnnnnnnnnnnnnnnnnnnnnnnnnnnnnnnnnnnnnnnnnnnnnnnnnnnnnnnnnnnnnnnnnnnnnnnnnnnnnnnnnnnnnnnnnnnnnnnnnnnnnnnnnnnnnnnnnnnnnnnnnnnnnnnnnnnnnnnnnnnnnnnnnnnnnnnnnnnnnnnnnnnnnnnnnnnnnnnnnnnnnnnnnnnnnnnnnnnnnnnnnnnnnnnnnnnnnnnnnnnnnnnnnnnnnnnnnnnnnnnnnnnnnnnnnnnnnnnnnnnnnnnnnnnnnnnnnnnnnnnnnnnnnnnnnnnnnnnnnnnnnnnnnnnnnnnnnnnnnnnnnnnnnnnnnnnnnnnnnnnnnnnnnnnnnnnnnnnnnnnnnnnnnnnnnnnnnnnnnnnnnnnnnnnnnnnnnnnnnnnnnnnnnnnnnnnnnnnnnnnnnnnnnnnnnnnnnnnnnnnnnnnnnnnnnnnnnnnnnnnnnnnnnnnnnnnnnnnnnnnnnnnnnnnnnnnnnnnnnnnnnnnnnnnnnnnnnnnnnnnnnnnnnnnnnnnnnnnnnnnnnnnnnnnnnnnnnnnnnnnnnnnnnnnnnnnnnnnnnnnnnnnnnnnnnnnnnnnnnnnnnnnnnnnnnnnnnnnnnnnnnnnnnnnnnnnnnnnnnnnnnnnnnnnnnnnnnnnnnnnnnnnnnnnnnnnnnnnnnnnnnnnnnnnnnnnnnnnnnnnnnnnnnnnnnnnnnnnnnnnnnnnnnnnnnnnnnnnnnnnnnnnnnnnnnnnnnnnnnnnnnnnnnnnnnnnnnnnnnnnnnnnnnnnnnnnnnnnnnnnnnnnnnnnnnnnnnnnnnnnnnnnnnnnnnnnnnnnnnnnnnnnnnnnnnnnnnnnnnnnnnnnnnnnnnnnnnnnnnnnnnnnnnnnnnnnnnnnnnnnnnnnnnnnnnnnnnnnnnnnnnnnnnnnnnnnnnnnnnnnnnnnnnnnnnnnnnnnnnnnnnnnnnnnnnnnnnnnnnnnnnnnnnnnnnnnnnnnnnnnnnnnnnnnnnnnnnnnnnnnnnnnnnnnnnnnnnnnnnnnnnnnnnnnnnnnnnnnnnnnnnnnnnnnnnnnnnnnnnnnnnnnnnnnnnnnnnnnnnnnnnnnnnnnnnnnnnnnnnnnnnnnnnnnnnnnnnnnnnnnnnnnnnnnnnnnnnnnnnnnnnnnnnnnnnnnnnnnnnnnnnnnnnnnnnnnnnnnnnnnnnnnnnnnnnnnnnnnnnnnnnnnnnnnnnnnnnnnnnnnnnnnnnnnnnnnnnnnnnnnnnnnnnnnnnnnnnnnnnnnnnnnnnnnnnnnnnnnnnnnnnnnnnnnnnnnnnnnnnnnnnnnnnnnnnnnnnnnnnnnnnnnnnnnnnnnnnnnnnnnnnnnnnnnnnnnnnnnnnnnnnnnnnnnnnnnnnnnnnnnnnnnnnnnnnnnnnnnnnnnnnnnnnnnnnnnnnnnnnnnnnnnnnnnnnnnnnnnnnnnnnnnnnnnnnnnnnnnnnnnnnnnnnnnnnnnnnnnnnnnnnnnnnnnnnnnnnnnnnnnnnnnnnnnnnnnnnnnnnnnnnnnnnnnnnnnnnnnnnnnnnnnnnnnnnnnnnnnnnnnnnnnnnnnnnnnnnnnnnnnnnnnnnnnnnnnnnnnnnnnnnnnnnnnnnnnnnnnnnnnnnnnnnnnnnnnnnnnnnnnnnnnnnnnnnnnnnnnnnnnnnnnnnnnnnnnnnnnnnnnnnnnnnnnnnnnnnnnnnnnnnnnnnnnnnnnnnnnnnnnnnnnnnnnnnnnnnnnnnnnnnnnnnnnnnnnnnnnnnnnnnnnnnnnnnnnnnnnnnnnnnnnnnnnnnnnnnnnnnnnnnnnnnnnnnnnnnnnnnnnnnnnnnnnnnnnnnnnnnnnnnnnnnnnnnnnnnnnnnnnnnnnnnnnnnnnnnnnnnnnnnnnnnnnnnnnnnnnnnnnnnnnnnnnnnnnnnnnnnnnnnnnnnnnnnnnnnnnnnnnnnnnnnnnnnnnnnnnnnnnnnnnnnnnnnnnnnnnnnnnnnnnnnnnnnnnnnnnnnnnnnnnnnnnnnnnnnnnnnnnnnnnnnnnnnnnnnnnnnnnnnnnnnnnnnnnnnnnnnnnnnnnnnnnnnnnnnnnnnnnnnnnnnnnnnnnnnnnnnnnnnnnnnnnnnnnnnnnnnnnnnnnnnnnnnnnnnnnnnnnnnnnnnnnnnnnnnnnnnnnnnnnnnnnnnnnnnnnnnnnnnnnnnnnnnnnnnnnnnnnnnnnnnnnnnnnnnnnnnnnnnnnnnnnnnnnnnnnnnnnnnnnnnnnnnnnnnnnnnnnnnnnnnnnnnnnnnnnnnnnnnnnnnnnnnnnnnnnnnnnnnnnnnnnnnnnnnnnnnnnnnnnnnnnnnnnnnnnnnnnnnnnnnnnnnnnnnnnnnnnnnnnnnnnnnnnnnnnnnnnnnnnnnnnnnnnnnnnnnnnnnnnnnnnnnnnnnnnnnnnnnnnnnnnnnnnnnnnnnnnnnnnnnnnnnnnnnnnnnnnnnnnnnnnnnnnnnnnnnnnnnnnnnnnnnnnnnnnnnnnnnnnnnnnnnnnnnnnnnnnnnnnnnnnnnnnnnnnnnnnnnnnnnnnnnnnnnnnnnnnnnnnnnnnnnnnnnnnnnnnnnnnnnnnnnnnnnnnnnnnnnnnnnnnnnnnnnnnnnnnnnnnnnnnnnnnnnnnnnnnnnnnnnnnnnnnnnnnnnnnnnnnnnnnnnnnnnnnnnnnnnnnnnnnnnnnnnnnnnnnnnnnnnnnnnnnnnnnnnnnnnnnnnnnnnnnnnnnnnnnnnnnnnnnnnnnnnnnnnnnnnnnnnnnnnnnnnnnnnnnnnnnnnnnnnnnnnnnnnnnnnnnnnnnnnnnnnnnnnnnnnnnnnnnnnnnnnnnnnnnnnnnnnnnnnnnnnnnnnnnnnnnnnnnnnnnnnnnnnnnnnnnnnnnnnnnnnnnnnnnnnnnnnnnnnnnnnnnnnnnnnnnnnnnnnnnnnnnnnnnnnnnnnnnnnnnnnnnnnnnnnnnnnnnnnnnnnnnnnnnnnnnnnnnnnnnnnnnnnnnnnnnnnnnnnnnnnnnnnnnnnnnnnnnnnnnnnnnnnnnnnnnnnnnnnnnnnnnnnnnnnnnnnnnnnnnnnnnnnnnnnnnnnnnnnnnnnnnnnnnnnnnnnnnnnnnnnnnnnnnnnnnnnnnnnnnnnnnnnnnnnnnnnnnnnnnnnnnnnnnnnnnnnnnnnnnnnnnnnnnnnnnnnnnnnnnnnnnnnnnnnnnnnnnnnnnnnnnnnnnnnnnnnnnnnnnnnnnnnnnnnnnnnnnnnnnnnnnnnnnnnnnnnnnnnnnnnnnnnnnnnnnnnnnnnnnnnnnnnnnnnnnnnnnnnnnnnnnnnnnnnnnnnnnnnnnnnnnnnnnnnnnnnnnnnnnnnnnnnnnnnnnnnnnnnnnnnnnnnnnnnnnnnnnnnnnnnnnnnnnnnnnnnnnnnnnnnnnnnnnnnnnnnnnnnnnnnnnnnnnnnnnnnnnnnnnnnnnnnnnnnnnnnnnnnnnnnnnnnnnnnnnnnnnnnnnnnnnnnnnnnnnnnnnnnnnnnnnnnnnnnnnnnnnnnnnnnnnnnnnnnnnnnnnnnnnnnnnnnnnnnnnnnnnnnnnnnnnnnnnnnnnnnnnnnnnnnnnnnnnnnnnnnnnnnnnnnnnnnnnnnnnnnnnnnnnnnnnnnnnnnnnnnnnnnnnnnnnnnnnnnnnnnnnnnnnnnnnnnnnnnnnnnnnnnnnnnnnnnnnnnnnnnnnnnnnnnnnnnnnnnnnnnnnnnnnnnnnnnnnnnnnnnnnnnnnnnnnnnnnnnnnnnnnnnnnnnnnnnnnnnnnnnnnnnnnnnnnnnnnnnnnnnnnnnnnnnnnnnnnnnnnnnnnnnnnnnnnnnnnnnnnnnnnnnnnnnnnnnnnnnnnnnnnnnnnnnnnnnnnnnnnnnnnnnnnnnnnnnnnnnnnnnnnnnnnnnnnnnnnnnnnnnnnnnnnnnnnnnnnnnnnnnnnnnnnnnnnnnnnnnnnnnnnnnnnnnnnnnnnnnnnnnnnnnnnnnnnnnnnnnnnnnnnnnnnnnnnnnnnnnnnnnnnnnnnnnnnnnnnnnnnnnnnnnnnnnnnnnnnnnnnnnnnnnnnnnnnnnnnnnnnnnnnnnnnnnnnnnnnnnnnnnnnnnnnnnnnnnnnnnnnnnnnnnnnnnnnnnnnnnnnnnnnnnnnnnnnnnnnnnnnnnnnnnnnnnnnnnnnnnnnnnnnnnnnnnnnnnnnnnnnnnnnnnnnnnnnnnnnnnnnnnnnnnnnnnnnnnnnnnnnnnnnnnnnnnnnnnnnnnnnnnnnnnnnnnnnnnnnnnnnnnnnnnnnnnnnnnnnnnnnnnnnnnnnnnnnnnnnnnnnnnnnnnnnnnnnnnnnnnnnnnnnnnnnnnnnnnnnnnnnnnnnnnnnnnnnnnnnnnnnnnnnnnnnnnnnnnnnnnnnnnnnnnnnnnnnnnnnnnnnnnnnnnnnnnnnnnnnnnnnnnnnnnnnnnnnnnnnnnnnnnnnnnnnnnnnnnnnnnnnnnnnnnnnnnnnnnnnnnnnnnnnnnnnnnnnnnnnnnnnnnnnnnnnnnnnnnnnnnnnnnnnnnnnnnnnnnnnnnnnnnnnnnnnnnnnnnnnnnnnnnnnnnnnnnnnnnnnnnnnnnnnnnnnnnnnnnnnnnnnnnnnnnnnnnnnnnnnnnnnnnnnnnnnnnnnnnnnnnnnnnnnnnnnnnnnnnnnnnnnnnnnnnnnnnnnnnnnnnnnnnnnnnnnnnnnnnnnnnnnnnnnnnnnnnnnnnnnnnnnnnnnnnnnnnnnnnnnnnnnnnnnnnnnnnnnnnnnnnnnnnnnnnnnnnnnnnnnnnnnnnnnnnnnnnnnnnnnnnnnnnnnnnnnnnnnnnnnnnnnnnnnnnnnnnnnnnnnnnnnnnnnnnnnnnnnnnnnnnnnnnnnnnnnnnnnnnnnnnnnnnnnnnnnnnnnnnnnnnnnnnnnnnnnnnnnnnnnnnnnnnnnnnnnnnnnnnnnnnnnnnnnnnnnnnnnnnnnnnnnnnnnnnnnnnnnnnnnnnnnnnnnnnnnnnnnnnnnnnnnnnnnnnnnnnnnnnnnnnnnnnnnnnnnnnnnnnnnnnnnnnnnnnnnnnnnnnnnnnnnnnnnnnnnnnnnnnnnnnnnnnnnnnnnnnnnnnnnnnnnnnnnnnnnnnnnnnnnnnnnnnnnnnnnnnnnnnnnnnnnnnnnnnnnnnnnnnnnnnnnnnnnnnnnnnnnnnnnnnnnnnnnnnnnnnnnnnnnnnnnnnnnnnnnnnnnnnnnnnnnnnnnnnnnnnnnnnnnnnnnnnnnnnnnnnnnnnnnnnnnnnnnnnnnnnnnnnnnnnnnnnnnnnnnnnnnnnnnnnnnnnnnnnnnnnnnnnnnnnnnnnnnnnnnnnnnnnnnnnnnnnnnnnnnnnnnnnnnnnnnnnnnnnnnnnnnnnnnnnnnnnnnnnnnnnnnnnnnnnnnnnnnnnnnnnnnnnnnnnnnnnnnnnnnnnnnnnnnnnnnnnnnnnnnnnnnnnnnnnnnnnnnnnnnnnnnnnnnnnnnnnnnnnnnnnnnnnnnnnnnnnnnnnnnnnnnnnnnnnnnnnnnnnnnnnnnnnnnnnnnnnnnnnnnnnnnnnnnnnnnnnnnnnnnnnnnnnnnnnnnnnnnnnnnnnnnnnnnnnnnnnnnnnnnnnnnnnnnnnnnnnnnnnnnnnnnnnnnnnnnnnnnnnnnnnnnnnnnnnnnnnnnnnnnnnnnnnnnnnnnnnnnnnnnnnnnnnnnnnnnnnnnnnnnnnnnnnnnnnnnnnnnnnnnnnnnnnnnnnnnnnnnnnnnnnnnnnnnnnnnnnnnnnnnnnnnnnnnnnnnnnnnnnnnnnnnnnnnnnnnnnnnnnnnnnnnnnnnnnnnnnnnnnnnnnnnnnnnnnnnnnnnnnnnnnnnnnnnnnnnnnnnnnnnnnnnnnnnnnnnnnnnnnnnnnnnnnnnnnnnnnnnnnnnnnnnnnnnnnnnnnnnnnnnnnnnnnnnnnnnnnnnnnnnnnnnnnnnnnnnnnnnnnnnnnnnnnnnnnnnnnnnnnnnnnnnnnnnnnnnnnnnnnnnnnnnnnnnnnnnnnnnnnnnnnnnnnnnnnnnnnnnnnnnnnnnnnnnnnnnnnnnnnnnnnnnnnnnnnnnnnnnnnnnnnnnnnnnnnnnnnnnnnnnnnnnnnnnnnnnnnnnnnnnnnnnnnnnnnnnnnnnnnnnnnnnnnnnnnnnnnnnnnnnnnnnnnnnnnnnnnnnnnnnnnnnnnnnnnnnnnnnnnnnnnnnnnnnnnnnnnnnnnnnnnnnnnnnnnnnnnnnnnnnnnnnnnnnnnnnnnnnnnnnnnnnnnnnnnnnnnnnnnnnnnnnnnnnnnnnnnnnnnnnnnnnnnnnnnnnnnnnnnnnnnnnnnnnnnnnnnnnnnnnnnnnnnnnnnnnnnnnnnnnnnnnnnnnnnnnnnnnnnnnnnnnnnnnnnnnnnnnnnnnnnnnnnnnnnnnnnnnnnnnnnnnnnnnnnnnnnnnnnnnnnnnnnnnnnnnnnnnnnnnnnnnnnnnnnnnnnnnnnnnnnnnnnnnnnnnnnnnnnnnnnnnnnnnnnnnnnnnnnnnnnnnnnnnnnnnnnnnnnnnnnnnnnnnnnnnnnnnnnnnnnnnnnnnnnnnnnnnnnnnnnnnnnnnnnnnnnnnnnnnnnnnnnnnnnnnnnnnnnnnnnnnnnnnnnnnnnnnnnnnnnnnnnnnnnnnnnnnnnnnnnnnnnnnnnnnnnnnnnnnnnnnnnnnnnnnnnnnnnnnnnnnnnnnnnnnnnnnnnnnnnnnnnnnnnnnnnnnnnnnnnnnnnnnnnnnnnnnnnnnnnnnnnnnnnnnnnnnnnnnnnnnnnnnnnnnnnnnnnnnnnnnnnnnnnnnnnnnnnnnnnnnnnnnnnnnnnnnnnnnnnnnnnnnnnnnnnnnnnnnnnnnnnnnnnnnnnnnnnnnnnnnnnnnnnnnnnnnnnnnnnnnnnnnnnnnnnnnnnnnnnnnnnnnnnnnnnnnnnnnnnnnnnnnnnnnnnnnnnnnnnnnnnnnnnnnnnnnnnnnnnnnnnnnnnnnnnnnnnnnnnnnnnnnnnnnnnnnnnnnnnnnnnnnnnnnnnnnnnnnnnnnnnnnnnnnnnnnnnnnnnnnnnnnnnnnnnnnnnnnnnnnnnnnnnnnnnnnnnnnnnnnnnnnnnnnnnnnnnnnnnnnnnnnnnnnnnnnnnnnnnnnnnnnnnnnnnnnnnnnnnnnnnnnnnnnnnnnnnnnnnnnnnnnnnnnnnnnnnnnnnnnnnnnnnnnnnnnnnnnnnnnnnnnnnnnnnnnnnnnnnnnnnnnnnnnnnnnnnnnnnnnnnnnnnnnnnnnnnnnnnnnnnnnnnnnnnnnnnnnnnnnnnnnnnnnnnnnnnnnnnnnnnnnnnnnnnnnnnnnnnnnnnnnnnnnnnnnnnnnnnnnnnnnnnnnnnnnnnnnnnnnnnnnnnnnnnnnnnnnnnnnnnnnnnnnnnnnnnnnnnnnnnnnnnnnnnnnnnnnnnnnnnnnnnnnnnnnnnnnnnnnnnnnnnnnnnnnnnnnnnnnnnnnnnnnnnnnnnnnnnnnnnnnnnnnnnnnnnnnnnnnnnnnnnnnnnnnnnnnnnnnnnnnnnnnnnnnnnnnnnnnnnnnnnnnnnnnnnnnnnnnnnnnnnnnnnnnnnnnnnnnnnnnnnnnnnnnnnnnnnnnnnnnnnnnnnnnnnnnnnnnnnnnnnnnnnnnnnnnnnnnnnnnnnnnnnnnnnnnnnnnnnnnnnnnnnnnnnnnnnnnnnnnnnnnnnnnnnnnnnnnnnnnnnnnnnnnnnnnnnnnnnnnnnnnnnnnnnnnnnnnnnnnnnnnnnnnnnnnnnnnnnnnnnnnnnnnnnnnnnnnnnnnnnnnnnnnnnnnnnnnnnnnnnnnnnnnnnnnnnnnnnnnnnnnnnnnnnnnnnnnnnnnnnnnnnnnnnnnnnnnnnnnnnnnnnnnnnnnnnnnnnnnnnnnnnnnnnnnnnnnnnnnnnnnnnnnnnnnnnnnnnnnnnnnnnnnnnnnnnnnnnnnnnnnnnnnnnnnnnnnnnnnnnnnnnnnnnnnnnnnnnnnnnnnnnnnnnnnnnnnnnnnnnnnnnnnnnnnnnnnnnnnnnnnnnnnnnnnnnnnnnnnnnnnnnnnnnnnnnnnnnnnnnnnnnnnnnnnnnnnnnnnnnnnnnnnnnnnnnnnnnnnnnnnnnnnnnnnnnnnnnnnnnnnnnnnnnnnnnnnnnnnnnnnnnnnnnnnnnnnnnnnnnnnnnnnnnnnnnnnnnnnnnnnnnnnnnnnnnnnnnnnnnnnnnnnnnnnnnnnnnnnnnnnnnnnnnnnnnnnnnnnnnnnnnnnnnnnnnnnnnnnnnnnnnnnnnnnnnnnnnnnnnnnnnnnnnnnnnnnnnnnnnnnnnnnnnnnnnnnnnnnnnnnnnnnnnnnnnnnnnnnnnnnnnnnnnnnnnnnnnnnnnnnnnnnnnnnnnnnnnnnnnnnnnnnnnnnnnnnnnnnnnnnnnnnnnnnnnnnnnnnnnnnnnnnnnnnnnnnnnnnnnnnnnnnnnnnnnnnnnnnnnnnnnnnnnnnnnnnnnnnnnnnnnnnnnnnnnnnnnnnnnnnnnnnnnnnnnnnnnnnnnnnnnnnnnnnnnnnnnnnnnnnnnnnnnnnnnnnnnnnnnnnnnnnnnnnnnnnnnnnnnnnnnnnnnnnnnnnnnnnnnnnnnnnnnnnnnnnnnnnnnnnnnnnnnnnnnnnnnnnnnnnnnnnnnnnnnnnnnnnnnnnnnnnnnnnnnnnnnnnnnnnnnnnnnnnnnnnnnnnnnnnnnnnnnnnnnnnnnnnnnnnnnnnnnnnnnnnnnnnnnnnnnnnnnnnnnnnnnnnnnnnnnnnnnnnnnnnnnnnnnnnnnnnnnnnnnnnnnnnnnnnnnnnnnnnnnnnnnnnnnnnnnnnnnnnnnnnnnnnnnnnnnnnnnnnnnnnnnnnnnnnnnnnnnnnnnnnnnnnnnnnnnnnnnnnnnnnnnnnnnnnnnnnnnnnnnnnnnnnnnnnnnnnnnnnnnnnnnnnnnnnnnnnnnnnnnnnnnnnnnnnnnnnnnnnnnnnnnnnnnnnnnnnnnnnnnnnnnnnnnnnnnnnnnnnnnnnnnnnnnnnnnnnnnnnnnnnnnnnnnnnnnnnnnnnnnnnnnnnnnnnnnnnnnnnnnnnnnnnnnnnnnnnnnnnnnnnnnnnnnnnnnnnnnnnnnnnnnnnnnnnnnnnnnnnnnnnnnnnnnnnnnnnnnnnnnnnnnnnnnnnnnnnnnnnnnnnnnnnnnnnnnnnnnnnnnnnnnnnnnnnnnnnnnnnnnnnnnnnnnnnnnnnnnnnnnnnnnnnnnnnnnnnnnnnnnnnnnnnnnnnnnnnnnnnnnnnnnnnnnnnnnnnnnnnnnnnnnnnnnnnnnnnnnnnnnnnnnnnnnnnnnnnnnnnnnnnnnnnnnnnnnnnnnnnnnnnnnnnnnnnnnnnnnnnnnnnnnnnnnnnnnnnnnnnnnnnnnnnnnnnnnnnnnnnnnnnnnnnnnnnnnnnnnnnnnnnnnnnnnnnnnnnnnnnnnnnnnnnnnnnnnnnnnnnnnnnnnnnnnnnnnnnnnnnnnnnnnnnnnnnnnnnnnnnnnnnnnnnnnnnnnnnnnnnnnnnnnnnnnnnnnnnnnnnnnnnnnnnnnnnnnnnnnnnnnnnnnnnnnnnnnnnnnnnnnnnnnnnnnnnnnnnnnnnnnnnnnnnnnnnnnnnnnnnnnnnnnnnnnnnnnnnnnnnnnnnnnnnnnnnnnnnnnnnnnnnnnnnnnnnnnnnnnnnnnnnnnnnnnnnnnnnnnnnnnnnnnnnnnnnnnnnnnnnnnnnnnnnnnnnnnnnnnnnnnnnnnnnnnnnnnnnnnnnnnnnnnnnnnnnnnnnnnnnnnnnnnnnnnnnnnnnnnnnnnnnnnnnnnnnnnnnnnnnnnnnnnnnnnnnnnnnnnnnnnnnnnnnnnnnnnnnnnnnnnnnnnnnnnnnnnnnnnnnnnnnnnnnnnnnnnnnnnnnnnnnnnnnnnnnnnnnnnnnnnnnnnnnnnnnnnnnnnnnnnnnnnnnnnnnnnnnnnnnnnnnnnnnnnnnnnnnnnnnnnnnnnnnnnnnnnnnnnnnnnnnnnnnnnnnnnnnnnnnnnnnnnnnnnnnnnnnnnnnnnnnnnnnnnnnnnnnnnnnnnnnnnnnnnnnnnnnnnnnnnnnnnnnnnnnnnnnnnnnnnnnnnnnnnnnnnnnnnnnnnnnnnnnnnnnnnnnnnnnnnnnnnnnnnnnnnnnnnnnnnnnnnnnnnnnnnnnnnnnnnnnnnnnnnnnnnnnnnnnnnnnnnnnnnnnnnnnnnnnnnnnnnnnnnnnnnnnnnnnnnnnnnnnnnnnnnnnnnnnnnnnnnnnnnnnnnnnnnnnnnnnnnnnnnnnnnnnnnnnnnnnnnnnnnnnnnnnnnnnnnnnnnnnnnnnnnnnnnnnnnnnnnnnnnnnnnnnnnnnnnnnnnnnnnnnnnnnnnnnnnnnnnnnnnnnnnnnnnnnnnnnnnnnnnnnnnnnnnnnnnnnnnnnnnnnnnnnnnnnnnnnnnnnnnnnnnnnnnnnnnnnnnnnnnnnnnnnnnnnnnnnnnnnnnnnnnnnnnnnnnnnnnnnnnnnnnnnnnnnnnnnnnnnnnnnnnnnnnnnnnnnnnnnnnnnnnnnnnnnnnnnnnnnnnnnnnnnnnnnnnnnnnnnnnnnnnnnnnnnnnnnnnnnnnnnnnnnnnnnnnnnnnnnnnnnnnnnnnnnnnnnnnnnnnnnnnnnnnnnnnnnnnnnnnnnnnnnnnnnnnnnnnnnnnnnnnnnnnnnnnnnnnnnnnnnnnnnnnnnnnnnnnnnnnnnnnnnnnnnnnnnnnnnnnnnnnnnnnnnnnnnnnnnnnnnnnnnnnnnnnnnnnnnnnnnnnnnnnnnnnnnnnnnnnnnnnnnnnnnnnnnnnnnnnnnnnnnnnnnnnnnnnnnnnnnnnnnnnnnnnnnnnnnnnnnnnnnnnnnnnnnnnnnnnnnnnnnnnnnnnnnnnnnnnnnnnnnnnnnnnnnnnnnnnnnnnnnnnnnnnnnnnnnnnnnnnnnnnnnnnnnnnnnnnnnnnnnnnnnnnnnnnnnnnnnnnnnnnnnnnnnnnnnnnnnnnnnnnnnnnnnnnnnnnnnnnnnnnnnnnnnnnnnnnnnnnnnnnnnnnnnnnnnnnnnnnnnnnnnnnnnnnnnnnnnnnnnnnnnnnnnnnnnnnnnnnnnnnnnnnnnnnnnnnnnnnnnnnnnnnnnnnnnnnnnnnnnnnnnnnnnnnnnnnnnnnnnnnnnnnnnnnnnnnnnnnnnnnnnnnnnnnnnnnnnnnnnnnnnnnnnnnnnnnnnnnnnnnnnnnnnnnnnnnnnnnnnnnnnnnnnnnnnnnnnnnnnnnnnnnnnnnnnnnnnnnnnnnnnnnnnnnnnnnnnnnnnnnnnnnnnnnnnnnnnnnnnnnnnnnnnnnnnnnnnnnnnnnnnnnnnnnnnnnnnnnnnnnnnnnnnnnnnnnnnnnnnnnnnnnnnnnnnnnnnnnnnnnnnnnnnnnnnnnnnnnnnnnnnnnnnnnnnnnnnnnnnnnnnnnnnnnnnnnnnnnnnnnnnnnnnnnnnnnnnnnnnnnnnnnnnnnnnnnnnnnnnnnnnnnnnnnnnnnnnnnnnnnnnnnnnnnnnnnnnnnnnnnnnnnnnnnnnnnnnnnnnnnnnnnnnnnnnnnnnnnnnnnnnnnnnnnnnnnnnnnnnnnnnnnnnnnnnnnnnnnnnnnnnnnnnnnnnnnnnnnnnnnnnnnnnnnnnnnnnnnnnnnnnnnnnnnnnnnnnnnnnnnnnnnnnnnnnnnnnnnnnnnnnnnnnnnnnnnnnnnnnnnnnnnnnnnnnnnnnnnnnnnnnnnnnnnnnnnnnnnnnnnnnnnnnnnnnnnnnnnnnnnnnnnnnnnnnnnnnnnnnnnnnnnnnnnnnnnnnnnnnnnnnnnnnnnnnnnnnnnnnnnnnnnnnnnnnnnnnnnnnnnnnnnnnnnnnnnnnnnnnnnnnnnnnnnnnnnnnnnnnnnnnnnnnnnnnnnnnnnnnnnnnnnnnnnnnnnnnnnnnnnnnnnnnnnnnnnnnnnnnnnnnnnnnnnnnnnnnnnnnnnnnnnnnnnnnnnnnnnnnnnnnnnnnnnnnnnnnnnnnnnnnnnnnnnnnnnnnnnnnnnnnnnnnnnnnnnnnnnnnnnnnnnnnnnnnnnnnnnnnnnnnnnnnnnnnnnnnnnnnnnnnnnnnnnnnnnnnnnnnnnnnnnnnnnnnnnnnnnnnnnnnnnnnnnnnnnnnnnnnnnnnnnnnnnnnnnnnnnnnnnnnnnnnnnnnnnnnnnnnnnnnnnnnnnnnnnnnnnnnnnnnnnnnnnnnnnnnnnnnnnnnnnnnnnnnnnnnnnnnnnnnnnnnnnnnnnnnnnnnnnnnnnnnnnnnnnnnnnnnnnnnnnnnnnnnnnnnnnnnnnnnnnnnnnnnnnnnnnnnnnnnnnnnnnnnnnnnnnnnnnnnnnnnnnnnnnnnnnnnnnnnnnnnnnnnnnnnnnnnnnnnnnnnnnnnnnnnnnnnnnnnnnnnnnnnnnnnnnnnnnnnnnnnnnnnnnnnnnnnnnnnnnnnnnnnnnnnnnnnnnnnnnnnnnnnnnnnnnnnnnnnnnnnnnnnnnnnnnnnnnnnnnnnnnnnnnnnnnnnnnnnnnnnnnnnnnnnnnnnnnnnnnnnnnnnnnnnnnnnnnnnnnnnnnnnnnnnnnnnnnnnnnnnnnnnnnnnnnnnnnnnnnnnnnnnnnnnnnnnnnnnnnnnnnnnnnnnnnnnnnnnnnnnnnnnnnnnnnnnnnnnnnnnnnnnnnnnnnnnnnnnnnnnnnnnnnnnnnnnnnnnnnnnnnnnnnnnnnnnnnnnnnnnnnnnnnnnnnnnnnnnnnnnnnnnnnnnnnnnnnnnnnnnnnnnnnnnnnnnnnnnnnnnnnnnnnnnnnnnnnnnnnnnnnnnnnnnnnnnnnnnnnnnnnnnnnnnnnnnnnnnnnnnnnnnnnnnnnnnnnnnnnnnnnnnnnnnnnnnnnnnnnnnnnnnnnnnnnnnnnnnnnnnnnnnnnnnnnnnnnnnnnnnnnnnnnnnnnnnnnnnnnnnnnnnnnnnnnnnnnnnnnnnnnnnnnnnnnnnnnnnnnnnnnnnnnnnnnnnnnnnnnnnnnnnnnnnnnnnnnnnnnnnnnnnnnnnnnnnnnnnnnnnnnnnnnnnnnnnnnnnnnnnnnnnnnnnnnnnnnnnnnnnnnnnnnnnnnnnnnnnnnnnnnnnnnnnnnnnnnnnnnnnnnnnnnnnnnnnnnnnnnnnnnnnnnnnnnnnnnnnnnnnnnnnnnnnnnnnnnnnnnnnnnnnnnnnnnnnnnnnnnnnnnnnnnnnnnnnnnnnnnnnnnnnnnnnnnnnnnnnnnnnnnnnnnnnnnnnnnnnnnnnnnnnnnnnnnnnnnnnnnnnnnnnnnnnnnnnnnnnnnnnnnnnnnnnnnnnnnnnnnnnnnnnnnnnnnnnnnnnnnnnnnnnnnnnnnnnnnnnnnnnnnnnnnnnnnnnnnnnnnnnnnnnnnnnnnnnnnnnnnnnnnnnnnnnnnnnnnnnnnnnnnnnnnnnnnnnnnnnnnnnnnnnnnnnnnnnnnnnnnnnnnnnnnnnnnnnnnnnnnnnnnnnnnnnnnnnnnnnnnnnnnnnnnnnnnnnnnnnnnnnnnnnnnnnnnnnnnnnnnnnnnnnnnnnnnnnnnnnnnnnnnnnnnnnnnnnnnnnnnnnnnnnnnnnnnnnnnnnnnnnnnnnnnnnnnnnnnnnnnnnnnnnnnnnnnnnnnnnnnnnnnnnnnnnnnnnnnnnnnnnnnnnnnnnnnnnnnnnnnnnnnnnnnnnnnnnnnnnnnnnnnnnnnnnnnnnnnnnnnnnnnnnnnnnnnnnnnnnnnnnnnnnnnnnnnnnnnnnnnnnnnnnnnnnnnnnnnnnnnnnnnnnnnnnnnnnnnnnnnnnnnnnnnnnnnnnnnnnnnnnnnnnnnnnnnnnnnnnnnnnnnnnnnnnnnnnnnnnnnnnnnnnnnnnnnnnnnnnnnnnnnnnnnnnnnnnnnnnnnnnnnnnnnnnnnnnnnnnnnnnnnnnnnnnnnnnnnnnnnnnnnnnnnnnnnnnnnnnnnnnnnnnnnnnnnnnnnnnnnnnnnnnnnnnnnnnnnnnnnnnnnnnnnnnnnnnnnnnnnnnnnnnnnnnnnnnnnnnnnnnnnnnnnnnnnnnnnnnnnnnnnnnnnnnnnnnnnnnnnnnnnnnnnnnnnnnnnnnnnnnnnnnnnnnnnnnnnnnnnnnnnnnnnnnnnnnnnnnnnnnnnnnnnnnnnnnnnnnnnnnnnnnnnnnnnnnnnnnnnnnnnnnnnnnnnnnnnnnnnnnnnnnnnnnnnnnnnnnnnnnnnnnnnnnnnnnnnnnnnnnnnnnnnnnnnnnnnnnnnnnnnnnnnnnnnnnnnnnnnnnnnnnnnnnnnnnnnnnnnnnnnnnnnnnnnnnnnnnnnnnnnnnnnnnnnnnnnnnnnnnnnnnnnnnnnnnnnnnnnnnnnnnnnnnnnnnnnnnnnnnnnnnnnnnnnnnnnnnnnnnnnnnnnnnnnnnnnnnnnnnnnnnnnnnnnnnnnnnnnnnnnnnnnnnnnnnnnnnnnnnnnnnnnnnnnnnnnnnnnnnnnnnnnnnnnnnnnnnnnnnnnnnnnnnnnnnnnnnnnnnnnnnnnnnnnnnnnnnnnnnnnnnnnnnnnnnnnnnnnnnnnnnnnnnnnnnnnnnnnnnnnnnnnnnnnnnnnnnnnnnnnnnnnnnnnnnnnnnnnnnnnnnnnnnnnnnnnnnnnnnnnnnnnnnnnnnnnnnnnnnnnnnnnnnnnnnnnnnnnnnnnnnnnnnnnnnnnnnnnnnnnnnnnnnnnnnnnnnnnnnnnnnnnnnnnnnnnnnnnnnnnnnnnnnnnnnnnnnnnnnnnnnnnnnnnnnnnnnnnnnnnnnnnnnnnnnnnnnnnnnnnnnnnnnnnnnnnnnnnnnnnnnnnnnnnnnnnnnnnnnnnnnnnnnnnnnnnnnnnnnnnnnnnnnnnnnnnnnnnnnnnnnnnnnnnnnnnnnnnnnnnnnnnnnnnnnnnnnnnnnnnnnnnnnnnnnnnnnnnnnnnnnnnnnnnnnnnnnnnnnnnnnnnnnnnnnnnnnnnnnnnnnnnnnnnnnnnnnnnnnnnnnnnnnnnnnnnnnnnnnnnnnnnnnnnnnnnnnnnnnnnnnnnnnnnnnnnnnnnnnnnnnnnnnnnnnnnnnnnnnnnnnnnnnnnnnnnnnnnnnnnnnnnnnnnnnnnnnnnnnnnnnnnnnnnnnnnnnnnnnnnnnnnnnnnnnnnnnnnnnnnnnnnnnnnnnnnnnnnnnnnnnnnnnnnnnnnnnnnnnnnnnnnnnnnnnnnnnnnnnnnnnnnnnnnnnnnnnnnnnnnnnnnnnnnnnnnnnnnnnnnnnnnnnnnnnnnnnnnnnnnnnnnnnnnnnnnnnnnnnnnnnnnnnnnnnnnnnnnnnnnnnnnnnnnnnnnnnnnnnnnnnnnnnnnnnnnnnnnnnnnnnnnnnnnnnnnnnnnnnnnnnnnnnnnnnnnnnnnnnnnnnnnnnnnnnnnnnnnnnnnnnnnnnnnnnnnnnnnnnnnnnnnnnnnnnnnnnnnnnnnnnnnnnnnnnnnnnnnnnnnnnnnnnnnnnnnnnnnnnnnnnnnnnnnnnnnnnnnnnnnnnnnnnnnnnnnnnnnnnnnnnnnnnnnnnnnnnnnnnnnnnnnnnnnnnnnnnnnnnnnnnnnnnnnnnnnnnnnnnnnnnnnnnnnnnnnnnnnnnnnnnnnnnnnnnnnnnnnnnnnnnnnnnnnnnnnnnnnnnnnnnnnnnnnnnnnnnnnnnnnnnnnnnnnnnnnnnnnnnnnnnnnnnnnnnnnnnnnnnnnnnnnnnnnnnnnnnnnnnnnnnnnnnnnnnnnnnnnnnnnnnnnnnnnnnnnnnnnnnnnnnnnnnnnnnnnnnnnnnnnnnnnnnnnnnnnnnnnnnnnnnnnnnnnnnnnnnnnnnnnnnnnnnnnnnnnnnnnnnnnnnnnnnnnnnnnnnnnnnnnnnnnnnnnnnnnnnnnnnnnnnnnnnnnnnnnnnnnnnnnnnnnnnnnnnnnnnnnnnnnnnnnnnnnnnnnnnnnnnnnnnnnnnnnnnnnnnnnnnnnnnnnnnnnnnnnnnnnnnnnnnnnnnnnnnnnnnnnnnnnnnnnnnnnnnnnnnnnnnnnnnnnnnnnnnnnnnnnnnnnnnnnnnnnnnnnnnnnnnnnnnnnnnnnnnnnnnnnnnnnnnnnnnnnnnnnnnnnnnnnnnnnnnnnnnnnnnnnnnnnnnnnnnnnnnnnnnnnnnnnnnnnnnnnnnnnnnnnnnnnnnnnnnnnnnnnnnnnnnnnnnnnnnnnnnnnnnnnnnnnnnnnnnnnnnnnnnnnnnnnnnnnnnnnnnnnnnnnnnnnnnnnnnnnnnnnnnnnnnnnnnnnnnnnnnnnnnnnnnnnnnnnnnnnnnnnnnnnnnnnnnnnnnnnnnnnnnnnnnnnnnnnnnnnnnnnnnnnnnnnnnnnnnnnnnnnnnnnnnnnnnnnnnnnnnnnnnnnnnnnnnnnnnnnnnnnnnnnnnnnnnnnnnnnnnnnnnnnnnnnnnnnnnnnnnnnnnnnnnnnnnnnnnnnnnnnnnnnnnnnnnnnnnnnnnnnnnnnnnnnnnnnnnnnnnnnnnnnnnnnnnnnnnnnnnnnnnnnnnnnnnnnnnnnnnnnnnnnnnnnnnnnnnnnnnnnnnnnnnnnnnnnnnnnnnnnnnnnnnnnnnnnnnnnnnnnnnnnnnnnnnnnnnnnnnnnnnnnnnnnnnnnnnnnnnnnnnnnnnnnnnnnnnnnnnnnnnnnnnnnnnnnnnnnnnnnnnnnnnnnnnnnnnnnnnnnnnnnnnnnnnnnnnnnnnnnnnnnnnnnnnnnnnnnnnnnnnnnnnnnnnnnnnnnnnnnnnnnnnnnnnnnnnnnnnnnnnnnnnnnnnnnnnnnnnnnnnnnnnnnnnnnnnnnnnnnnnnnnnnnnnnnnnnnnnnnnnnnnnnnnnnnnnnnnnnnnnnnnnnnnnnnnnnnnnnnnnnnnnnnnnnnnnnnnnnnnnnnnnnnnnnnnnnnnnnnnnnnnnnnnnnnnnnnnnnnnnnnnnnnnnnnnnnnnnnnnnnnnnnnnnnnnnnnnnnnnnnnnnnnnnnnnnnnnnnnnnnnnnnnnnnnnnnnnnnnnnnnnnnnnnnnnnnnnnnnnnnnnnnnnnnnnnnnnnnnnnnnnnnnnnnnnnnnnnnnnnnnnnnnnnnnnnnnnnnnnnnnnnnnnnnnnnnnnnnnnnnnnnnnnnnnnnnnnnnnnnnnnnnnnnnnnnnnnnnnnnnnnnnnnnnnnnnnnnnnnnnnnnnnnnnnnnnnnnnnnnnnnnnnnnnnnnnnnnnnnnnnnnnnnnnnnnnnnnnnnnnnnnnnnnnnnnnnnnnnnnnnnnnnnnnnnnnnnnnnnnnnnnnnnnnnnnnnnnnnnnnnnnnnnnnnnnnnnnnnnnnnnnnnnnnnnnnnnnnnnnnnnnnnnnnnnnnnnnnnnnnnnnnnnnnnnnnnnnnnnnnnnnnnnnnnnnnnnnnnnnnnnnnnnnnnnnnnnnnnnnnnnnnnnnnnnnnnnnnnnnnnnnnnnnnnnnnnnnnnnnnnnnnnnnnnnnnnnnnnnnnnnnnnnnnnnnnnnnnnnnnnnnnnnnnnnnnnnnnnnnnnnnnnnnnnnnnnnnnnnnnnnnnnnnnnnnnnnnnnnnnnnnnnnnnnnnnnnnnnnnnnnnnnnnnnnnnnnnnnnnnnnnnnnnnnnnnnnnnnnnnnnnnnnnnnnnnnnnnnnnnnnnnnnnnnnnnnnnnnnnnnnnnnnnnnnnnnnnnnnnnnnnnnnnnnnnnnnnnnnnnnnnnnnnnnnnnnnnnnnnnnnnnnnnnnnnnnnnnnnnnnnnnnnnnnnnnnnnnnnnnnnnnnnnnnnnnnnnnnnnnnnnnnnnnnnnnnnnnnnnnnnnnnnnnnnnnnnnnnnnnnnnnnnnnnnnnnnnnnnnnnnnnnnnnnnnnnnnnnnnnnnnnnnnnnnnnnnnnnnnnnnnnnnnnnnnnnnnnnnnnnnnnnnnnnnnnnnnnnnnnnnnnnnnnnnnnnnnnnnnnnnnnnnnnnnnnnnnnnnnnnnnnnnnnnnnnnnnnnnnnnnnnnnnnnnnnnnnnnnnnnnnnnnnnnnnnnnnnnnnnnnnnnnnnnnnnnnnnnnnnnnnnnnnnnnnnnnnnnnnnnnnnnnnnnnnnnnnnnnnnnnnnnnnnnnnnnnnnnnnnnnnnnnnnnnnnnnnnnnnnnnnnnnnnnnnnnnnnnnnnnnnnnnnnnnnnnnnnnnnnnnnnnnnnnnnnnnnnnnnnnnnnnnnnnnnnnnnnnnnnnnnnnnnnnnnnnnnnnnnnnnnnnnnnnnnnnnnnnnnnnnnnnnnnnnnnnnnnnnnnnnnnnnnnnnnnnnnnnnnnnnnnnnnnnnnnnnnnnnnnnnnnnnnnnnnnnnnnnnnnnnnnnnnnnnnnnnnnnnnnnnnnnnnnnnnnnnnnnnnnnnnnnnnnnnnnnnnnnnnnnnnnnnnnnnnnnnnnnnnnnnnnnnnnnnnnnnnnnnnnnnnnnnnnnnnnnnnnnnnnnnnnnnnnnnnnnnnnnnnnnnnnnnnnnnnnnnnnnnnnnnnnnnnnnnnnnnnnnnnnnnnnnnnnnnnnnnnnnnnnnnnnnnnnnnnnnnnnnnnnnnnnnnnnnnnnnnnnnnnnnnnnnnnnnnnnnnnnnnnnnnnnnnnnnnnnnnnnnnnnnnnnnnnnnnnnnnnnnnnnnnnnnnnnnnnnnnnnnnnnnnnnnnnnnnnnnnnnnnnnnnnnnnnnnnnnnnnnnnnnnnnnnnnnnnnnnnnnnnnnnnnnnnnnnnnnnnnnnnnnnnnnnnnnnnnnnnnnnnnnnnnnnnnnnnnnnnnnnnnnnnnnnnnnnnnnnnnnnnnnnnnnnnnnnnnnnnnnnnnnnnnnnnnnnnnnnnnnnnnnnnnnnnnnnnnnnnnnnnnnnnnnnnnnnnnnnnnnnnnnnnnnnnnnnnnnnnnnnnnnnnnnnnnnnnnnnnnnnnnnnnnnnnnnnnnnnnnnnnnnnnnnnnnnnnnnnnnnnnnnnnnnnnnnnnnnnnnnnnnnnnnnnnnnnnnnnnnnnnnnnnnnnnnnnnnnnnnnnnnnnnnnnnnnnnnnnnnnnnnnnnnnnnnnnnnnnnnnnnnnnnnnnnnnnnnnnnnnnnnnnnnnnnnnnnnnnnnnnnnnnnnnnnnnnnnnnnnnnnnnnnnnnnnnnnnnnnnnnnnnnnnnnnnnnnnnnnnnnnnnnnnnnnnnnnnnnnnnnnnnnnnnnnnnnnnnnnnnnnnnnnnnnnnnnnnnnnnnnnnnnnnnnnnnnnnnnnnnnnnnnnnnnnnnnnnnnnnnnnnnnnnnnnnnnnnnnnnnnnnnnnnnnnnnnnnnnnnnnnnnnnnnnnnnnnnnnnnnnnnnnnnnnnnnnnnnnnnnnnnnnnnnnnnnnnnnnnnnnnnnnnnnnnnnnnnnnnnnnnnnnnnnnnnnnnnnnnnnnnnnnnnnnnnnnnnnnnnnnnnnnnnnnnnnnnnnnnnnnnnnnnnnnnnnnnnnnnnnnnnnnnnnnnnnnnnnnnnnnnnnnnnnnnnnnnnnnnnnnnnnnnnnnnnnnnnnnnnnnnnnnnnnnnnnnnnnnnnnnnnnnnnnnnnnnnnnnnnnnnnnnnnnnnnnnnnnnnnnnnnnnnnnnnnnnnnnnnnnnnnnnnnnnnnnnnnnnnnnnnnnnnnnnnnnnnnnnnnnnnnnnnnnnnnnnnnnnnnnnnnnnnnnnnnnnnnnnnnnnnnnnnnnnnnnnnnnnnnnnnnnnnnnnnnnnnnnnnnnnnnnnnnnnnnnnnnnnnnnnnnnnnnnnnnnnnnnnnnnnnnnnnnnnnnnnnnnnnnnnnnnnnnnnnnnnnnnnnnnnnnnnnnnnnnnnnnnnnnnnnnnnnnnnnnnnnnnnnnnnnnnnnnnnnnnnnnnnnnnnnnnnnnnnnnnnnnnnnnnnnnnnnnnnnnnnnnnnnnnnnnnnnnnnnnnnnnnnnnnnnnnnnnnnnnnnnnnnnnnnnnnnnnnnnnnnnnnnnnnnnnnnnnnnnnnnnnnnnnnnnnnnnnnnnnnnnnnnnnnnnnnnnnnnnnnnnnnnnnnnnnnnnnnnnnnnnnnnnnnnnnnnnnnnnnnnnnnnnnnnnnnnnnnnnnnnnnnnnnnnnnnnnnnnnnnnnnnnnnnnnnnnnnnnnnnnnnnnnnnnnnnnnnnnnnnnnnnnnnnnnnnnnnnnnnnnnnnnnnnnnnnnnnnnnnnnnnnnnnnnnnnnnnnnnnnnnnnnnnnnnnnnnnnnnnnnnnnnnnnnnnnnnnnnnnnnnnnnnnnnnnnnnnnnnnnnnnnnnnnnnnnnnnnnnnnnnnnnnnnnnnnnnnnnnnnnnnnnnnnnnnnnnnnnnnnnnnnnnnnnnnnnnnnnnnnnnnnnnnnnnnnnnnnnnnnnnnnnnnnnnnnnnnnnnnnnnnnnnnnnnnnnnnnnnnnnnnnnnnnnnnnnnnnnnnnnnnnnnnnnnnnnnnnnnnnnnnnnnnnnnnnnnnnnnnnnnnnnnnnnnnnnnnnnnnnnnnnnnnnnnnnnnnnnnnnnnnnnnnnnnnnnnnnnnnnnnnnnnnnnnnnnnnnnnnnnnnnnnnnnnnnnnnnnnnnnnnnnnnnnnnnnnnnnnnnnnnnnnnnnnnnnnnnnnnnnnnnnnnnnnnnnnnnnnnnnnnnnnnnnnnnnnnnnnnnnnnnnnnnnnnnnnnnnnnnnnnnnnnnnnnnnnnnnnnnnnnnnnnnnnnnnnnnnnnnnnnnnnnnnnnnnnnnnnnnnnnnnnnnnnnnnnnnnnnnnnnnnnnnnnnnnnnnnnnnnnnnnnnnnnnnnnnnnnnnnnnnnnnnnnnnnnnnnnnnnnnnnnnnnnnnnnnnnnnnnnnnnnnnnnnnnnnnnnnnnnnnnnnnnnnnnnnnnnnnnnnnnnnnnnnnnnnnnnnnnnnnnnnnnnnnnnnnnnnnnnnnnnnnnnnnnnnnnnnnnnnnnnnnnnnnnnnnnnnnnnnnnnnnnnnnnnnnnnnnnnnnnnnnnnnnnnnnnnnnnnnnnnnnnnnnnnnnnnnnnnnnnnnnnnnnnnnnnnnnnnnnnnnnnnnnnnnnnnnnnnnnnnnnnnnnnnnnnnnnnnnnnnnnnnnnnnnnnnnnnnnnnnnnnnnnnnnnnnnnnnnnnnnnnnnnnnnnnnnnnnnnnnnnnnnnnnnnnnnnnnnnnnnnnnnnnnnnnnnnnnnnnnnnnnnnnnnnnnnnnnnnnnnnnnnnnnnnnnnnnnnnnnnnnnnnnnnnnnnnnnnnnnnnnnnnnnnnnnnnnnnnnnnnnnnnnnnnnnnnnnnnnnnnnnnnnnnnnnnnnnnnnnnnnnnnnnnnnnnnnnnnnnnnnnnnnnnnnnnnnnnnnnnnnnnnnnnnnnnnnnnnnnnnnnnnnnnnnnnnnnnnnnnnnnnnnnnnnnnnnnnnnnnnnnnnnnnnnnnnnnnnnnnnnnnnnnnnnnnnnnnnnnnnnnnnnnnnnnnnnnnnnnnnnnnnnnnnnnnnnnnnnnnnnnnnnnnnnnnnnnnnnnnnnnnnnnnnnnnnnnnnnnnnnnnnnnnnnnnnnnnnnnnnnnnnnnnnnnnnnnnnnnnnnnnnnnnnnnnnnnnnnnnnnnnnnnnnnnnnnnnnnnnnnnnnnnnnnnnnnnnnnnnnnnnnnnnnnnnnnnnnnnnnnnnnnnnnnnnnnnnnnnnnnnnnnnnnnnnnnnnnnnnnnnnnnnnnnnnnnnnnnnnnnnnnnnnnnnnnnnnnnnnnnnnnnnnnnnnnnnnnnnnnnnnnnnnnnnnnnnnnnnnnnnnnnnnnnnnnnnnnnnnnnnnnnnnnnnnnnnnnnnnnnnnnnnnnnnnnnnnnnnnnnnnnnnnnnnnnnnnnnnnnnnnnnnnnnnnnnnnnnnnnnnnnnnnnnnnnnnnnnnnnnnnnnnnnnnnnnnnnnnnnnnnnnnnnnnnnnnnnnnnnnnnnnnnnnnnnnnnnnnnnnnnnnnnnnnnnnnnnnnnnnnnnnnnnnnnnnnnnnnnnnnnnnnnnnnnnnnnnnnnnnnnnnnnnnnnnnnnnnnnnnnnnnnnnnnnnnnnnnnnnnnnnnnnnnnnnnnnnnnnnnnnnnnnnnnnnnnnnnnnnnnnnnnnnnnnnnnnnnnnnnnnnnnnnnnnnnnnnnnnnnnnnnnnnnnnnnnnnnnnnnnnnnnnnnnnnnnnnnnnnnnnnnnnnnnnnnnnnnnnnnnnnnnnnnnnnnnnnnnnnnnnnnnnnnnnnnnnnnnnnnnnnnnnnnnnnnnnnnnnnnnnnnnnnnnnnnnnnnnnnnnnnnnnnnnnnnnnnnnnnnnnnnnnnnnnnnnnnnnnnnnnnnnnnnnnnnnnnnnnnnnnnnnnnnnnnnnnnnnnnnnnnnnnnnnnnnnnnnnnnnnnnnnnnnnnnnnnnnnnnnnnnnnnnnnnnnnnnnnnnnnnnnnnnnnnnnnnnnnnnnnnnnnnnnnnnnnnnnnnnnnnnnnnnnnnnnnnnnnnnnnnnnnnnnnnnnnnnnnnnnnnnnnnnnnnnnnnnnnnnnnnnnnnnnnnnnnnnnnnnnnnnnnnnnnnnnnnnnnnnnnnnnnnnnnnnnnnnnnnnnnnnnnnnnnnnnnnnnnnnnnnnnnnnnnnnnnnnnnnnnnnnnnnnnnnnnnnnnnnnnnnnnnnnnnnnnnnnnnnnnnnnnnnnnnnnnnnnnnnnnnnnnnnnnnnnnnnnnnnnnnnnnnnnnnnnnnnnnnnnnnnnnnnnnnnnnnnnnnnnnnnnnnnnnnnnnnnnnnnnnnnnnnnnnnnnnnnnnnnnnnnnnnnnnnnnnnnnnnnnnnnnnnnnnnnnnnnnnnnnnnnnnnnnnnnnnnnnnnnnnnnnnnnnnnnnnnnnnnnnnnnnnnnnnnnnnnnnnnnnnnnnnnnnnnnnnnnnnnnnnnnnnnnnnnnnnnnnnnnnnnnnnnnnnnnnnnnnnnnnnnnnnnnnnnnnnnnnnnnnnnnnnnnnnnnnnnnnnnnnnnnnnnnnnnnnnnnnnnnnnnnnnnnnnnnnnnnnnnnnnnnnnnnnnnnnnnnnnnnnnnnnnnnnnnnnnnnnnnnnnnnnnnnnnnnnnnnnnnnnnnnnnnnnnnnnnnnnnnnnnnnnnnnnnnnnnnnnnnnnnnnnnnnnnnnnnnnnnnnnnnnnnnnnnnnnnnnnnnnnnnnnnnnnnnnnnnnnnnnnnnnnnnnnnnnnnnnnnnnnnnnnnnnnnnnnnnnnnnnnnnnnnnnnnnnnnnnnnnnnnnnnnnnnnnnnnnnnnnnnnnnnnnnnnnnnnnnnnnnnnnnnnnnnnnnnnnnnnnnnnnnnnnnnnnnnnnnnnnnnnnnnnnnnnnnnnnnnnnnnnnnnnnnnnnnnnnnnnnnnnnnnnnnnnnnnnnnnnnnnnnnnnnnnnnnnnnnnnnnnnnnnnnnnnnnnnnnnnnnnnnnnnnnnnnnnnnnnnnnnnnnnnnnnnnnnnnnnnnnnnnnnnnnnnnnnnnnnnnnnnnnnnnnnnnnnnnnnnnnnnnnnnnnnnnnnnnnnnnnnnnnnnnnnnnnnnnnnnnnnnnnnnnnnnnnnnnnnnnnnnnnnnnnnnnnnnnnnnnnnnnnnnnnnnnnnnnnnnnnnnnnnnnnnnnnnnnnnnnnnnnnnnnnnnnnnnnnnnnnnnnnnnnnnnnnnnnnnnnnnnnnnnnnnnnnnnnnnnnnnnnnnnnnnnnnnnnnnnnnnnnnnnnnnnnnnnnnnnnnnnnnnnnnnnnnnnnnnnnnnnnnnnnnnnnnnnnnnnnnnnnnnnnnnnnnnnnnnnnnnnnnnnnnnnnnnnnnnnnnnnnnnnnnnnnnnnnnnnnnnnnnnnnnnnnnnnnnnnnnnnnnnnnnnnnnnnnnnnnnnnnnnnnnnnnnnnnnnnnnnnnnnnnnnnnnnnnnnnnnnnnnnnnnnnnnnnnnnnnnnnnnnnnnnnnnnnnnnnnnnnnnnnnnnnnnnnnnnnnnnnnnnnnnnnnnnnnnnnnnnnnnnnnnnnnnnnnnnnnnnnnnnnnnnnnnnnnnnnnnnnnnnnnnnnnnnnnnnnnnnnnnnnnnnnnnnnnnnnnnnnnnnnnnnnnnnnnnnnnnnnnnnnnnnnnnnnnnnnnnnnnnnnnnnnnnnnnnnnnnnnnnnnnnnnnnnnnnnnnnnnnnnnnnnnnnnnnnnnnnnnnnnnnnnnnnnnnnnnnnnnnnnnnnnnnnnnnnnnnnnnnnnnnnnnnnnnnnnnnnnnnnnnnnnnnnnnnnnnnnnnnnnnnnnnnnnnnnnnnnnnnnnnnnnnnnnnnnnnnnnnnnnnnnnnnnnnnnnnnnnnnnnnnnnnnnnnnnnnnnnnnnnnnnnnnnnnnnnnnnnnnnnnnnnnnnnnnnnnnnnnnnnnnnnnnnnnnnnnnnnnnnnnnnnnnnnnnnnnnnnnnnnnnnnnnnnnnnnnnnnnnnnnnnnnnnnnnnnnnnnnnnnnnnnnnnnnnnnnnnnnnnnnnnnnnnnnnnnnnnnnnnnnnnnnnnnnnnnnnnnnnnnnnnnnnnnnnnnnnnnnnnnnnnnnnnnnnnnnnnnnnnnnnnnnnnnnnnnnnnnnnnnnnnnnnnnnnnnnnnnnnnnnnnnnnnnnnnnnnnnnnnnnnnnnnnnnnnnnnnnnnnnnnnnnnnnnnnnnnnnnnnnnnnnnnnnnnnnnnnnnnnnnnnnnnnnnnnnnnnnnnnnnnnnnnnnnnnnnnnnnnnnnnnnnnnnnnnnnnnnnnnnnnnnnnnnnnnnnnnnnnnnnnnnnnnnnnnnnnnnnnnnnnnnnnnnnnnnnnnnnnnnnnnnnnnnnnnnnnnnnnnnnnnnnnnnnnnnnnnnnnnnnnnnnnnnnnnnnnnnnnnnnnnnnnnnnnnnnnnnnnnnnnnnnnnnnnnnnnnnnnnnnnnnnnnnnnnnnnnnnnnnnnnnnnnnnnnnnnnnnnnnnnnnnnnnnnnnnnnnnnnnnnnnnnnnnnnnnnnnnnnnnnnnnnnnnnnnnnnnnnnnnnnnnnnnnnnnnnnnnnnnnnnnnnnnnnnnnnnnnnnnnnnnnnnnnnnnnnnnnnnnnnnnnnnnnnnnnnnnnnnnnnnnnnnnnnnnnnnnnnnnnnnnnnnnnnnnnnnnnnnnnnnnnnnnnnnnnnnnnnnnnnnnnnnnnnnnnnnnnnnnnnnnnnnnnnnnnnnnnnnnnnnnnnnnnnnnnnnnnnnnnnnnnnnnnnnnnnnnnnnnnnnnnnnnnnnnnnnnnnnnnnnnnnnnnnnnnnnnnnnnnnnnnnnnnnnnnnnnnnnnnnnnnnnngaagacgaagcgggcaagacgccttacctctttactatcggcgaacgcgccgaggctattatcgaggcgttcaaacaacgccaggtctccacacaggaagccctcaagcagttggaggagctaatcaaggaaatcaacgaagccgagcgggaacaggcggagcgcggcatttcgggagaagcctttgctaccctctggattcttaagcagggtgctgcctcaattgatatggcggaaaacgtggccaaacaaatggtgggaatattgaaagaatatcctcactggcataccagcgatgagcaggcccgccagataaggcgccgcctttatgccttacttgaaaaagccaacatcaaggatgttcccgaaacagttgagaaaataatgtcggttattaagcgtaggtaagtatgcaagcatcagatactttggaacagataattccgggacaggtcttcaagacggaagtcctgacctgggcaaagcgcatcggcgttgaaccgaaagaaatccgcgtccgcccgatgaaaagcaagtgggcaagctgctctagcaatggccggttgaccttcaactcagagattctccagcaaccggctagctttcgcagagaagccattattcacgagctgctgcacctgaaagtacccaatcacgggaaactgttcaagaatctgatgaaggcatttctggctcatggcgaattatcaagagttgctgataaagggttctagcatgacctctttaatgaggaagggcaggcagtcgttcatattctggtattggacagtggggtgacaatgagccaaggaggctaggactttgagctacaatctgcttgagaaacagtggattcccgtcctctggacggatggcaatgtcacgcgggtagggattaaagaggtactaacgcaagcggagcgtatccgacaaattgcggccagcaacccgatggaccgcatggcggttttccggtttctgcttgccttgctttactggtgccgaggtaatccaccggctatgacagacaccacctccgaagaatccttcccaattgattggttttccaaactcgatgcccatagagagtgtttcaatttgcttggcggtggtaagagattctatcaatacagggaacagggcgacaaactgctcacagtaaactacctcattcacgagataccatcaggcactaactttaaccactttcggcactcaatagacggaaccaaaggcttgtgtccggcatgctgtgctttgggactggtgcggctaccgatgttctccacacaaggtggacaaggcaagtcgcccggcatcaacgcaaagccgccaatctatgttatccctgtgggtaagacccttgcggagaccttgcggctttcgtggcggcaggtgtctaatttgggaacgccggcgtgggaaaagccggacgtgccacttcctaggacgggagaggtgccgttactaactgggctaacgtggctcccacgccgagtttggttaggcgaaccgcaggaatctttgactcactgcatttcatgcggtcgcccggacaatgtgatactgtccagcgtctttgctggcaaagggagtgccaagacagatgatggcactaagcgcgtctggcatgacccgcacgttatctacgaacaaagcaaaaacggagaaatttcactgcattcggtcgatgtggtgggaagcgctgatgctggtgccgggcagtgggctagaacaatggctgggttactccggaatccccgagctgagcggagcagagcgtgggtggtcggtttttcgtcagaccagaataaatacttcgaggcatcggaattgtttctcccttggccagtctcacccgcttctattgagaatctaagccaatggcaacagtcaaactataatctaagccgaatgctgaggcagcttgacgaaaaaccatctcgaaaccatgttgagataactacggagctcgccgccattcgcccccacgttgagagcagggtcgctgcaaaagctgaagagttactgtttgggggaaatgcaaaatgggaacacgcagccggtgcgtaccgacccatgatgcagatgattgccaggtcattggcgcccagcgttaccacggcagcagtcaaacggcgcagagaaatcggcaatgtgctccctcaaatgggactgacgccaacggcagcaaagaaaccagcaaggggaaagcgagggagaaagtgagtccaacagctactgagcaatacattgaaatcctgacgcggttgaagactggcgacctcggcttattgcgaacacatgcagggcaaggtctggatgaatccgtccatggctttgacctgtttgccggcctgtggtggccgttgcagaacaagagccagtttgcaccccggcgggaggtggcatggctggttgccaagctttatgccttttcgcccattccacattctgccggtgacacgctggcttgccagttgcgccgctgccaaccagacgaagagcgcagccgaaagcgatttcaacagaaattcgatgaaatgctgcttttgccactgggtaaaattgagccagcgctgcgatgggcactggaccaggtcgctaacaagggtaaatcacttgattgggtaagcctgacgaatgacctgtccatctgggaacgtgaagcaacccgcctgaagtgggcggaagaatttcttggtgacaaggagggtaatgtcaatgctaattgaaatccacatgattcagaaccatagcccggctaatctgaaccgggatgacctgggtgcgcccaagacctgctacttcggcggcgtactccgctctcgcatctccagccagtgcctcaagcgcagcatccgcatgagcgatgagttcaaagcattacgcggcggctgccgcacacggcagttagcgaaattgattgcaaggggtactaagggagacccatttgatgaaaaagtacaagctgaccccaaagtcgtggaacggtctgagaagattctttccgactgtggtttcaagccaaaaaaggacgcagacaagagcaagatgctggtctataccacgcgtgacgctatcaaggagatggccacacttctacagaatggcggcgcgaaaagcgatggcgaacttgcaagggctttctccaagctaatcgccgaacgcgtccttgcgccagatatggcgctatcagggagaatgttggaaccttcagaggcgaaggacctatggaaaaaccttgacactaccgtggaggcggctttgcaagtggcacatgctttctctacacacgaggctcgtccggaagtagattactacgttgccgcagacgacattcccggtattgatgcgggcgcaggctacgttgatgaagctatatttgcctccgcttgtttctataaatatttttccattcattgggaaactctgctcaaaaatctggccggagatattaatatggccgcacacacagtcggggcatttattcgcggggcggcgctagtcactcccaccggcaagcagaacagcttcgcagcgcacaattacccggatggcatactggtggagattcgtaatacacctataaattacgccaatgcctttgcccgaccggtcgctcagggcgaacgggacattatttcccagagcattgcccagttgggccaatacgtccacgacctggataccggttttggcaaaccacaacaacgcttctggttttctcccaacctccggtatcctttgactgctagaaccaaactaaaggaaggagaaagagaggtcgaaaaggacatcgaccttacggagaataaagttaaatccctggatgaactgataccggtagtggttaaggctatcggctgtgattgggaagaatctaagaaagctatcgtgaatctagcggtgaaagtatgatggctaataccctgtttttacgactcgaaggtccacttcaggcgtggggcgaccacgagtccaagtttgttgttcgtcgcactgcagaagctccaactaaatcaggagttatcgggatgctctgtgctgcactgggtgtatcacgaccagcggcccctgaaacgtggctgccgaagctatctgccctgaaaatgggcgtccgtattgacaatccaggcattcgctggtgggactatcacactgtcggtgcaggtatggagatgcgtattgccgaaagggaaggcaaaaccaagctgggtgcaatgttgactcggcgtgaatatttgtgtgacgccagttttctcgttgcgctgcagggcgacgccaccctagttagagaactagcggcggcgatagagaaccccaaatggacgctttacctgggccgcaaatgctgtcccccgtcgcgtccactgctggagcatcctgccagtaattttcctgatttgctttcggcgcttcggtcggtcccatggcgaaggcggctaagggatgacccagtacccgacaccgttgattgcctgctggactggcagccagcacctgaacagtccgtagcacccgctgatgcactagtgtggtatgatgtcccgcttaccttcgagccaccctcccatgctcctcgctttgttattcggcaaatactacgagttggcgccgaggttagcatcgcagaaaagctggcgcaatacgagactcccaggcctctccgtccgcgtgctgattatcagaacatcgaatatcaaaaggctcgcgccgctcgtttgaaagcggaccacggcctttgtgttttctgcaaagcgcctgccagcactgttcagcacatcacctaccgtcgtgctggcggaggcgagattaatgatgacctgcgctcgctgtgccgcctctgtcatgacgcagttactatgattgaatacggtctgggtatgggattggaccgcattaaccccgaagaccacaaatggcgaggggaaatcattcggaaacgggaggaaatcatccgtttccgctcgctggagactcgccgccgtcgcctcagcccggaggaggtggaatagtcatgtacctgtcataccttcttgtcaatacgggagacaaccctgaccgtccgcgccccggacggctgtggttacgcaacgtttaccgtgttcatcagcgcctttgcatgggcttcccctcggcagaatgtaaggaacatgacccgcttttcttacaaccgtataagcctggccgttttccggaagaccattacatggctgatagaaagaagctagaggtgtctgaagatatcctcaagcaagttcactcccaacgtgataaccagagtggctttctcttccgcatagacccactgcccgcgggccgcgccatgatagtcatacaatcagcgattgaaccagactgggactatgcttttcgaaatgccgaccatcttctagccgcatctccgcaaataaagcaatatgacccgcacttccagaatggagagcttctcacctttcggctgctggctaaccccacccgcaagagggataaggaaaacaggcctgcaggcaggaataactggggcagaagagtccccgtacctcgcaacgaaactgaagcgtggctcaccagtcgtgccgggcggtatgggtttagcgtggaaagcttcgataatgtgcaaacagggtatgtcgcagctttcaagagtaaggaaaaggatggcgatagtcaggttgctgatgaagaaacagaagggaggttgaagcgctttctctacgctcgctacgaaggcaaattgcgggtgaccgctcctgattctatccgtaatgcgattatacaaggcatcggcccggccaaggggttcggtttcggattgctttccttggctccggtaaaggggtgaatttttgcgtactctgtttgaactgccgcgctttcaggaccgctggagctatctttatctggaaatgggacgacttgatgtcggtgataatggattgggttttcatcagggcgattcagtaacgtcggtgccgattgaccaattgagcgtggtgatgcttggaccagggtcaaccattacgcacgccgccgtgaagtcgctgtcccagaataactgcttgttggcatggactggacaggatggcatccgcttctactcagccagcatcggtggtacatacagttccaagcggctcatccggcaggcacggttggccagtgatgaatcaaagcggctggaaatcgcctggcgtatgtataattttcgttttaaggaacccgtaccaaccgttgtcagtctggaaggaatccgcggtatggaaggaatccgggttagacgagcctatgctgatgcttcagccaagtacggcgtggagtggagaggtcggcgttatgaccagaatgattgggccaaaggagacccaataaaccgggcgctctccgcggccaatgcctgcctttatgccgtatgccatgctgcgatattgtctgcaggctactcgccagggctaggctttattcataccggcaagatgctaagcttcgtatatgacatcggcgacctgtacaagacagagacaacaattccggtcgctttcaggattgccgcacaagccccaccggacattgaaagggcggtgcgtatggaatgccgccaggcattccacgactttaaactgatggagcgaatcttacctgatattgcggaggtgctcggtgttagtaatgatattggagaaagtaccgacgagcttgaggggcgcattgtcacgctggcttttggaaccgaggacgggggttttcctggggaatccgagcgcgagggtgagggatgaactctggaagcgggcgctcaaaaagactaaggaaagcgggacggtactgcaggtctggacggacaagaatccgcaaggattttcataccgtcaggcgggcaactactggcgaaaattcgttgactttgaagggttagccctggtaaccgtgggaccgcggcaacctaagttgcaagaggcgctgcgttccgatgaattgtcttagcgagcgtgagtctacgaacgcaggcacaggggcgttgacactagaacggtccggtcacgctcaagcatttttggtgtagctttgattttctagagtcttccccacgcatgtgggggtgaaccggcagctggcaatagctgacgataatagttctcgtcttccccacgcatgtgggggtgaaccgtatagtcaggacaaggcataccagataaaaaagtcttccccacgcatgtgggggtgaaccgcctttaacctcgcccaagtgctttaaaaaggcgtcttccccacgcatgtgggggtgaaccgtattatcggtagtagcttcatctctactcaccgtcttccccacgcatgtgggggtgaaccgcgtggtgctcaatcaaagcggcgcgcaatttagtcttccccacgcatgtgggggtgaaccgccagctttgaccgccttctcgaaatgacaaaaggtcttccccacgcatgtgggggtgaaccgtaacgagacccaagcccgccgtgaaagtaatgcgtcttccccacgcatgtgggggtgaaccgaaatattcttctga

SEQ ID NO: 1103 - DNA, 103413 bp, Artificial Sequence
  Synthetic Oligonucleotide
  misc_feature (1)..(95919): n is a, c, g, or t
nnnnnnnnnnnnnnnnnnnnnnnnnnnnnnnnnnnnnnnnnnnnnnnnnnnnnnnnnnnnnnnnnnnnnnnnnnnnnnnnnnnnnnnnnnnnnnnnnnnnnnnnnnnnnnnnnnnnnnnnnnnnnnnnnnnnnnnnnnnnnnnnnnnnnnnnnnnnnnnnnnnnnnnnnnnnnnnnnnnnnnnnnnnnnnnnnnnnnnnnnnnnnnnnnnnnnnnnnnnnnnnnnnnnnnnnnnnnnnnnnnnnnnnnnnnnnnnnnnnnnnnnnnnnnnnnnnnnnnnnnnnnnnnnnnnnnnnnnnnnnnnnnnnnnnnnnnnnnnnnnnnnnnnnnnnnnnnnnnnnnnnnnnnnnnnnnnnnnnnnnnnnnnnnnnnnnnnnnnnnnnnnnnnnnnnnnnnnnnnnnnnnnnnnnnnnnnnnnnnnnnnnnnnnnnnnnnnnnnnnnnnnnnnnnnnnnnnnnnnnnnnnnnnnnnnnnnnnnnnnnnnnnnnnnnnnnnnnnnnnnnnnnnnnnnnnnnnnnnnnnnnnnnnnnnnnnnnnnnnnnnnnnnnnnnnnnnnnnnnnnnnnnnnnnnnnnnnnnnnnnnnnnnnnnnnnnnnnnnnnnnnnnnnnnnnnnnnnnnnnnnnnnnnnnnnnnnnnnnnnnnnnnnnnnnnnnnnnnnnnnnnnnnnnnnnnnnnnnnnnnnnnnnnnnnnnnnnnnnnnnnnnnnnnnnnnnnnnnnnnnnnnnnnnnnnnnnnnnnnnnnnnnnnnnnnnnnnnnnnnnnnnnnnnnnnnnnnnnnnnnnnnnnnnnnnnnnnnnnnnnnnnnnnnnnnnnnnnnnnnnnnnnnnnnnnnnnnnnnnnnnnnnnnnnnnnnnnnnnnnnnnnnnnnnnnnnnnnnnnnnnnnnnnnnnnnnnnnnnnnnnnnnnnnnnnnnnnnnnnnnnnnnnnnnnnnnnnnnnnnnnnnnnnnnnnnnnnnnnnnnnnnnnnnnnnnnnnnnnnnnnnnnnnnnnnnnnnnnnnnnnnnnnnnnnnnnnnnnnnnnnnnnnnnnnnnnnnnnnnnnnnnnnnnnnnnnnnnnnnnnnnnnnnnnnnnnnnnnnnnnnnnnnnnnnnnnnnnnnnnnnnnnnnnnnnnnnnnnnnnnnnnnnnnnnnnnnnnnnnnnnnnnnnnnnnnnnnnnnnnnnnnnnnnnnnnnnnnnnnnnnnnnnnnnnnnnnnnnnnnnnnnnnnnnnnnnnnnnnnnnnnnnnnnnnnnnnnnnnnnnnnnnnnnnnnnnnnnnnnnnnnnnnnnnnnnnnnnnnnnnnnnnnnnnnnnnnnnnnnnnnnnnnnnnnnnnnnnnnnnnnnnnnnnnnnnnnnnnnnnnnnnnnnnnnnnnnnnnnnnnnnnnnnnnnnnnnnnnnnnnnnnnnnnnnnnnnnnnnnnnnnnnnnnnnnnnnnnnnnnnnnnnnnnnnnnnnnnnnnnnnnnnnnnnnnnnnnnnnnnnnnnnnnnnnnnnnnnnnnnnnnnnnnnnnnnnnnnnnnnnnnnnnnnnnnnnnnnnnnnnnnnnnnnnnnnnnnnnnnnnnnnnnnnnnnnnnnnnnnnnnnnnnnnnnnnnnnnnnnnnnnnnnnnnnnnnnnnnnnnnnnnnnnnnnnnnnnnnnnnnnnnnnnnnnnnnnnnnnnnnnnnnnnnnnnnnnnnnnnnnnnnnnnnnnnnnnnnnnnnnnnnnnnnnnnnnnnnnnnnnnnnnnnnnnnnnnnnnnnnnnnnnnnnnnnnnnnnnnnnnnnnnnnnnnnnnnnnnnnnnnnnnnnnnnnnnnnnnnnnnnnnnnnnnnnnnnnnnnnnnnnnnnnnnnnnnnnnnnnnnnnnnnnnnnnnnnnnnnnnnnnnnnnnnnnnnnnnnnnnnnnnnnnnnnnnnnnnnnnnnnnnnnnnnnnnnnnnnnnnnnnnnnnnnnnnnnnnnnnnnnnnnnnnnnnnnnnnnnnnnnnnnnnnnnnnnnnnnnnnnnnnnnnnnnnnnnnnnnnnnnnnnnnnnnnnnnnnnnnnnnnnnnnnnnnnnnnnnnnnnnnnnnnnnnnnnnnnnnnnnnnnnnnnnnnnnnnnnnnnnnnnnnnnnnnnnnnnnnnnnnnnnnnnnnnnnnnnnnnnnnnnnnnnnnnnnnnnnnnnnnnnnnnnnnnnnnnnnnnnnnnnnnnnnnnnnnnnnnnnnnnnnnnnnnnnnnnnnnnnnnnnnnnnnnnnnnnnnnnnnnnnnnnnnnnnnnnnnnnnnnnnnnnnnnnnnnnnnnnnnnnnnnnnnnnnnnnnnnnnnnnnnnnnnnnnnnnnnnnnnnnnnnnnnnnnnnnnnnnnnnnnnnnnnnnnnnnnnnnnnnnnnnnnnnnnnnnnnnnnnnnnnnnnnnnnnnnnnnnnnnnnnnnnnnnnnnnnnnnnnnnnnnnnnnnnnnnnnnnnnnnnnnnnnnnnnnnnnnnnnnnnnnnnnnnnnnnnnnnnnnnnnnnnnnnnnnnnnnnnnnnnnnnnnnnnnnnnnnnnnnnnnnnnnnnnnnnnnnnnnnnnnnnnnnnnnnnnnnnnnnnnnnnnnnnnnnnnnnnnnnnnnnnnnnnnnnnnnnnnnnnnnnnnnnnnnnnnnnnnnnnnnnnnnnnnnnnnnnnnnnnnnnnnnnnnnnnnnnnnnnnnnnnnnnnnnnnnnnnnnnnnnnnnnnnnnnnnnnnnnnnnnnnnnnnnnnnnnnnnnnnnnnnnnnnnnnnnnnnnnnnnnnnnnnnnnnnnnnnnnnnnnnnnnnnnnnnnnnnnnnnnnnnnnnnnnnnnnnnnnnnnnnnnnnnnnnnnnnnnnnnnnnnnnnnnnnnnnnnnnnnnnnnnnnnnnnnnnnnnnnnnnnnnnnnnnnnnnnnnnnnnnnnnnnnnnnnnnnnnnnnnnnnnnnnnnnnnnnnnnnnnnnnnnnnnnnnnnnnnnnnnnnnnnnnnnnnnnnnnnnnnnnnnnnnnnnnnnnnnnnnnnnnnnnnnnnnnnnnnnnnnnnnnnnnnnnnnnnnnnnnnnnnnnnnnnnnnnnnnnnnnnnnnnnnnnnnnnnnnnnnnnnnnnnnnnnnnnnnnnnnnnnnnnnnnnnnnnnnnnnnnnnnnnnnnnnnnnnnnnnnnnnnnnnnnnnnnnnnnnnnnnnnnnnnnnnnnnnnnnnnnnnnnnnnnnnnnnnnnnnnnnnnnnnnnnnnnnnnnnnnnnnnnnnnnnnnnnnnnnnnnnnnnnnnnnnnnnnnnnnnnnnnnnnnnnnnnnnnnnnnnnnnnnnnnnnnnnnnnnnnnnnnnnnnnnnnnnnnnnnnnnnnnnnnnnnnnnnnnnnnnnnnnnnnnnnnnnnnnnnnnnnnnnnnnnnnnnnnnnnnnnnnnnnnnnnnnnnnnnnnnnnnnnnnnnnnnnnnnnnnnnnnnnnnnnnnnnnnnnnnnnnnnnnnnnnnnnnnnnnnnnnnnnnnnnnnnnnnnnnnnnnnnnnnnnnnnnnnnnnnnnnnnnnnnnnnnnnnnnnnnnnnnnnnnnnnnnnnnnnnnnnnnnnnnnnnnnnnnnnnnnnnnnnnnnnnnnnnnnnnnnnnnnnnnnnnnnnnnnnnnnnnnnnnnnnnnnnnnnnnnnnnnnnnnnnnnnnnnnnnnnnnnnnnnnnnnnnnnnnnnnnnnnnnnnnnnnnnnnnnnnnnnnnnnnnnnnnnnnnnnnnnnnnnnnnnnnnnnnnnnnnnnnnnnnnnnnnnnnnnnnnnnnnnnnnnnnnnnnnnnnnnnnnnnnnnnnnnnnnnnnnnnnnnnnnnnnnnnnnnnnnnnnnnnnnnnnnnnnnnnnnnnnnnnnnnnnnnnnnnnnnnnnnnnnnnnnnnnnnnnnnnnnnnnnnnnnnnnnnnnnnnnnnnnnnnnnnnnnnnnnnnnnnnnnnnnnnnnnnnnnnnnnnnnnnnnnnnnnnnnnnnnnnnnnnnnnnnnnnnnnnnnnnnnnnnnnnnnnnnnnnnnnnnnnnnnnnnnnnnnnnnnnnnnnnnnnnnnnnnnnnnnnnnnnnnnnnnnnnnnnnnnnnnnnnnnnnnnnnnnnnnnnnnnnnnnnnnnnnnnnnnnnnnnnnnnnnnnnnnnnnnnnnnnnnnnnnnnnnnnnnnnnnnnnnnnnnnnnnnnnnnnnnnnnnnnnnnnnnnnnnnnnnnnnnnnnnnnnnnnnnnnnnnnnnnnnnnnnnnnnnnnnnnnnnnnnnnnnnnnnnnnnnnnnnnnnnnnnnnnnnnnnnnnnnnnnnnnnnnnnnnnnnnnnnnnnnnnnnnnnnnnnnnnnnnnnnnnnnnnnnnnnnnnnnnnnnnnnnnnnnnnnnnnnnnnnnnnnnnnnnnnnnnnnnnnnnnnnnnnnnnnnnnnnnnnnnnnnnnnnnnnnnnnnnnnnnnnnnnnnnnnnnnnnnnnnnnnnnnnnnnnnnnnnnnnnnnnnnnnnnnnnnnnnnnnnnnnnnnnnnnnnnnnnnnnnnnnnnnnnnnnnnnnnnnnnnnnnnnnnnnnnnnnnnnnnnnnnnnnnnnnnnnnnnnnnnnnnnnnnnnnnnnnnnnnnnnnnnnnnnnnnnnnnnnnnnnnnnnnnnnnnnnnnnnnnnnnnnnnnnnnnnnnnnnnnnnnnnnnnnnnnnnnnnnnnnnnnnnnnnnnnnnnnnnnnnnnnnnnnnnnnnnnnnnnnnnnnnnnnnnnnnnnnnnnnnnnnnnnnnnnnnnnnnnnnnnnnnnnnnnnnnnnnnnnnnnnnnnnnnnnnnnnnnnnnnnnnnnnnnnnnnnnnnnnnnnnnnnnnnnnnnnnnnnnnnnnnnnnnnnnnnnnnnnnnnnnnnnnnnnnnnnnnnnnnnnnnnnnnnnnnnnnnnnnnnnnnnnnnnnnnnnnnnnnnnnnnnnnnnnnnnnnnnnnnnnnnnnnnnnnnnnnnnnnnnnnnnnnnnnnnnnnnnnnnnnnnnnnnnnnnnnnnnnnnnnnnnnnnnnnnnnnnnnnnnnnnnnnnnnnnnnnnnnnnnnnnnnnnnnnnnnnnnnnnnnnnnnnnnnnnnnnnnnnnnnnnnnnnnnnnnnnnnnnnnnnnnnnnnnnnnnnnnnnnnnnnnnnnnnnnnnnnnnnnnnnnnnnnnnnnnnnnnnnnnnnnnnnnnnnnnnnnnnnnnnnnnnnnnnnnnnnnnnnnnnnnnnnnnnnnnnnnnnnnnnnnnnnnnnnnnnnnnnnnnnnnnnnnnnnnnnnnnnnnnnnnnnnnnnnnnnnnnnnnnnnnnnnnnnnnnnnnnnnnnnnnnnnnnnnnnnnnnnnnnnnnnnnnnnnnnnnnnnnnnnnnnnnnnnnnnnnnnnnnnnnnnnnnnnnnnnnnnnnnnnnnnnnnnnnnnnnnnnnnnnnnnnnnnnnnnnnnnnnnnnnnnnnnnnnnnnnnnnnnnnnnnnnnnnnnnnnnnnnnnnnnnnnnnnnnnnnnnnnnnnnnnnnnnnnnnnnnnnnnnnnnnnnnnnnnnnnnnnnnnnnnnnnnnnnnnnnnnnnnnnnnnnnnnnnnnnnnnnnnnnnnnnnnnnnnnnnnnnnnnnnnnnnnnnnnnnnnnnnnnnnnnnnnnnnnnnnnnnnnnnnnnnnnnnnnnnnnnnnnnnnnnnnnnnnnnnnnnnnnnnnnnnnnnnnnnnnnnnnnnnnnnnnnnnnnnnnnnnnnnnnnnnnnnnnnnnnnnnnnnnnnnnnnnnnnnnnnnnnnnnnnnnnnnnnnnnnnnnnnnnnnnnnnnnnnnnnnnnnnnnnnnnnnnnnnnnnnnnnnnnnnnnnnnnnnnnnnnnnnnnnnnnnnnnnnnnnnnnnnnnnnnnnnnnnnnnnnnnnnnnnnnnnnnnnnnnnnnnnnnnnnnnnnnnnnnnnnnnnnnnnnnnnnnnnnnnnnnnnnnnnnnnnnnnnnnnnnnnnnnnnnnnnnnnnnnnnnnnnnnnnnnnnnnnnnnnnnnnnnnnnnnnnnnnnnnnnnnnnnnnnnnnnnnnnnnnnnnnnnnnnnnnnnnnnnnnnnnnnnnnnnnnnnnnnnnnnnnnnnnnnnnnnnnnnnnnnnnnnnnnnnnnnnnnnnnnnnnnnnnnnnnnnnnnnnnnnnnnnnnnnnnnnnnnnnnnnnnnnnnnnnnnnnnnnnnnnnnnnnnnnnnnnnnnnnnnnnnnnnnnnnnnnnnnnnnnnnnnnnnnnnnnnnnnnnnnnnnnnnnnnnnnnnnnnnnnnnnnnnnnnnnnnnnnnnnnnnnnnnnnnnnnnnnnnnnnnnnnnnnnnnnnnnnnnnnnnnnnnnnnnnnnnnnnnnnnnnnnnnnnnnnnnnnnnnnnnnnnnnnnnnnnnnnnnnnnnnnnnnnnnnnnnnnnnnnnnnnnnnnnnnnnnnnnnnnnnnnnnnnnnnnnnnnnnnnnnnnnnnnnnnnnnnnnnnnnnnnnnnnnnnnnnnnnnnnnnnnnnnnnnnnnnnnnnnnnnnnnnnnnnnnnnnnnnnnnnnnnnnnnnnnnnnnnnnnnnnnnnnnnnnnnnnnnnnnnnnnnnnnnnnnnnnnnnnnnnnnnnnnnnnnnnnnnnnnnnnnnnnnnnnnnnnnnnnnnnnnnnnnnnnnnnnnnnnnnnnnnnnnnnnnnnnnnnnnnnnnnnnnnnnnnnnnnnnnnnnnnnnnnnnnnnnnnnnnnnnnnnnnnnnnnnnnnnnnnnnnnnnnnnnnnnnnnnnnnnnnnnnnnnnnnnnnnnnnnnnnnnnnnnnnnnnnnnnnnnnnnnnnnnnnnnnnnnnnnnnnnnnnnnnnnnnnnnnnnnnnnnnnnnnnnnnnnnnnnnnnnnnnnnnnnnnnnnnnnnnnnnnnnnnnnnnnnnnnnnnnnnnnnnnnnnnnnnnnnnnnnnnnnnnnnnnnnnnnnnnnnnnnnnnnnnnnnnnnnnnnnnnnnnnnnnnnnnnnnnnnnnnnnnnnnnnnnnnnnnnnnnnnnnnnnnnnnnnnnnnnnnnnnnnnnnnnnnnnnnnnnnnnnnnnnnnnnnnnnnnnnnnnnnnnnnnnnnnnnnnnnnnnnnnnnnnnnnnnnnnnnnnnnnnnnnnnnnnnnnnnnnnnnnnnnnnnnnnnnnnnnnnnnnnnnnnnnnnnnnnnnnnnnnnnnnnnnnnnnnnnnnnnnnnnnnnnnnnnnnnnnnnnnnnnnnnnnnnnnnnnnnnnnnnnnnnnnnnnnnnnnnnnnnnnnnnnnnnnnnnnnnnnnnnnnnnnnnnnnnnnnnnnnnnnnnnnnnnnnnnnnnnnnnnnnnnnnnnnnnnnnnnnnnnnnnnnnnnnnnnnnnnnnnnnnnnnnnnnnnnnnnnnnnnnnnnnnnnnnnnnnnnnnnnnnnnnnnnnnnnnnnnnnnnnnnnnnnnnnnnnnnnnnnnnnnnnnnnnnnnnnnnnnnnnnnnnnnnnnnnnnnnnnnnnnnnnnnnnnnnnnnnnnnnnnnnnnnnnnnnnnnnnnnnnnnnnnnnnnnnnnnnnnnnnnnnnnnnnnnnnnnnnnnnnnnnnnnnnnnnnnnnnnnnnnnnnnnnnnnnnnnnnnnnnnnnnnnnnnnnnnnnnnnnnnnnnnnnnnnnnnnnnnnnnnnnnnnnnnnnnnnnnnnnnnnnnnnnnnnnnnnnnnnnnnnnnnnnnnnnnnnnnnnnnnnnnnnnnnnnnnnnnnnnnnnnnnnnnnnnnnnnnnnnnnnnnnnnnnnnnnnnnnnnnnnnnnnnnnnnnnnnnnnnnnnnnnnnnnnnnnnnnnnnnnnnnnnnnnnnnnnnnnnnnnnnnnnnnnnnnnnnnnnnnnnnnnnnnnnnnnnnnnnnnnnnnnnnnnnnnnnnnnnnnnnnnnnnnnnnnnnnnnnnnnnnnnnnnnnnnnnnnnnnnnnnnnnnnnnnnnnnnnnnnnnnnnnnnnnnnnnnnnnnnnnnnnnnnnnnnnnnnnnnnnnnnnnnnnnnnnnnnnnnnnnnnnnnnnnnnnnnnnnnnnnnnnnnnnnnnnnnnnnnnnnnnnnnnnnnnnnnnnnnnnnnnnnnnnnnnnnnnnnnnnnnnnnnnnnnnnnnnnnnnnnnnnnnnnnnnnnnnnnnnnnnnnnnnnnnnnnnnnnnnnnnnnnnnnnnnnnnnnnnnnnnnnnnnnnnnnnnnnnnnnnnnnnnnnnnnnnnnnnnnnnnnnnnnnnnnnnnnnnnnnnnnnnnnnnnnnnnnnnnnnnnnnnnnnnnnnnnnnnnnnnnnnnnnnnnnnnnnnnnnnnnnnnnnnnnnnnnnnnnnnnnnnnnnnnnnnnnnnnnnnnnnnnnnnnnnnnnnnnnnnnnnnnnnnnnnnnnnnnnnnnnnnnnnnnnnnnnnnnnnnnnnnnnnnnnnnnnnnnnnnnnnnnnnnnnnnnnnnnnnnnnnnnnnnnnnnnnnnnnnnnnnnnnnnnnnnnnnnnnnnnnnnnnnnnnnnnnnnnnnnnnnnnnnnnnnnnnnnnnnnnnnnnnnnnnnnnnnnnnnnnnnnnnnnnnnnnnnnnnnnnnnnnnnnnnnnnnnnnnnnnnnnnnnnnnnnnnnnnnnnnnnnnnnnnnnnnnnnnnnnnnnnnnnnnnnnnnnnnnnnnnnnnnnnnnnnnnnnnnnnnnnnnnnnnnnnnnnnnnnnnnnnnnnnnnnnnnnnnnnnnnnnnnnnnnnnnnnnnnnnnnnnnnnnnnnnnnnnnnnnnnnnnnnnnnnnnnnnnnnnnnnnnnnnnnnnnnnnnnnnnnnnnnnnnnnnnnnnnnnnnnnnnnnnnnnnnnnnnnnnnnnnnnnnnnnnnnnnnnnnnnnnnnnnnnnnnnnnnnnnnnnnnnnnnnnnnnnnnnnnnnnnnnnnnnnnnnnnnnnnnnnnnnnnnnnnnnnnnnnnnnnnnnnnnnnnnnnnnnnnnnnnnnnnnnnnnnnnnnnnnnnnnnnnnnnnnnnnnnnnnnnnnnnnnnnnnnnnnnnnnnnnnnnnnnnnnnnnnnnnnnnnnnnnnnnnnnnnnnnnnnnnnnnnnnnnnnnnnnnnnnnnnnnnnnnnnnnnnnnnnnnnnnnnnnnnnnnnnnnnnnnnnnnnnnnnnnnnnnnnnnnnnnnnnnnnnnnnnnnnnnnnnnnnnnnnnnnnnnnnnnnnnnnnnnnnnnnnnnnnnnnnnnnnnnnnnnnnnnnnnnnnnnnnnnnnnnnnnnnnnnnnnnnnnnnnnnnnnnnnnnnnnnnnnnnnnnnnnnnnnnnnnnnnnnnnnnnnnnnnnnnnnnnnnnnnnnnnnnnnnnnnnnnnnnnnnnnnnnnnnnnnnnnnnnnnnnnnnnnnnnnnnnnnnnnnnnnnnnnnnnnnnnnnnnnnnnnnnnnnnnnnnnnnnnnnnnnnnnnnnnnnnnnnnnnnnnnnnnnnnnnnnnnnnnnnnnnnnnnnnnnnnnnnnnnnnnnnnnnnnnnnnnnnnnnnnnnnnnnnnnnnnnnnnnnnnnnnnnnnnnnnnnnnnnnnnnnnnnnnnnnnnnnnnnnnnnnnnnnnnnnnnnnnnnnnnnnnnnnnnnnnnnnnnnnnnnnnnnnnnnnnnnnnnnnnnnnnnnnnnnnnnnnnnnnnnnnnnnnnnnnnnnnnnnnnnnnnnnnnnnnnnnnnnnnnnnnnnnnnnnnnnnnnnnnnnnnnnnnnnnnnnnnnnnnnnnnnnnnnnnnnnnnnnnnnnnnnnnnnnnnnnnnnnnnnnnnnnnnnnnnnnnnnnnnnnnnnnnnnnnnnnnnnnnnnnnnnnnnnnnnnnnnnnnnnnnnnnnnnnnnnnnnnnnnnnnnnnnnnnnnnnnnnnnnnnnnnnnnnnnnnnnnnnnnnnnnnnnnnnnnnnnnnnnnnnnnnnnnnnnnnnnnnnnnnnnnnnnnnnnnnnnnnnnnnnnnnnnnnnnnnnnnnnnnnnnnnnnnnnnnnnnnnnnnnnnnnnnnnnnnnnnnnnnnnnnnnnnnnnnnnnnnnnnnnnnnnnnnnnnnnnnnnnnnnnnnnnnnnnnnnnnnnnnnnnnnnnnnnnnnnnnnnnnnnnnnnnnnnnnnnnnnnnnnnnnnnnnnnnnnnnnnnnnnnnnnnnnnnnnnnnnnnnnnnnnnnnnnnnnnnnnnnnnnnnnnnnnnnnnnnnnnnnnnnnnnnnnnnnnnnnnnnnnnnnnnnnnnnnnnnnnnnnnnnnnnnnnnnnnnnnnnnnnnnnnnnnnnnnnnnnnnnnnnnnnnnnnnnnnnnnnnnnnnnnnnnnnnnnnnnnnnnnnnnnnnnnnnnnnnnnnnnnnnnnnnnnnnnnnnnnnnnnnnnnnnnnnnnnnnnnnnnnnnnnnnnnnnnnnnnnnnnnnnnnnnnnnnnnnnnnnnnnnnnnnnnnnnnnnnnnnnnnnnnnnnnnnnnnnnnnnnnnnnnnnnnnnnnnnnnnnnnnnnnnnnnnnnnnnnnnnnnnnnnnnnnnnnnnnnnnnnnnnnnnnnnnnnnnnnnnnnnnnnnnnnnnnnnnnnnnnnnnnnnnnnnnnnnnnnnnnnnnnnnnnnnnnnnnnnnnnnnnnnnnnnnnnnnnnnnnnnnnnnnnnnnnnnnnnnnnnnnnnnnnnnnnnnnnnnnnnnnnnnnnnnnnnnnnnnnnnnnnnnnnnnnnnnnnnnnnnnnnnnnnnnnnnnnnnnnnnnnnnnnnnnnnnnnnnnnnnnnnnnnnnnnnnnnnnnnnnnnnnnnnnnnnnnnnnnnnnnnnnnnnnnnnnnnnnnnnnnnnnnnnnnnnnnnnnnnnnnnnnnnnnnnnnnnnnnnnnnnnnnnnnnnnnnnnnnnnnnnnnnnnnnnnnnnnnnnnnnnnnnnnnnnnnnnnnnnnnnnnnnnnnnnnnnnnnnnnnnnnnnnnnnnnnnnnnnnnnnnnnnnnnnnnnnnnnnnnnnnnnnnnnnnnnnnnnnnnnnnnnnnnnnnnnnnnnnnnnnnnnnnnnnnnnnnnnnnnnnnnnnnnnnnnnnnnnnnnnnnnnnnnnnnnnnnnnnnnnnnnnnnnnnnnnnnnnnnnnnnnnnnnnnnnnnnnnnnnnnnnnnnnnnnnnnnnnnnnnnnnnnnnnnnnnnnnnnnnnnnnnnnnnnnnnnnnnnnnnnnnnnnnnnnnnnnnnnnnnnnnnnnnnnnnnnnnnnnnnnnnnnnnnnnnnnnnnnnnnnnnnnnnnnnnnnnnnnnnnnnnnnnnnnnnnnnnnnnnnnnnnnnnnnnnnnnnnnnnnnnnnnnnnnnnnnnnnnnnnnnnnnnnnnnnnnnnnnnnnnnnnnnnnnnnnnnnnnnnnnnnnnnnnnnnnnnnnnnnnnnnnnnnnnnnnnnnnnnnnnnnnnnnnnnnnnnnnnnnnnnnnnnnnnnnnnnnnnnnnnnnnnnnnnnnnnnnnnnnnnnnnnnnnnnnnnnnnnnnnnnnnnnnnnnnnnnnnnnnnnnnnnnnnnnnnnnnnnnnnnnnnnnnnnnnnnnnnnnnnnnnnnnnnnnnnnnnnnnnnnnnnnnnnnnnnnnnnnnnnnnnnnnnnnnnnnnnnnnnnnnnnnnnnnnnnnnnnnnnnnnnnnnnnnnnnnnnnnnnnnnnnnnnnnnnnnnnnnnnnnnnnnnnnnnnnnnnnnnnnnnnnnnnnnnnnnnnnnnnnnnnnnnnnnnnnnnnnnnnnnnnnnnnnnnnnnnnnnnnnnnnnnnnnnnnnnnnnnnnnnnnnnnnnnnnnnnnnnnnnnnnnnnnnnnnnnnnnnnnnnnnnnnnnnnnnnnnnnnnnnnnnnnnnnnnnnnnnnnnnnnnnnnnnnnnnnnnnnnnnnnnnnnnnnnnnnnnnnnnnnnnnnnnnnnnnnnnnnnnnnnnnnnnnnnnnnnnnnnnnnnnnnnnnnnnnnnnnnnnnnnnnnnnnnnnnnnnnnnnnnnnnnnnnnnnnnnnnnnnnnnnnnnnnnnnnnnnnnnnnnnnnnnnnnnnnnnnnnnnnnnnnnnnnnnnnnnnnnnnnnnnnnnnnnnnnnnnnnnnnnnnnnnnnnnnnnnnnnnnnnnnnnnnnnnnnnnnnnnnnnnnnnnnnnnnnnnnnnnnnnnnnnnnnnnnnnnnnnnnnnnnnnnnnnnnnnnnnnnnnnnnnnnnnnnnnnnnnnnnnnnnnnnnnnnnnnnnnnnnnnnnnnnnnnnnnnnnnnnnnnnnnnnnnnnnnnnnnnnnnnnnnnnnnnnnnnnnnnnnnnnnnnnnnnnnnnnnnnnnnnnnnnnnnnnnnnnnnnnnnnnnnnnnnnnnnnnnnnnnnnnnnnnnnnnnnnnnnnnnnnnnnnnnnnnnnnnnnnnnnnnnnnnnnnnnnnnnnnnnnnnnnnnnnnnnnnnnnnnnnnnnnnnnnnnnnnnnnnnnnnnnnnnnnnnnnnnnnnnnnnnnnnnnnnnnnnnnnnnnnnnnnnnnnnnnnnnnnnnnnnnnnnnnnnnnnnnnnnnnnnnnnnnnnnnnnnnnnnnnnnnnnnnnnnnnnnnnnnnnnnnnnnnnnnnnnnnnnnnnnnnnnnnnnnnnnnnnnnnnnnnnnnnnnnnnnnnnnnnnnnnnnnnnnnnnnnnnnnnnnnnnnnnnnnnnnnnnnnnnnnnnnnnnnnnnnnnnnnnnnnnnnnnnnnnnnnnnnnnnnnnnnnnnnnnnnnnnnnnnnnnnnnnnnnnnnnnnnnnnnnnnnnnnnnnnnnnnnnnnnnnnnnnnnnnnnnnnnnnnnnnnnnnnnnnnnnnnnnnnnnnnnnnnnnnnnnnnnnnnnnnnnnnnnnnnnnnnnnnnnnnnnnnnnnnnnnnnnnnnnnnnnnnnnnnnnnnnnnnnnnnnnnnnnnnnnnnnnnnnnnnnnnnnnnnnnnnnnnnnnnnnnnnnnnnnnnnnnnnnnnnnnnnnnnnnnnnnnnnnnnnnnnnnnnnnnnnnnnnnnnnnnnnnnnnnnnnnnnnnnnnnnnnnnnnnnnnnnnnnnnnnnnnnnnnnnnnnnnnnnnnnnnnnnnnnnnnnnnnnnnnnnnnnnnnnnnnnnnnnnnnnnnnnnnnnnnnnnnnnnnnnnnnnnnnnnnnnnnnnnnnnnnnnnnnnnnnnnnnnnnnnnnnnnnnnnnnnnnnnnnnnnnnnnnnnnnnnnnnnnnnnnnnnnnnnnnnnnnnnnnnnnnnnnnnnnnnnnnnnnnnnnnnnnnnnnnnnnnnnnnnnnnnnnnnnnnnnnnnnnnnnnnnnnnnnnnnnnnnnnnnnnnnnnnnnnnnnnnnnnnnnnnnnnnnnnnnnnnnnnnnnnnnnnnnnnnnnnnnnnnnnnnnnnnnnnnnnnnnnnnnnnnnnnnnnnnnnnnnnnnnnnnnnnnnnnnnnnnnnnnnnnnnnnnnnnnnnnnnnnnnnnnnnnnnnnnnnnnnnnnnnnnnnnnnnnnnnnnnnnnnnnnnnnnnnnnnnnnnnnnnnnnnnnnnnnnnnnnnnnnnnnnnnnnnnnnnnnnnnnnnnnnnnnnnnnnnnnnnnnnnnnnnnnnnnnnnnnnnnnnnnnnnnnnnnnnnnnnnnnnnnnnnnnnnnnnnnnnnnnnnnnnnnnnnnnnnnnnnnnnnnnnnnnnnnnnnnnnnnnnnnnnnnnnnnnnnnnnnnnnnnnnnnnnnnnnnnnnnnnnnnnnnnnnnnnnnnnnnnnnnnnnnnnnnnnnnnnnnnnnnnnnnnnnnnnnnnnnnnnnnnnnnnnnnnnnnnnnnnnnnnnnnnnnnnnnnnnnnnnnnnnnnnnnnnnnnnnnnnnnnnnnnnnnnnnnnnnnnnnnnnnnnnnnnnnnnnnnnnnnnnnnnnnnnnnnnnnnnnnnnnnnnnnnnnnnnnnnnnnnnnnnnnnnnnnnnnnnnnnnnnnnnnnnnnnnnnnnnnnnnnnnnnnnnnnnnnnnnnnnnnnnnnnnnnnnnnnnnnnnnnnnnnnnnnnnnnnnnnnnnnnnnnnnnnnnnnnnnnnnnnnnnnnnnnnnnnnnnnnnnnnnnnnnnnnnnnnnnnnnnnnnnnnnnnnnnnnnnnnnnnnnnnnnnnnnnnnnnnnnnnnnnnnnnnnnnnnnnnnnnnnnnnnnnnnnnnnnnnnnnnnnnnnnnnnnnnnnnnnnnnnnnnnnnnnnnnnnnnnnnnnnnnnnnnnnnnnnnnnnnnnnnnnnnnnnnnnnnnnnnnnnnnnnnnnnnnnnnnnnnnnnnnnnnnnnnnnnnnnnnnnnnnnnnnnnnnnnnnnnnnnnnnnnnnnnnnnnnnnnnnnnnnnnnnnnnnnnnnnnnnnnnnnnnnnnnnnnnnnnnnnnnnnnnnnnnnnnnnnnnnnnnnnnnnnnnnnnnnnnnnnnnnnnnnnnnnnnnnnnnnnnnnnnnnnnnnnnnnnnnnnnnnnnnnnnnnnnnnnnnnnnnnnnnnnnnnnnnnnnnnnnnnnnnnnnnnnnnnnnnnnnnnnnnnnnnnnnnnnnnnnnnnnnnnnnnnnnnnnnnnnnnnnnnnnnnnnnnnnnnnnnnnnnnnnnnnnnnnnnnnnnnnnnnnnnnnnnnnnnnnnnnnnnnnnnnnnnnnnnnnnnnnnnnnnnnnnnnnnnnnnnnnnnnnnnnnnnnnnnnnnnnnnnnnnnnnnnnnnnnnnnnnnnnnnnnnnnnnnnnnnnnnnnnnnnnnnnnnnnnnnnnnnnnnnnnnnnnnnnnnnnnnnnnnnnnnnnnnnnnnnnnnnnnnnnnnnnnnnnnnnnnnnnnnnnnnnnnnnnnnnnnnnnnnnnnnnnnnnnnnnnnnnnnnnnnnnnnnnnnnnnnnnnnnnnnnnnnnnnnnnnnnnnnnnnnnnnnnnnnnnnnnnnnnnnnnnnnnnnnnnnnnnnnnnnnnnnnnnnnnnnnnnnnnnnnnnnnnnnnnnnnnnnnnnnnnnnnnnnnnnnnnnnnnnnnnnnnnnnnnnnnnnnnnnnnnnnnnnnnnnnnnnnnnnnnnnnnnnnnnnnnnnnnnnnnnnnnnnnnnnnnnnnnnnnnnnnnnnnnnnnnnnnnnnnnnnnnnnnnnnnnnnnnnnnnnnnnnnnnnnnnnnnnnnnnnnnnnnnnnnnnnnnnnnnnnnnnnnnnnnnnnnnnnnnnnnnnnnnnnnnnnnnnnnnnnnnnnnnnnnnnnnnnnnnnnnnnnnnnnnnnnnnnnnnnnnnnnnnnnnnnnnnnnnnnnnnnnnnnnnnnnnnnnnnnnnnnnnnnnnnnnnnnnnnnnnnnnnnnnnnnnnnnnnnnnnnnnnnnnnnnnnnnnnnnnnnnnnnnnnnnnnnnnnnnnnnnnnnnnnnnnnnnnnnnnnnnnnnnnnnnnnnnnnnnnnnnnnnnnnnnnnnnnnnnnnnnnnnnnnnnnnnnnnnnnnnnnnnnnnnnnnnnnnnnnnnnnnnnnnnnnnnnnnnnnnnnnnnnnnnnnnnnnnnnnnnnnnnnnnnnnnnnnnnnnnnnnnnnnnnnnnnnnnnnnnnnnnnnnnnnnnnnnnnnnnnnnnnnnnnnnnnnnnnnnnnnnnnnnnnnnnnnnnnnnnnnnnnnnnnnnnnnnnnnnnnnnnnnnnnnnnnnnnnnnnnnnnnnnnnnnnnnnnnnnnnnnnnnnnnnnnnnnnnnnnnnnnnnnnnnnnnnnnnnnnnnnnnnnnnnnnnnnnnnnnnnnnnnnnnnnnnnnnnnnnnnnnnnnnnnnnnnnnnnnnnnnnnnnnnnnnnnnnnnnnnnnnnnnnnnnnnnnnnnnnnnnnnnnnnnnnnnnnnnnnnnnnnnnnnnnnnnnnnnnnnnnnnnnnnnnnnnnnnnnnnnnnnnnnnnnnnnnnnnnnnnnnnnnnnnnnnnnnnnnnnnnnnnnnnnnnnnnnnnnnnnnnnnnnnnnnnnnnnnnnnnnnnnnnnnnnnnnnnnnnnnnnnnnnnnnnnnnnnnnnnnnnnnnnnnnnnnnnnnnnnnnnnnnnnnnnnnnnnnnnnnnnnnnnnnnnnnnnnnnnnnnnnnnnnnnnnnnnnnnnnnnnnnnnnnnnnnnnnnnnnnnnnnnnnnnnnnnnnnnnnnnnnnnnnnnnnnnnnnnnnnnnnnnnnnnnnnnnnnnnnnnnnnnnnnnnnnnnnnnnnnnnnnnnnnnnnnnnnnnnnnnnnnnnnnnnnnnnnnnnnnnnnnnnnnnnnnnnnnnnnnnnnnnnnnnnnnnnnnnnnnnnnnnnnnnnnnnnnnnnnnnnnnnnnnnnnnnnnnnnnnnnnnnnnnnnnnnnnnnnnnnnnnnnnnnnnnnnnnnnnnnnnnnnnnnnnnnnnnnnnnnnnnnnnnnnnnnnnnnnnnnnnnnnnnnnnnnnnnnnnnnnnnnnnnnnnnnnnnnnnnnnnnnnnnnnnnnnnnnnnnnnnnnnnnnnnnnnnnnnnnnnnnnnnnnnnnnnnnnnnnnnnnnnnnnnnnnnnnnnnnnnnnnnnnnnnnnnnnnnnnnnnnnnnnnnnnnnnnnnnnnnnnnnnnnnnnnnnnnnnnnnnnnnnnnnnnnnnnnnnnnnnnnnnnnnnnnnnnnnnnnnnnnnnnnnnnnnnnnnnnnnnnnnnnnnnnnnnnnnnnnnnnnnnnnnnnnnnnnnnnnnnnnnnnnnnnnnnnnnnnnnnnnnnnnnnnnnnnnnnnnnnnnnnnnnnnnnnnnnnnnnnnnnnnnnnnnnnnnnnnnnnnnnnnnnnnnnnnnnnnnnnnnnnnnnnnnnnnnnnnnnnnnnnnnnnnnnnnnnnnnnnnnnnnnnnnnnnnnnnnnnnnnnnnnnnnnnnnnnnnnnnnnnnnnnnnnnnnnnnnnnnnnnnnnnnnnnnnnnnnnnnnnnnnnnnnnnnnnnnnnnnnnnnnnnnnnnnnnnnnnnnnnnnnnnnnnnnnnnnnnnnnnnnnnnnnnnnnnnnnnnnnnnnnnnnnnnnnnnnnnnnnnnnnnnnnnnnnnnnnnnnnnnnnnnnnnnnnnnnnnnnnnnnnnnnnnnnnnnnnnnnnnnnnnnnnnnnnnnnnnnnnnnnnnnnnnnnnnnnnnnnnnnnnnnnnnnnnnnnnnnnnnnnnnnnnnnnnnnnnnnnnnnnnnnnnnnnnnnnnnnnnnnnnnnnnnnnnnnnnnnnnnnnnnnnnnnnnnnnnnnnnnnnnnnnnnnnnnnnnnnnnnnnnnnnnnnnnnnnnnnnnnnnnnnnnnnnnnnnnnnnnnnnnnnnnnnnnnnnnnnnnnnnnnnnnnnnnnnnnnnnnnnnnnnnnnnnnnnnnnnnnnnnnnnnnnnnnnnnnnnnnnnnnnnnnnnnnnnnnnnnnnnnnnnnnnnnnnnnnnnnnnnnnnnnnnnnnnnnnnnnnnnnnnnnnnnnnnnnnnnnnnnnnnnnnnnnnnnnnnnnnnnnnnnnnnnnnnnnnnnnnnnnnnnnnnnnnnnnnnnnnnnnnnnnnnnnnnnnnnnnnnnnnnnnnnnnnnnnnnnnnnnnnnnnnnnnnnnnnnnnnnnnnnnnnnnnnnnnnnnnnnnnnnnnnnnnnnnnnnnnnnnnnnnnnnnnnnnnnnnnnnnnnnnnnnnnnnnnnnnnnnnnnnnnnnnnnnnnnnnnnnnnnnnnnnnnnnnnnnnnnnnnnnnnnnnnnnnnnnnnnnnnnnnnnnnnnnnnnnnnnnnnnnnnnnnnnnnnnnnnnnnnnnnnnnnnnnnnnnnnnnnnnnnnnnnnnnnnnnnnnnnnnnnnnnnnnnnnnnnnnnnnnnnnnnnnnnnnnnnnnnnnnnnnnnnnnnnnnnnnnnnnnnnnnnnnnnnnnnnnnnnnnnnnnnnnnnnnnnnnnnnnnnnnnnnnnnnnnnnnnnnnnnnnnnnnnnnnnnnnnnnnnnnnnnnnnnnnnnnnnnnnnnnnnnnnnnnnnnnnnnnnnnnnnnnnnnnnnnnnnnnnnnnnnnnnnnnnnnnnnnnnnnnnnnnnnnnnnnnnnnnnnnnnnnnnnnnnnnnnnnnnnnnnnnnnnnnnnnnnnnnnnnnnnnnnnnnnnnnnnnnnnnnnnnnnnnnnnnnnnnnnnnnnnnnnnnnnnnnnnnnnnnnnnnnnnnnnnnnnnnnnnnnnnnnnnnnnnnnnnnnnnnnnnnnnnnnnnnnnnnnnnnnnnnnnnnnnnnnnnnnnnnnnnnnnnnnnnnnnnnnnnnnnnnnnnnnnnnnnnnnnnnnnnnnnnnnnnnnnnnnnnnnnnnnnnnnnnnnnnnnnnnnnnnnnnnnnnnnnnnnnnnnnnnnnnnnnnnnnnnnnnnnnnnnnnnnnnnnnnnnnnnnnnnnnnnnnnnnnnnnnnnnnnnnnnnnnnnnnnnnnnnnnnnnnnnnnnnnnnnnnnnnnnnnnnnnnnnnnnnnnnnnnnnnnnnnnnnnnnnnnnnnnnnnnnnnnnnnnnnnnnnnnnnnnnnnnnnnnnnnnnnnnnnnnnnnnnnnnnnnnnnnnnnnnnnnnnnnnnnnnnnnnnnnnnnnnnnnnnnnnnnnnnnnnnnnnnnnnnnnnnnnnnnnnnnnnnnnnnnnnnnnnnnnnnnnnnnnnnnnnnnnnnnnnnnnnnnnnnnnnnnnnnnnnnnnnnnnnnnnnnnnnnnnnnnnnnnnnnnnnnnnnnnnnnnnnnnnnnnnnnnnnnnnnnnnnnnnnnnnnnnnnnnnnnnnnnnnnnnnnnnnnnnnnnnnnnnnnnnnnnnnnnnnnnnnnnnnnnnnnnnnnnnnnnnnnnnnnnnnnnnnnnnnnnnnnnnnnnnnnnnnnnnnnnnnnnnnnnnnnnnnnnnnnnnnnnnnnnnnnnnnnnnnnnnnnnnnnnnnnnnnnnnnnnnnnnnnnnnnnnnnnnnnnnnnnnnnnnnnnnnnnnnnnnnnnnnnnnnnnnnnnnnnnnnnnnnnnnnnnnnnnnnnnnnnnnnnnnnnnnnnnnnnnnnnnnnnnnnnnnnnnnnnnnnnnnnnnnnnnnnnnnnnnnnnnnnnnnnnnnnnnnnnnnnnnnnnnnnnnnnnnnnnnnnnnnnnnnnnnnnnnnnnnnnnnnnnnnnnnnnnnnnnnnnnnnnnnnnnnnnnnnnnnnnnnnnnnnnnnnnnnnnnnnnnnnnnnnnnnnnnnnnnnnnnnnnnnnnnnnnnnnnnnnnnnnnnnnnnnnnnnnnnnnnnnnnnnnnnnnnnnnnnnnnnnnnnnnnnnnnnnnnnnnnnnnnnnnnnnnnnnnnnnnnnnnnnnnnnnnnnnnnnnnnnnnnnnnnnnnnnnnnnnnnnnnnnnnnnnnnnnnnnnnnnnnnnnnnnnnnnnnnnnnnnnnnnnnnnnnnnnnnnnnnnnnnnnnnnnnnnnnnnnnnnnnnnnnnnnnnnnnnnnnnnnnnnnnnnnnnnnnnnnnnnnnnnnnnnnnnnnnnnnnnnnnnnnnnnnnnnnnnnnnnnnnnnnnnnnnnnnnnnnnnnnnnnnnnnnnnnnnnnnnnnnnnnnnnnnnnnnnnnnnnnnnnnnnnnnnnnnnnnnnnnnnnnnnnnnnnnnnnnnnnnnnnnnnnnnnnnnnnnnnnnnnnnnnnnnnnnnnnnnnnnnnnnnnnnnnnnnnnnnnnnnnnnnnnnnnnnnnnnnnnnnnnnnnnnnnnnnnnnnnnnnnnnnnnnnnnnnnnnnnnnnnnnnnnnnnnnnnnnnnnnnnnnnnnnnnnnnnnnnnnnnnnnnnnnnnnnnnnnnnnnnnnnnnnnnnnnnnnnnnnnnnnnnnnnnnnnnnnnnnnnnnnnnnnnnnnnnnnnnnnnnnnnnnnnnnnnnnnnnnnnnnnnnnnnnnnnnnnnnnnnnnnnnnnnnnnnnnnnnnnnnnnnnnnnnnnnnnnnnnnnnnnnnnnnnnnnnnnnnnnnnnnnnnnnnnnnnnnnnnnnnnnnnnnnnnnnnnnnnnnnnnnnnnnnnnnnnnnnnnnnnnnnnnnnnnnnnnnnnnnnnnnnnnnnnnnnnnnnnnnnnnnnnnnnnnnnnnnnnnnnnnnnnnnnnnnnnnnnnnnnnnnnnnnnnnnnnnnnnnnnnnnnnnnnnnnnnnnnnnnnnnnnnnnnnnnnnnnnnnnnnnnnnnnnnnnnnnnnnnnnnnnnnnnnnnnnnnnnnnnnnnnnnnnnnnnnnnnnnnnnnnnnnnnnnnnnnnnnnnnnnnnnnnnnnnnnnnnnnnnnnnnnnnnnnnnnnnnnnnnnnnnnnnnnnnnnnnnnnnnnnnnnnnnnnnnnnnnnnnnnnnnnnnnnnnnnnnnnnnnnnnnnnnnnnnnnnnnnnnnnnnnnnnnnnnnnnnnnnnnnnnnnnnnnnnnnnnnnnnnnnnnnnnnnnnnnnnnnnnnnnnnnnnnnnnnnnnnnnnnnnnnnnnnnnnnnnnnnnnnnnnnnnnnnnnnnnnnnnnnnnnnnnnnnnnnnnnnnnnnnnnnnnnnnnnnnnnnnnnnnnnnnnnnnnnnnnnnnnnnnnnnnnnnnnnnnnnnnnnnnnnnnnnnnnnnnnnnnnnnnnnnnnnnnnnnnnnnnnnnnnnnnnnnnnnnnnnnnnnnnnnnnnnnnnnnnnnnnnnnnnnnnnnnnnnnnnnnnnnnnnnnnnnnnnnnnnnnnnnnnnnnnnnnnnnnnnnnnnnnnnnnnnnnnnnnnnnnnnnnnnnnnnnnnnnnnnnnnnnnnnnnnnnnnnnnnnnnnnnnnnnnnnnnnnnnnnnnnnnnnnnnnnnnnnnnnnnnnnnnnnnnnnnnnnnnnnnnnnnnnnnnnnnnnnnnnnnnnnnnnnnnnnnnnnnnnnnnnnnnnnnnnnnnnnnnnnnnnnnnnnnnnnnnnnnnnnnnnnnnnnnnnnnnnnnnnnnnnnnnnnnnnnnnnnnnnnnnnnnnnnnnnnnnnnnnnnnnnnnnnnnnnnnnnnnnnnnnnnnnnnnnnnnnnnnnnnnnnnnnnnnnnnnnnnnnnnnnnnnnnnnnnnnnnnnnnnnnnnnnnnnnnnnnnnnnnnnnnnnnnnnnnnnnnnnnnnnnnnnnnnnnnnnnnnnnnnnnnnnnnnnnnnnnnnnnnnnnnnnnnnnnnnnnnnnnnnnnnnnnnnnnnnnnnnnnnnnnnnnnnnnnnnnnnnnnnnnnnnnnnnnnnnnnnnnnnnnnnnnnnnnnnnnnnnnnnnnnnnnnnnnnnnnnnnnnnnnnnnnnnnnnnnnnnnnnnnnnnnnnnnnnnnnnnnnnnnnnnnnnnnnnnnnnnnnnnnnnnnnnnnnnnnnnnnnnnnnnnnnnnnnnnnnnnnnnnnnnnnnnnnnnnnnnnnnnnnnnnnnnnnnnnnnnnnnnnnnnnnnnnnnnnnnnnnnnnnnnnnnnnnnnnnnnnnnnnnnnnnnnnnnnnnnnnnnnnnnnnnnnnnnnnnnnnnnnnnnnnnnnnnnnnnnnnnnnnnnnnnnnnnnnnnnnnnnnnnnnnnnnnnnnnnnnnnnnnnnnnnnnnnnnnnnnnnnnnnnnnnnnnnnnnnnnnnnnnnnnnnnnnnnnnnnnnnnnnnnnnnnnnnnnnnnnnnnnnnnnnnnnnnnnnnnnnnnnnnnnnnnnnnnnnnnnnnnnnnnnnnnnnnnnnnnnnnnnnnnnnnnnnnnnnnnnnnnnnnnnnnnnnnnnnnnnnnnnnnnnnnnnnnnnnnnnnnnnnnnnnnnnnnnnnnnnnnnnnnnnnnnnnnnnnnnnnnnnnnnnnnnnnnnnnnnnnnnnnnnnnnnnnnnnnnnnnnnnnnnnnnnnnnnnnnnnnnnnnnnnnnnnnnnnnnnnnnnnnnnnnnnnnnnnnnnnnnnnnnnnnnnnnnnnnnnnnnnnnnnnnnnnnnnnnnnnnnnnnnnnnnnnnnnnnnnnnnnnnnnnnnnnnnnnnnnnnnnnnnnnnnnnnnnnnnnnnnnnnnnnnnnnnnnnnnnnnnnnnnnnnnnnnnnnnnnnnnnnnnnnnnnnnnnnnnnnnnnnnnnnnnnnnnnnnnnnnnnnnnnnnnnnnnnnnnnnnnnnnnnnnnnnnnnnnnnnnnnnnnnnnnnnnnnnnnnnnnnnnnnnnnnnnnnnnnnnnnnnnnnnnnnnnnnnnnnnnnnnnnnnnnnnnnnnnnnnnnnnnnnnnnnnnnnnnnnnnnnnnnnnnnnnnnnnnnnnnnnnnnnnnnnnnnnnnnnnnnnnnnnnnnnnnnnnnnnnnnnnnnnnnnnnnnnnnnnnnnnnnnnnnnnnnnnnnnnnnnnnnnnnnnnnnnnnnnnnnnnnnnnnnnnnnnnnnnnnnnnnnnnnnnnnnnnnnnnnnnnnnnnnnnnnnnnnnnnnnnnnnnnnnnnnnnnnnnnnnnnnnnnnnnnnnnnnnnnnnnnnnnnnnnnnnnnnnnnnnnnnnnnnnnnnnnnnnnnnnnnnnnnnnnnnnnnnnnnnnnnnnnnnnnnnnnnnnnnnnnnnnnnnnnnnnnnnnnnnnnnnnnnnnnnnnnnnnnnnnnnnnnnnnnnnnnnnnnnnnnnnnnnnnnnnnnnnnnnnnnnnnnnnnnnnnnnnnnnnnnnnnnnnnnnnnnnnnnnnnnnnnnnnnnnnnnnnnnnnnnnnnnnnnnnnnnnnnnnnnnnnnnnnnnnnnnnnnnnnnnnnnnnnnnnnnnnnnnnnnnnnnnnnnnnnnnnnnnnnnnnnnnnnnnnnnnnnnnnnnnnnnnnnnnnnnnnnnnnnnnnnnnnnnnnnnnnnnnnnnnnnnnnnnnnnnnnnnnnnnnnnnnnnnnnnnnnnnnnnnnnnnnnnnnnnnnnnnnnnnnnnnnnnnnnnnnnnnnnnnnnnnnnnnnnnnnnnnnnnnnnnnnnnnnnnnnnnnnnnnnnnnnnnnnnnnnnnnnnnnnnnnnnnnnnnnnnnnnnnnnnnnnnnnnnnnnnnnnnnnnnnnnnnnnnnnnnnnnnnnnnnnnnnnnnnnnnnnnnnnnnnnnnnnnnnnnnnnnnnnnnnnnnnnnnnnnnnnnnnnnnnnnnnnnnnnnnnnnnnnnnnnnnnnnnnnnnnnnnnnnnnnnnnnnnnnnnnnnnnnnnnnnnnnnnnnnnnnnnnnnnnnnnnnnnnnnnnnnnnnnnnnnnnnnnnnnnnnnnnnnnnnnnnnnnnnnnnnnnnnnnnnnnnnnnnnnnnnnnnnnnnnnnnnnnnnnnnnnnnnnnnnnnnnnnnnnnnnnnnnnnnnnnnnnnnnnnnnnnnnnnnnnnnnnnnnnnnnnnnnnnnnnnnnnnnnnnnnnnnnnnnnnnnnnnnnnnnnnnnnnnnnnnnnnnnnnnnnnnnnnnnnnnnnnnnnnnnnnnnnnnnnnnnnnnnnnnnnnnnnnnnnnnnnnnnnnnnnnnnnnnnnnnnnnnnnnnnnnnnnnnnnnnnnnnnnnnnnnnnnnnnnnnnnnnnnnnnnnnnnnnnnnnnnnnnnnnnnnnnnnnnnnnnnnnnnnnnnnnnnnnnnnnnnnnnnnnnnnnnnnnnnnnnnnnnnnnnnnnnnnnnnnnnnnnnnnnnnnnnnnnnnnnnnnnnnnnnnnnnnnnnnnnnnnnnnnnnnnnnnnnnnnnnnnnnnnnnnnnnnnnnnnnnnnnnnnnnnnnnnnnnnnnnnnnnnnnnnnnnnnnnnnnnnnnnnnnnnnnnnnnnnnnnnnnnnnnnnnnnnnnnnnnnnnnnnnnnnnnnnnnnnnnnnnnnnnnnnnnnnnnnnnnnnnnnnnnnnnnnnnnnnnnnnnnnnnnnnnnnnnnnnnnnnnnnnnnnnnnnnnnnnnnnnnnnnnnnnnnnnnnnnnnnnnnnnnnnnnnnnnnnnnnnnnnnnnnnnnnnnnnnnnnnnnnnnnnnnnnnnnnnnnnnnnnnnnnnnnnnnnnnnnnnnnnnnnnnnnnnnnnnnnnnnnnnnnnnnnnnnnnnnnnnnnnnnnnnnnnnnnnnnnnnnnnnnnnnnnnnnnnnnnnnnnnnnnnnnnnnnnnnnnnnnnnnnnnnnnnnnnnnnnnnnnnnnnnnnnnnnnnnnnnnnnnnnnnnnnnnnnnnnnnnnnnnnnnnnnnnnnnnnnnnnnnnnnnnnnnnnnnnnnnnnnnnnnnnnnnnnnnnnnnnnnnnnnnnnnnnnnnnnnnnnnnnnnnnnnnnnnnnnnnnnnnnnnnnnnnnnnnnnnnnnnnnnnnnnnnnnnnnnnnnnnnnnnnnnnnnnnnnnnnnnnnnnnnnnnnnnnnnnnnnnnnnnnnnnnnnnnnnnnnnnnnnnnnnnnnnnnnnnnnnnnnnnnnnnnnnnnnnnnnnnnnnnnnnnnnnnnnnnnnnnnnnnnnnnnnnnnnnnnnnnnnnnnnnnnnnnnnnnnnnnnnnnnnnnnnnnnnnnnnnnnnnnnnnnnnnnnnnnnnnnnnnnnnnnnnnnnnnnnnnnnnnnnnnnnnnnnnnnnnnnnnnnnnnnnnnnnnnnnnnnnnnnnnnnnnnnnnnnnnnnnnnnnnnnnnnnnnnnnnnnnnnnnnnnnnnnnnnnnnnnnnnnnnnnnnnnnnnnnnnnnnnnnnnnnnnnnnnnnnnnnnnnnnnnnnnnnnnnnnnnnnnnnnnnnnnnnnnnnnnnnnnnnnnnnnnnnnnnnnnnnnnnnnnnnnnnnnnnnnnnnnnnnnnnnnnnnnnnnnnnnnnnnnnnnnnnnnnnnnnnnnnnnnnnnnnnnnnnnnnnnnnnnnnnnnnnnnnnnnnnnnnnnnnnnnnnnnnnnnnnnnnnnnnnnnnnnnnnnnnnnnnnnnnnnnnnnnnnnnnnnnnnnnnnnnnnnnnnnnnnnnnnnnnnnnnnnnnnnnnnnnnnnnnnnnnnnnnnnnnnnnnnnnnnnnnnnnnnnnnnnnnnnnnnnnnnnnnnnnnnnnnnnnnnnnnnnnnnnnnnnnnnnnnnnnnnnnnnnnnnnnnnnnnnnnnnnnnnnnnnnnnnnnnnnnnnnnnnnnnnnnnnnnnnnnnnnnnnnnnnnnnnnnnnnnnnnnnnnnnnnnnnnnnnnnnnnnnnnnnnnnnnnnnnnnnnnnnnnnnnnnnnnnnnnnnnnnnnnnnnnnnnnnnnnnnnnnnnnnnnnnnnnnnnnnnnnnnnnnnnnnnnnnnnnnnnnnnnnnnnnnnnnnnnnnnnnnnnnnnnnnnnnnnnnnnnnnnnnnnnnnnnnnnnnnnnnnnnnnnnnnnnnnnnnnnnnnnnnnnnnnnnnnnnnnnnnnnnnnnnnnnnnnnnnnnnnnnnnnnnnnnnnnnnnnnnnnnnnnnnnnnnnnnnnnnnnnnnnnnnnnnnnnnnnnnnnnnnnnnnnnnnnnnnnnnnnnnnnnnnnnnnnnnnnnnnnnnnnnnnnnnnnnnnnnnnnnnnnnnnnnnnnnnnnnnnnnnnnnnnnnnnnnnnnnnnnnnnnnnnnnnnnnnnnnnnnnnnnnnnnnnnnnnnnnnnnnnnnnnnnnnnnnnnnnnnnnnnnnnnnnnnnnnnnnnnnnnnnnnnnnnnnnnnnnnnnnnnnnnnnnnnnnnnnnnnnnnnnnnnnnnnnnnnnnnnnnnnnnnnnnnnnnnnnnnnnnnnnnnnnnnnnnnnnnnnnnnnnnnnnnnnnnnnnnnnnnnnnnnnnnnnnnnnnnnnnnnnnnnnnnnnnnnnnnnnnnnnnnnnnnnnnnnnnnnnnnnnnnnnnnnnnnnnnnnnnnnnnnnnnnnnnnnnnnnnnnnnnnnnnnnnnnnnnnnnnnnnnnnnnnnnnnnnnnnnnnnnnnnnnnnnnnnnnnnnnnnnnnnnnnnnnnnnnnnnnnnnnnnnnnnnnnnnnnnnnnnnnnnnnnnnnnnnnnnnnnnnnnnnnnnnnnnnnnnnnnnnnnnnnnnnnnnnnnnnnnnnnnnnnnnnnnnnnnnnnnnnnnnnnnnnnnnnnnnnnnnnnnnnnnnnnnnnnnnnnnnnnnnnnnnnnnnnnnnnnnnnnnnnnnnnnnnnnnnnnnnnnnnnnnnnnnnnnnnnnnnnnnnnnnnnnnnnnnnnnnnnnnnnnnnnnnnnnnnnnnnnnnnnnnnnnnnnnnnnnnnnnnnnnnnnnnnnnnnnnnnnnnnnnnnnnnnnnnnnnnnnnnnnnnnnnnnnnnnnnnnnnnnnnnnnnnnnnnnnnnnnnnnnnnnnnnnnnnnnnnnnnnnnnnnnnnnnnnnnnnnnnnnnnnnnnnnnnnnnnnnnnnnnnnnnnnnnnnnnnnnnnnnnnnnnnnnnnnnnnnnnnnnnnnnnnnnnnnnnnnnnnnnnnnnnnnnnnnnnnnnnnnnnnnnnnnnnnnnnnnnnnnnnnnnnnnnnnnnnnnnnnnnnnnnnnnnnnnnnnnnnnnnnnnnnnnnnnnnnnnnnnnnnnnnnnnnnnnnnnnnnnnnnnnnnnnnnnnnnnnnnnnnnnnnnnnnnnnnnnnnnnnnnnnnnnnnnnnnnnnnnnnnnnnnnnnnnnnnnnnnnnnnnnnnnnnnnnnnnnnnnnnnnnnnnnnnnnnnnnnnnnnnnnnnnnnnnnnnnnnnnnnnnnnnnnnnnnnnnnnnnnnnnnnnnnnnnnnnnnnnnnnnnnnnnnnnnnnnnnnnnnnnnnnnnnnnnnnnnnnnnnnnnnnnnnnnnnnnnnnnnnnnnnnnnnnnnnnnnnnnnnnnnnnnnnnnnnnnnnnnnnnnnnnnnnnnnnnnnnnnnnnnnnnnnnnnnnnnnnnnnnnnnnnnnnnnnnnnnnnnnnnnnnnnnnnnnnnnnnnnnnnnnnnnnnnnnnnnnnnnnnnnnnnnnnnnnnnnnnnnnnnnnnnnnnnnnnnnnnnnnnnnnnnnnnnnnnnnnnnnnnnnnnnnnnnnnnnnnnnnnnnnnnnnnnnnnnnnnnnnnnnnnnnnnnnnnnnnnnnnnnnnnnnnnnnnnnnnnnnnnnnnnnnnnnnnnnnnnnnnnnnnnnnnnnnnnnnnnnnnnnnnnnnnnnnnnnnnnnnnnnnnnnnnnnnnnnnnnnnnnnnnnnnnnnnnnnnnnnnnnnnnnnnnnnnnnnnnnnnnnnnnnnnnnnnnnnnnnnnnnnnnnnnnnnnnnnnnnnnnnnnnnnnnnnnnnnnnnnnnnnnnnnnnnnnnnnnnnnnnnnnnnnnnnnnnnnnnnnnnnnnnnnnnnnnnnnnnnnnnnnnnnnnnnnnnnnnnnnnnnnnnnnnnnnnnnnnnnnnnnnnnnnnnnnnnnnnnnnnnnnnnnnnnnnnnnnnnnnnnnnnnnnnnnnnnnnnnnnnnnnnnnnnnnnnnnnnnnnnnnnnnnnnnnnnnnnnnnnnnnnnnnnnnnnnnnnnnnnnnnnnnnnnnnnnnnnnnnnnnnnnnnnnnnnnnnnnnnnnnnnnnnnnnnnnnnnnnnnnnnnnnnnnnnnnnnnnnnnnnnnnnnnnnnnnnnnnnnnnnnnnnnnnnnnnnnnnnnnnnnnnnnnnnnnnnnnnnnnnnnnnnnnnnnnnnnnnnnnnnnnnnnnnnnnnnnnnnnnnnnnnnnnnnnnnnnnnnnnnnnnnnnnnnnnnnnnnnnnnnnnnnnnnnnnnnnnnnnnnnnnnnnnnnnnnnnnnnnnnnnnnnnnnnnnnnnnnnnnnnnnnnnnnnnnnnnnnnnnnnnnnnnnnnnnnnnnnnnnnnnnnnnnnnnnnnnnnnnnnnnnnnnnnnnnnnnnnnnnnnnnnnnnnnnnnnnnnnnnnnnnnnnnnnnnnnnnnnnnnnnnnnnnnnnnnnnnnnnnnnnnnnnnnnnnnnnnnnnnnnnnnnnnnnnnnnnnnnnnnnnnnnnnnnnnnnnnnnnnnnnnnnnnnnnnnnnnnnnnnnnnnnnnnnnnnnnnnnnnnnnnnnnnnnnnnnnnnnnnnnnnnnnnnnnnnnnnnnnnnnnnnnnnnnnnnnnnnnnnnnnnnnnnnnnnnnnnnnnnnnnnnnnnnnnnnnnnnnnnnnnnnnnnnnnnnnnnnnnnnnnnnnnnnnnnnnnnnnnnnnnnnnnnnnnnnnnnnnnnnnnnnnnnnnnnnnnnnnnnnnnnnnnnnnnnnnnnnnnnnnnnnnnnnnnnnnnnnnnnnnnnnnnnnnnnnnnnnnnnnnnnnnnnnnnnnnnnnnnnnnnnnnnnnnnnnnnnnnnnnnnnnnnnnnnnnnnnnnnnnnnnnnnnnnnnnnnnnnnnnnnnnnnnnnnnnnnnnnnnnnnnnnnnnnnnnnnnnnnnnnnnnnnnnnnnnnnnnnnnnnnnnnnnnnnnnnnnnnnnnnnnnnnnnnnnnnnnnnnnnnnnnnnnnnnnnnnnnnnnnnnnnnnnnnnnnnnnnnnnnnnnnnnnnnnnnnnnnnnnnnnnnnnnnnnnnnnnnnnnnnnnnnnnnnnnnnnnnnnnnnnnnnnnnnnnnnnnnnnnnnnnnnnnnnnnnnnnnnnnnnnnnnnnnnnnnnnnnnnnnnnnnnnnnnnnnnnnnnnnnnnnnnnnnnnnnnnnnnnnnnnnnnnnnnnnnnnnnnnnnnnnnnnnnnnnnnnnnnnnnnnnnnnnnnnnnnnnnnnnnnnnnnnnnnnnnnnnnnnnnnnnnnnnnnnnnnnnnnnnnnnnnnnnnnnnnnnnnnnnnnnnnnnnnnnnnnnnnnnnnnnnnnnnnnnnnnnnnnnnnnnnnnnnnnnnnnnnnnnnnnnnnnnnnnnnnnnnnnnnnnnnnnnnnnnnnnnnnnnnnnnnnnnnnnnnnnnnnnnnnnnnnnnnnnnnnnnnnnnnnnnnnnnnnnnnnnnnnnnnnnnnnnnnnnnnnnnnnnnnnnnnnnnnnnnnnnnnnnnnnnnnnnnnnnnnnnnnnnnnnnnnnnnnnnnnnnnnnnnnnnnnnnnnnnnnnnnnnnnnnnnnnnnnnnnnnnnnnnnnnnnnnnnnnnnnnnnnnnnnnnnnnnnnnnnnnnnnnnnnnnnnnnnnnnnnnnnnnnnnnnnnnnnnnnnnnnnnnnnnnnnnnnnnnnnnnnnnnnnnnnnnnnnnnnnnnnnnnnnnnnnnnnnnnnnnnnnnnnnnnnnnnnnnnnnnnnnnnnnnnnnnnnnnnnnnnnnnnnnnnnnnnnnnnnnnnnnnnnnnnnnnnnnnnnnnnnnnnnnnnnnnnnnnnnnnnnnnnnnnnnnnnnnnnnnnnnnnnnnnnnnnnnnnnnnnnnnnnnnnnnnnnnnnnnnnnnnnnnnnnnnnnnnnnnnnnnnnnnnnnnnnnnnnnnnnnnnnnnnnnnnnnnnnnnnnnnnnnnnnnnnnnnnnnnnnnnnnnnnnnnnnnnnnnnnnnnnnnnnnnnnnnnnnnnnnnnnnnnnnnnnnnnnnnnnnnnnnnnnnnnnnnnnnnnnnnnnnnnnnnnnnnnnnnnnnnnnnnnnnnnnnnnnnnnnnnnnnnnnnnnnnnnnnnnnnnnnnnnnnnnnnnnnnnnnnnnnnnnnnnnnnnnnnnnnnnnnnnnnnnnnnnnnnnnnnnnnnnnnnnnnnnnnnnnnnnnnnnnnnnnnnnnnnnnnnnnnnnnnnnnnnnnnnnnnnnnnnnnnnnnnnnnnnnnnnnnnnnnnnnnnnnnnnnnnnnnnnnnnnnnnnnnnnnnnnnnnnnnnnnnnnnnnnnnnnnnnnnnnnnnnnnnnnnnnnnnnnnnnnnnnnnnnnnnnnnnnnnnnnnnnnnnnnnnnnnnnnnnnnnnnnnnnnnnnnnnnnnnnnnnnnnnnnnnnnnnnnnnnnnnnnnnnnnnnnnnnnnnnnnnnnnnnnnnnnnnnnnnnnnnnnnnnnnnnnnnnnnnnnnnnnnnnnnnnnnnnnnnnnnnnnnnnnnnnnnnnnnnnnnnnnnnnnnnnnnnnnnnnnnnnnnnnnnnnnnnnnnnnnnnnnnnnnnnnnnnnnnnnnnnnnnnnnnnnnnnnnnnnnnnnnnnnnnnnnnnnnnnnnnnnnnnnnnnnnnnnnnnnnnnnnnnnnnnnnnnnnnnnnnnnnnnnnnnnnnnnnnnnnnnnnnnnnnnnnnnnnnnnnnnnnnnnnnnnnnnnnnnnnnnnnnnnnnnnnnnnnnnnnnnnnnnnnnnnnnnnnnnnnnnnnnnnnnnnnnnnnnnnnnnnnnnnnnnnnnnnnnnnnnnnnnnnnnnnnnnnnnnnnnnnnnnnnnnnnnnnnnnnnnnnnnnnnnnnnnnnnnnnnnnnnnnnnnnnnnnnnnnnnnnnnnnnnnnnnnnnnnnnnnnnnnnnnnnnnnnnnnnnnnnnnnnnnnnnnnnnnnnnnnnnnnnnnnnnnnnnnnnnnnnnnnnnnnnnnnnnnnnnnnnnnnnnnnnnnnnnnnnnnnnnnnnnnnnnnnnnnnnnnnnnnnnnnnnnnnnnnnnnnnnnnnnnnnnnnnnnnnnnnnnnnnnnnnnnnnnnnnnnnnnnnnnnnnnnnnnnnnnnnnnnnnnnnnnnnnnnnnnnnnnnnnnnnnnnnnnnnnnnnnnnnnnnnnnnnnnnnnnnnnnnnnnnnnnnnnnnnnnnnnnnnnnnnnnnnnnnnnnnnnnnnnnnnnnnnnnnnnnnnnnnnnnnnnnnnnnnnnnnnnnnnnnnnnnnnnnnnnnnnnnnnnnnnnnnnnnnnnnnnnnnnnnnnnnnnnnnnnnnnnnnnnnnnnnnnnnnnnnnnnnnnnnnnnnnnnnnnnnnnnnnnnnnnnnnnnnnnnnnnnnnnnnnnnnnnnnnnnnnnnnnnnnnnnnnnnnnnnnnnnnnnnnnnnnnnnnnnnnnnnnnnnnnnnnnnnnnnnnnnnnnnnnnnnnnnnnnnnnnnnnnnnnnnnnnnnnnnnnnnnnnnnnnnnnnnnnnnnnnnnnnnnnnnnnnnnnnnnnnnnnnnnnnnnnnnnnnnnnnnnnnnnnnnnnnnnnnnnnnnnnnnnnnnnnnnnnnnnnnnnnnnnnnnnnnnnnnnnnnnnnnnnnnnnnnnnnnnnnnnnnnnnnnnnnnnnnnnnnnnnnnnnnnnnnnnnnnnnnnnnnnnnnnnnnnnnnnnnnnnnnnnnnnnnnnnnnnnnnnnnnnnnnnnnnnnnnnnnnnnnnnnnnnnnnnnnnnnnnnnnnnnnnnnnnnnnnnnnnnnnnnnnnnnnnnnnnnnnnnnnnnnnnnnnnnnnnnnnnnnnnnnnnnnnnnnnnnnnnnnnnnnnnnnnnnnnnnnnnnnnnnnnnnnnnnnnnnnnnnnnnnnnnnnnnnnnnnnnnnnnnnnnnnnnnnnnnnnnnnnnnnnnnnnnnnnnnnnnnnnnnnnnnnnnnnnnnnnnnnnnnnnnnnnnnnnnnnnnnnnnnnnnnnnnnnnnnnnnnnnnnnnnnnnnnnnnnnnnnnnnnnnnnnnnnnnnnnnnnnnnnnnnnnnnnnnnnnnnnnnnnnnnnnnnnnnnnnnnnnnnnnnnnnnnnnnnnnnnnnnnnnnnnnnnnnnnnnnnnnnnnnnnnnnnnnnnnnnnnnnnnnnnnnnnnnnnnnnnnnnnnnnnnnnnnnnnnnnnnnnnnnnnnnnnnnnnnnnnnnnnnnnnnnnnnnnnnnnnnnnnnnnnnnnnnnnnnnnnnnnnnnnnnnnnnnnnnnnnnnnnnnnnnnnnnnnnnnnnnnnnnnnnnnnnnnnnnnnnnnnnnnnnnnnnnnnnnnnnnnnnnnnnnnnnnnnnnnnnnnnnnnnnnnnnnnnnnnnnnnnnnnnnnnnnnnnnnnnnnnnnnnnnnnnnnnnnnnnnnnnnnnnnnnnnnnnnnnnnnnnnnnnnnnnnnnnnnnnnnnnnnnnnnnnnnnnnnnnnnnnnnnnnnnnnnnnnnnnnnnnnnnnnnnnnnnnnnnnnnnnnnnnnnnnnnnnnnnnnnnnnnnnnnnnnnnnnnnnnnnnnnnnnnnnnnnnnnnnnnnnnnnnnnnnnnnnnnnnnnnnnnnnnnnnnnnnnnnnnnnnnnnnnnnnnnnnnnnnnnnnnnnnnnnnnnnnnnnnnnnnnnnnnnnnnnnnnnnnnnnnnnnnnnnnnnnnnnnnnnnnnnnnnnnnnnnnnnnnnnnnnnnnnnnnnnnnnnnnnnnnnnnnnnnnnnnnnnnnnnnnnnnnnnnnnnnnnnnnnnnnnnnnnnnnnnnnnnnnnnnnnnnnnnnnnnnnnnnnnnnnnnnnnnnnnnnnnnnnnnnnnnnnnnnnnnnnnnnnnnnnnnnnnnnnnnnnnnnnnnnnnnnnnnnnnnnnnnnnnnnnnnnnnnnnnnnnnnnnnnnnnnnnnnnnnnnnnnnnnnnnnnnnnnnnnnnnnnnnnnnnnnnnnnnnnnnnnnnnnnnnnnnnnnnnnnnnnnnnnnnnnnnnnnnnnnnnnnnnnnnnnnnnnnnnnnnnnnnnnnnnnnnnnnnnnnnnnnnnnnnnnnnnnnnnnnnnnnnnnnnnnnnnnnnnnnnnnnnnnnnnnnnnnnnnnnnnnnnnnnnnnnnnnnnnnnnnnnnnnnnnnnnnnnnnnnnnnnnnnnnnnnnnnnnnnnnnnnnnnnnnnnnnnnnnnnnnnnnnnnnnnnnnnnnnnnnnnnnnnnnnnnnnnnnnnnnnnnnnnnnnnnnnnnnnnnnnnnnnnnnnnnnnnnnnnnnnnnnnnnnnnnnnnnnnnnnnnnnnnnnnnnnnnnnnnnnnnnnnnnnnnnnnnnnnnnnnnnnnnnnnnnnnnnnnnnnnnnnnnnnnnnnnnnnnnnnnnnnnnnnnnnnnnnnnnnnnnnnnnnnnnnnnnnnnnnnnnnnnnnnnnnnnnnnnnnnnnnnnnnnnnnnnnnnnnnnnnnnnnnnnnnnnnnnnnnnnnnnnnnnnnnnnnnnnnnnnnnnnnnnnnnnnnnnnnnnnnnnnnnnnnnnnnnnnnnnnnnnnnnnnnnnnnnnnnnnnnnnnnnnnnnnnnnnnnnnnnnnnnnnnnnnnnnnnnnnnnnnnnnnnnnnnnnnnnnnnnnnnnnnnnnnnnnnnnnnnnnnnnnnnnnnnnnnnnnnnnnnnnnnnnnnnnnnnnnnnnnnnnnnnnnnnnnnnnnnnnnnnnnnnnnnnnnnnnnnnnnnnnnnnnnnnnnnnnnnnnnnnnnnnnnnnnnnnnnnnnnnnnnnnnnnnnnnnnnnnnnnnnnnnnnnnnnnnnnnnnnnnnnnnnnnnnnnnnnnnnnnnnnnnnnnnnnnnnnnnnnnnnnnnnnnnnnnnnnnnnnnnnnnnnnnnnnnnnnnnnnnnnnnnnnnnnnnnnnnnnnnnnnnnnnnnnnnnnnnnnnnnnnnnnnnnnnnnnnnnnnnnnnnnnnnnnnnnnnnnnnnnnnnnnnnnnnnnnnnnnnnnnnnnnnnnnnnnnnnnnnnnnnnnnnnnnnnnnnnnnnnnnnnnnnnnnnnnnnnnnnnnnnnnnnnnnnnnnnnnnnnnnnnnnnnnnnnnnnnnnnnnnnnnnnnnnnnnnnnnnnnnnnnnnnnnnnnnnnnnnnnnnnnnnnnnnnnnnnnnnnnnnnnnnnnnnnnnnnnnnnnnnnnnnnnnnnnnnnnnnnnnnnnnnnnnnnnnnnnnnnnnnnnnnnnnnnnnnnnnnnnnnnnnnnnnnnnnnnnnnnnnnnnnnnnnnnnnnnnnnnnnnnnnnnnnnnnnnnnnnnnnnnnnnnnnnnnnnnnnnnnnnnnnnnnnnnnnnnnnnnnnnnnnnnnnnnnnnnnnnnnnnnnnnnnnnnnnnnnnnnnnnnnnnnnnnnnnnnnnnnnnnnnnnnnnnnnnnnnnnnnnnnnnnnnnnnnnnnnnnnnnnnnnnnnnnnnnnnnnnnnnnnnnnnnnnnnnnnnnnnnnnnnnnnnnnnnnnnnnnnnnnnnnnnnnnnnnnnnnnnnnnnnnnnnnnnnnnnnnnnnnnnnnnnnnnnnnnnnnnnnnnnnnnnnnnnnnnnnnnnnnnnnnnnnnnnnnnnnnnnnnnnnnnnnnnnnnnnnnnnnnnnnnnnnnnnnnnnnnnnnnnnnnnnnnnnnnnnnnnnnnnnnnnnnnnnnnnnnnnnnnnnnnnnnnnnnnnnnnnnnnnnnnnnnnnnnnnnnnnnnnnnnnnnnnnnnnnnnnnnnnnnnnnnnnnnnnnnnnnnnnnnnnnnnnnnnnnnnnnnnnnnnnnnnnnnnnnnnnnnnnnnnnnnnnnnnnnnnnnnnnnnnnnnnnnnnnnnnnnnnnnnnnnnnnnnnnnnnnnnnnnnnnnnnnnnnnnnnnnnnnnnnnnnnnnnnnnnnnnnnnnnnnnnnnnnnnnnnnnnnnnnnnnnnnnnnnnnnnnnnnnnnnnnnnnnnnnnnnnnnnnnnnnnnnnnnnnnnnnnnnnnnnnnnnnnnnnnnnnnnnnnnnnnnnnnnnnnnnnnnnnnnnnnnnnnnnnnnnnnnnnnnnnnnnnnnnnnnnnnnnnnnnnnnnnnnnnnnnnnnnnnnnnnnnnnnnnnnnnnnnnnnnnnnnnnnnnnnnnnnnnnnnnnnnnnnnnnnnnnnnnnnnnnnnnnnnnnnnnnnnnnnnnnnnnnnnnnnnnnnnnnnnnnnnnnnnnnnnnnnnnnnnnnnnnnnnnnnnnnnnnnnnnnnnnnnnnnnnnnnnnnnnnnnnnnnnnnnnnnnnnnnnnnnnnnnnnnnnnnnnnnnnnnnnnnnnnnnnnnnnnnnnnnnnnnnnnnnnnnnnnnnnnnnnnnnnnnnnnnnnnnnnnnnnnnnnnnnnnnnnnnnnnnnnnnnnnnnnnnnnnnnnnnnnnnnnnnnnnnnnnnnnnnnnnnnnnnnnnnnnnnnnnnnnnnnnnnnnnnnnnnnnnnnnnnnnnnnnnnnnnnnnnnnnnnnnnnnnnnnnnnnnnnnnnnnnnnnnnnnnnnnnnnnnnnnnnnnnnnnnnnnnnnnnnnnnnnnnnnnnnnnnnnnnnnnnnnnnnnnnnnnnnnnnnnnnnnnnnnnnnnnnnnnnnnnnnnnnnnnnnnnnnnnnnnnnnnnnnnnnnnnnnnnnnnnnnnnnnnnnnnnnnnnnnnnnnnnnnnnnnnnnnnnnnnnnnnnnnnnnnnnnnnnnnnnnnnnnnnnnnnnnnnnnnnnnnnnnnnnnnnnnnnnnnnnnnnnnnnnnnnnnnnnnnnnnnnnnnnnnnnnnnnnnnnnnnnnnnnnnnnnnnnnnnnnnnnnnnnnnnnnnnnnnnnnnnnnnnnnnnnnnnnnnnnnnnnnnnnnnnnnnnnnnnnnnnnnnnnnnnnnnnnnnnnnnnnnnnnnnnnnnnnnnnnnnnnnnnnnnnnnnnnnnnnnnnnnnnnnnnnnnnnnnnnnnnnnnnnnnnnnnnnnnnnnnnnnnnnnnnnnnnnnnnnnnnnnnnnnnnnnnnnnnnnnnnnnnnnnnnnnnnnnnnnnnnnnnnnnnnnnnnnnnnnnnnnnnnnnnnnnnnnnnnnnnnnnnnnnnnnnnnnnnnnnnnnnnnnnnnnnnnnnnnnnnnnnnnnnnnnnnnnnnnnnnnnnnnnnnnnnnnnnnnnnnnnnnnnnnnnnnnnnnnnnnnnnnnnnnnnnnnnnnnnnnnnnnnnnnnnnnnnnnnnnnnnnnnnnnnnnnnnnnnnnnnnnnnnnnnnnnnnnnnnnnnnnnnnnnnnnnnnnnnnnnnnnnnnnnnnnnnnnnnnnnnnnnnnnnnnnnnnnnnnnnnnnnnnnnnnnnnnnnnnnnnnnnnnnnnnnnnnnnnnnnnnnnnnnnnnnnnnnnnnnnnnnnnnnnnnnnnnnnnnnnnnnnnnnnnnnnnnnnnnnnnnnnnnnnnnnnnnnnnnnnnnnnnnnnnnnnnnnnnnnnnnnnnnnnnnnnnnnnnnnnnnnnnnnnnnnnnnnnnnnnnnnnnnnnnnnnnnnnnnnnnnnnnnnnnnnnnnnnnnnnnnnnnnnnnnnnnnnnnnnnnnnnnnnnnnnnnnnnnnnnnnnnnnnnnnnnnnnnnnnnnnnnnnnnnnnnnnnnnnnnnnnnnnnnnnnnnnnnnnnnnnnnnnnnnnnnnnnnnnnnnnnnnnnnnnnnnnnnnnnnnnnnnnnnnnnnnnnnnnnnnnnnnnnnnnnnnnnnnnnnnnnnnnnnnnnnnnnnnnnnnnnnnnnnnnnnnnnnnnnnnnnnnnnnnnnnnnnnnnnnnnnnnnnnnnnnnnnnnnnnnnnnnnnnnnnnnnnnnnnnnnnnnnnnnnnnnnnnnnnnnnnnnnnnnnnnnnnnnnnnnnnnnnnnnnnnnnnnnnnnnnnnnnnnnnnnnnnnnnnnnnnnnnnnnnnnnnnnnnnnnnnnnnnnnnnnnnnnnnnnnnnnnnnnnnnnnnnnnnnnnnnnnnnnnnnnnnnnnnnnnnnnnnnnnnnnnnnnnnnnnnnnnnnnnnnnnnnnnnnnnnnnnnnnnnnnnnnnnnnnnnnnnnnnnnnnnnnnnnnnnnnnnnnnnnnnnnnnnnnnnnnnnnnnnnnnnnnnnnnnnnnnnnnnnnnnnnnnnnnnnnnnnnnnnnnnnnnnnnnnnnnnnnnnnnnnnnnnnnnnnnnnnnnnnnnnnnnnnnnnnnnnnnnnnnnnnnnnnnnnnnnnnnnnnnnnnnnnnnnnnnnnnnnnnnnnnnnnnnnnnnnnnnnnnnnnnnnnnnnnnnnnnnnnnnnnnnnnnnnnnnnnnnnnnnnnnnnnnnnnnnnnnnnnnnnnnnnnnnnnnnnnnnnnnnnnnnnnnnnnnnnnnnnnnnnnnnnnnnnnnnnnnnnnnnnnnnnnnnnnnnnnnnnnnnnnnnnnnnnnnnnnnnnnnnnnnnnnnnnnnnnnnnnnnnnnnnnnnnnnnnnnnnnnnnnnnnnnnnnnnnnnnnnnnnnnnnnnnnnnnnnnnnnnnnnnnnnnnnnnnnnnnnnnnnnnnnnnnnnnnnnnnnnnnnnnnnnnnnnnnnnnnnnnnnnnnnnnnnnnnnnnnnnnnnnnnnnnnnnnnnnnnnnnnnnnnnnnnnnnnnnnnnnnnnnnnnnnnnnnnnnnnnnnnnnnnnnnnnnnnnnnnnnnnnnnnnnnnnnnnnnnnnnnnnnnnnnnnnnnnnnnnnnnnnnnnnnnnnnnnnnnnnnnnnnnnnnnnnnnnnnnnnnnnnnnnnnnnnnnnnnnnnnnnnnnnnnnnnnnnnnnnnnnnnnnnnnnnnnnnnnnnnnnnnnnnnnnnnnnnnnnnnnnnnnnnnnnnnnnnnnnnnnnnnnnnnnnnnnnnnnnnnnnnnnnnnnnnnnnnnnnnnnnnnnnnnnnnnnnnnnnnnnnnnnnnnnnnnnnnnnnnnnnnnnnnnnnnnnnnnnnnnnnnnnnnnnnnnnnnnnnnnnnnnnnnnnnnnnnnnnnnnnnnnnnnnnnnnnnnnnnnnnnnnnnnnnnnnnnnnnnnnnnnnnnnnnnnnnnnnnnnnnnnnnnnnnnnnnnnnnnnnnnnnnnnnnnnnnnnnnnnnnnnnnnnnnnnnnnnnnnnnnnnnnnnnnnnnnnnnnnnnnnnnnnnnnnnnnnnnnnnnnnnnnnnnnnnnnnnnnnnnnnnnnnnnnnnnnnnnnnnnnnnnnnnnnnnnnnnnnnnnnnnnnnnnnnnnnnnnnnnnnnnnnnnnnnnnnnnnnnnnnnnnnnnnnnnnnnnnnnnnnnnnnnnnnnnnnnnnnnnnnnnnnnnnnnnnnnnnnnnnnnnnnnnnnnnnnnnnnnnnnnnnnnnnnnnnnnnnnnnnnnnnnnnnnnnnnnnnnnnnnnnnnnnnnnnnnnnnnnnnnnnnnnnnnnnnnnnnnnnnnnnnnnnnnnnnnnnnnnnnnnnnnnnnnnnnnnnnnnnnnnnnnnnnnnnnnnnnnnnnnnnnnnnnnnnnnnnnnnnnnnnnnnnnnnnnnnnnnnnnnnnnnnnnnnnnnnnnnnnnnnnnnnnnnnnnnnnnnnnnnnnnnnnnnnnnnnnnnnnnnnnnnnnnnnnnnnnnnnnnnnnnnnnnnnnnnnnnnnnnnnnnnnnnnnnnnnnnnnnnnnnnnnnnnnnnnnnnnnnnnnnnnnnnnnnnnnnnnnnnnnnnnnnnnnnnnnnnnnnnnnnnnnnnnnnnnnnnnnnnnnnnnnnnnnnnnnnnnnnnnnnnnnnnnnnnnnnnnnnnnnnnnnnnnnnnnnnnnnnnnnnnnnnnnnnnnnnnnnnnnnnnnnnnnnnnnnnnnnnnnnnnnnnnnnnnnnnnnnnnnnnnnnnnnnnnnnnnnnnnnnnnnnnnnnnnnnnnnnnnnnnnnnnnnnnnnnnnnnnnnnnnnnnnnnnnnnnnnnnnnnnnnnnnnnnnnnnnnnnnnnnnnnnnnnnnnnnnnnnnnnnnnnnnnnnnnnnnnnnnnnnnnnnnnnnnnnnnnnnnnnnnnnnnnnnnnnnnnnnnnnnnnnnnnnnnnnnnnnnnnnnnnnnnnnnnnnnnnnnnnnnnnnnnnnnnnnnnnnnnnnnnnnnnnnnnnnnnnnnnnnnnnnnnnnnnnnnnnnnnnnnnnnnnnnnnnnnnnnnnnnnnnnnnnnnnnnnnnnnnnnnnnnnnnnnnnnnnnnnnnnnnnnnnnnnnnnnnnnnnnnnnnnnnnnnnnnnnnnnnnnnnnnnnnnnnnnnnnnnnnnnnnnnnnnnnnnnnnnnnnnnnnnnnnnnnnnnnnnnnnnnnnnnnnnnnnnnnnnnnnnnnnnnnnnnnnnnnnnnnnnnnnnnnnnnnnnnnnnnnnnnnnnnnnnnnnnnnnnnnnnnnnnnnnnnnnnnnnnnnnnnnnnnnnnnnnnnnnnnnnnnnnnnnnnnnnnnnnnnnnnnnnnnnnnnnnnnnnnnnnnnnnnnnnnnnnnnnnnnnnnnnnnnnnnnnnnnnnnnnnnnnnnnnnnnnnnnnnnnnnnnnnnnnnnnnnnnnnnnnnnnnnnnnnnnnnnnnnnnnnnnnnnnnnnnnnnnnnnnnnnnnnnnnnnnnnnnnnnnnnnnnnnnnnnnnnnnnnnnnnnnnnnnnnnnnnnnnnnnnnnnnnnnnnnnnnnnnnnnnnnnnnnnnnnnnnnnnnnnnnnnnnnnnnnnnnnnnnnnnnnnnnnnnnnnnnnnnnnnnnnnnnnnnnnnnnnnnnnnnnnnnnnnnnnnnnnnnnnnnnnnnnnnnnnnnnnnnnnnnnnnnnnnnnnnnnnnnnnnnnnnnnnnnnnnnnnnnnnnnnnnnnnnnnnnnnnnnnnnnnnnnnnnnnnnnnnnnnnnnnnnnnnnnnnnnnnnnnnnnnnnnnnnnnnnnnnnnnnnnnnnnnnnnnnnnnnnnnnnnnnnnnnnnnnnnnnnnnnnnnnnnnnnnnnnnnnnnnnnnnnnnnnnnnnnnnnnnnnnnnnnnnnnnnnnnnnnnnnnnnnnnnnnnnnnnnnnnnnnnnnnnnnnnnnnnnnnnnnnnnnnnnnnnnnnnnnnnnnnnnnnnnnnnnnnnnnnnnnnnnnnnnnnnnnnnnnnnnnnnnnnnnnnnnnnnnnnnnnnnnnnnnnnnnnnnnnnnnnnnnnnnnnnnnnnnnnnnnnnnnnnnnnnnnnnnnnnnnnnnnnnnnnnnnnnnnnnnnnnnnnnnnnnnnnnnnnnnnnnnnnnnnnnnnnnnnnnnnnnnnnnnnnnnnnnnnnnnnnnnnnnnnnnnnnnnnnnnnnnnnnnnnnnnnnnnnnnnnnnnnnnnnnnnnnnnnnnnnnnnnnnnnnnnnnnnnnnnnnnnnnnnnnnnnnnnnnnnnnnnnnnnnnnnnnnnnnnnnnnnnnnnnnnnnnnnnnnnnnnnnnnnnnnnnnnnnnnnnnnnnnnnnnnnnnnnnnnnnnnnnnnnnnnnnnnnnnnnnnnnnnnnnnnnnnnnnnnnnnnnnnnnnnnnnnnnnnnnnnnnnnnnnnnnnnnnnnnnnnnnnnnnnnnnnnnnnnnnnnnnnnnnnnnnnnnnnnnnnnnnnnnnnnnnnnnnnnnnnnnnnnnnnnnnnnnnnnnnnnnnnnnnnnnnnnnnnnnnnnnnnnnnnnnnnnnnnnnnnnnnnnnnnnnnnnnnnnnnnnnnnnnnnnnnnnnnnnnnnnnnnnnnnnnnnnnnnnnnnnnnnnnnnnnnnnnnnnnnnnnnnnnnnnnnnnnnnnnnnnnnnnnnnnnnnnnnnnnnnnnnnnnnnnnnnnnnnnnnnnnnnnnnnnnnnnnnnnnnnnnnnnnnnnnnnnnnnnnnnnnnnnnnnnnnnnnnnnnnnnnnnnnnnnnnnnnnnnnnnnnnnnnnnnnnnnnnnnnnnnnnnnnnnnnnnnnnnnnnnnnnnnnnnnnnnnnnnnnnnnnnnnnnnnnnnnnnnnnnnnnnnnnnnnnnnnnnnnnnnnnnnnnnnnnnnnnnnnnnnnnnnnnnnnnnnnnnnnnnnnnnnnnnnnnnnnnnnnnnnnnnnnnnnnnnnnnnnnnnnnnnnnnnnnnnnnnnnnnnnnnnnnnnnnnnnnnnnnnnnnnnnnnnnnnnnnnnnnnnnnnnnnnnnnnnnnnnnnnnnnnnnnnnnnnnnnnnnnnnnnnnnnnnnnnnnnnnnnnnnnnnnnnnnnnnnnnnnnnnnnnnnnnnnnnnnnnnnnnnnnnnnnnnnnnnnnnnnnnnnnnnnnnnnnnnnnnnnnnnnnnnnnnnnnnnnnnnnnnnnnnnnnnnnnnnnnnnnnnnnnnnnnnnnnnnnnnnnnnnnnnnnnnnnnnnnnnnnnnnnnnnnnnnnnnnnnnnnnnnnnnnnnnnnnnnnnnnnnnnnnnnnnnnnnnnnnnnnnnnnnnnnnnnnnnnnnnnnnnnnnnnnnnnnnnnnnnnnnnnnnnnnnnnnnnnnnnnnnnnnnnnnnnnnnnnnnnnnnnnnnnnnnnnnnnnnnnnnnnnnnnnnnnnnnnnnnnnnnnnnnnnnnnnnnnnnnnnnnnnnnnnnnnnnnnnnnnnnnnnnnnnnnnnnnnnnnnnnnnnnnnnnnnnnnnnnnnnnnnnnnnnnnnnnnnnnnnnnnnnnnnnnnnnnnnnnnnnnnnnnnnnnnnnnnnnnnnnnnnnnnnnnnnnnnnnnnnnnnnnnnnnnnnnnnnnnnnnnnnnnnnnnnnnnnnnnnnnnnnnnnnnnnnnnnnnnnnnnnnnnnnnnnnnnnnnnnnnnnnnnnnnnnnnnnnnnnnnnnnnnnnnnnnnnnnnnnnnnnnnnnnnnnnnnnnnnnnnnnnnnnnnnnnnnnnnnnnnnnnnnnnnnnnnnnnnnnnnnnnnnnnnnnnnnnnnnnnnnnnnnnnnnnnnnnnnnnnnnnnnnnnnnnnnnnnnnnnnnnnnnnnnnnnnnnnnnnnnnnnnnnnnnnnnnnnnnnnnnnnnnnnnnnnnnnnnnnnnnnnnnnnnnnnnnnnnnnnnnnnnnnnnnnnnnnnnnnnnnnnnnnnnnnnnnnnnnnnnnnnnnnnnnnnnnnnnnnnnnnnnnnnnnnnnnnnnnnnnnnnnnnnnnnnnnnnnnnnnnnnnnnnnnnnnnnnnnnnnnnnnnnnnnnnnnnnnnnnnnnnnnnnnnnnnnnnnnnnnnnnnnnnnnnnnnnnnnnnnnnnnnnnnnnnnnnnnnnnnnnnnnnnnnnnnnnnnnnnnnnnnnnnnnnnnnnnnnnnnnnnnnnnnnnnnnnnnnnnnnnnnnnnnnnnnnnnnnnnnnnnnnnnnnnnnnnnnnnnnnnnnnnnnnnnnnnnnnnnnnnnnnnnnnnnnnnnnnnnnnnnnnnnnnnnnnnnnnnnnnnnnnnnnnnnnnnnnnnnnnnnnnnnnnnnnnnnnnnnnnnnnnnnnnnnnnnnnnnnnnnnnnnnnnnnnnnnnnnnnnnnnnnnnnnnnnnnnnnnnnnnnnnnnnnnnnnnnnnnnnnnnnnnnnnnnnnnnnnnnnnnnnnnnnnnnnnnnnnnnnnnnnnnnnnnnnnnnnnnnnnnnnnnnnnnnnnnnnnnnnnnnnnnnnnnnnnnnnnnnnnnnnnnnnnnnnnnnnnnnnnnnnnnnnnnnnnnnnnnnnnnnnnnnnnnnnnnnnnnnnnnnnnnnnnnnnnnnnnnnnnnnnnnnnnnnnnnnnnnnnnnnnnnnnnnnnnnnnnnnnnnnnnnnnnnnnnnnnnnnnnnnnnnnnnnnnnnnnnnnnnnnnnnnnnnnnnnnnnnnnnnnnnnnnnnnnnnnnnnnnnnnnnnnnnnnnnnnnnnnnnnnnnnnnnnnnnnnnnnnnnnnnnnnnnnnnnnnnnnnnnnnnnnnnnnnnnnnnnnnnnnnnnnnnnnnnnnnnnnnnnnnnnnnnnnnnnnnnnnnnnnnnnnnnnnnnnnnnnnnnnnnnnnnnnnnnnnnnnnnnnnnnnnnnnnnnnnnnnnnnnnnnnnnnnnnnnnnnnnnnnnnnnnnnnnnnnnnnnnnnnnnnnnnnnnnnnnnnnnnnnnnnnnnnnnnnnnnnnnnnnnnnnnnnnnnnnnnnnnnnnnnnnnnnnnnnnnnnnnnnnnnnnnnnnnnnnnnnnnnnnnnnnnnnnnnnnnnnnnnnnnnnnnnnnnnnnnnnnnnnnnnnnnnnnnnnnnnnnnnnnnnnnnnnnnnnnnnnnnnnnnnnnnnnnnnnnnnnnnnnnnnnnnnnnnnnnnnnnnnnnnnnnnnnnnnnnnnnnnnnnnnnnnnnnnnnnnnnnnnnnnnnnnnnnnnnnnnnnnnnnnnnnnnnnnnnnnnnnnnnnnnnnnnnnnnnnnnnnnnnnnnnnnnnnnnnnnnnnnnnnnnnnnnnnnnnnnnnnnnnnnnnnnnnnnnnnnnnnnnnnnnnnnnnnnnnnnnnnnnnnnnnnnnnnnnnnnnnnnnnnnnnnnnnnnnnnnnnnnnnnnnnnnnnnnnnnnnnnnnnnnnnnnnnnnnnnnnnnnnnnnnnnnnnnnnnnnnnnnnnnnnnnnnnnnnnnnnnnnnnnnnnnnnnnnnnnnnnnnnnnnnnnnnnnnnnnnnnnnnnnnnnnnnnnnnnnnnnnnnnnnnnnnnnnnnnnnnnnnnnnnnnnnnnnnnnnnnnnnnnnnnnnnnnnnnnnnnnnnnnnnnnnnnnnnnnnnnnnnnnnnnnnnnnnnnnnnnnnnnnnnnnnnnnnnnnnnnnnnnnnnnnnnnnnnnnnnnnnnnnnnnnnnnnnnnnnnnnnnnnnnnnnnnnnnnnnnnnnnnnnnnnnnnnnnnnnnnnnnnnnnnnnnnnnnnnnnnnnnnnnnnnnnnnnnnnnnnnnnnnnnnnnnnnnnnnnnnnnnnnnnnnnnnnnnnnnnnnnnnnnnnnnnnnnnnnnnnnnnnnnnnnnnnnnnnnnnnnnnnnnnnnnnnnnnnnnnnnnnnnnnnnnnnnnnnnnnnnnnnnnnnnnnnnnnnnnnnnnnnnnnnnnnnnnnnnnnnnnnnnnnnnnnnnnnnnnnnnnnnnnnnnnnnnnnnnnnnnnnnnnnnnnnnnnnnnnnnnnnnnnnnnnnnnnnnnnnnnnnnnnnnnnnnnnnnnnnnnnnnnnnnnnnnnnnnnnnnnnnnnnnnnnnnnnnnnnnnnnnnnnnnnnnnnnnnnnnnnnnnnnnnnnnnnnnnnnnnnnnnnnnnnnnnnnnnnnnnnnnnnnnnnnnnnnnnnnnnnnnnnnnnnnnnnnnnnnnnnnnnnnnnnnnnnnnnnnnnnnnnnnnnnnnnnnnnnnnnnnnnnnnnnnnnnnnnnnnnnnnnnnnnnnnnnnnnnnnnnnnnnnnnnnnnnnnnnnnnnnnnnnnnnnnnnnnnnnnnnnnnnnnnnnnnnnnnnnnnnnnnnnnnnnnnnnnnnnnnnnnnnnnnnnnnnnnnnnnnnnnnnnnnnnnnnnnnnnnnnnnnnnnnnnnnnnnnnnnnnnnnnnnnnnnnnnnnnnnnnnnnnnnnnnnnnnnnnnnnnnnnnnnnnnnnnnnnnnnnnnnnnnnnnnnnnnnnnnnnnnnnnnnnnnnnnnnnnnnnnnnnnnnnnnnnnnnnnnnnnnnnnnnnnnnnnnnnnnnnnnnnnnnnnnnnnnnnnnnnnnnnnnnnnnnnnnnnnnnnnnnnnnnnnnnnnnnnnnnnnnnnnnnnnnnnnnnnnnnnnnnnnnnnnnnnnnnnnnnnnnnnnnnnnnnnnnnnnnnnnnnnnnnnnnnnnnnnnnnnnnnnnnnnnnnnnnnnnnnnnnnnnnnnnnnnnnnnnnnnnnnnnnnnnnnnnnnnnnnnnnnnnnnnnnnnnnnnnnnnnnnnnnnnnnnnnnnnnnnnnnnnnnnnnnnnnnnnnnnnnnnnnnnnnnnnnnnnnnnnnnnnnnnnnnnnnnnnnnnnnnnnnnnnnnnnnnnnnnnnnnnnnnnnnnnnnnnnnnnnnnnnnnnnnnnnnnnnnnnnnnnnnnnnnnnnnnnnnnnnnnnnnnnnnnnnnnnnnnnnnnnnnnnnnnnnnnnnnnnnnnnnnnnnnnnnnnnnnnnnnnnnnnnnnnnnnnnnnnnnnnnnnnnnnnnnnnnnnnnnnnnnnnnnnnnnnnnnnnnnnnnnnnnnnnnnnnnnnnnnnnnnnnnnnnnnnnnnnnnnnnnnnnnnnnnnnnnnnnnnnnnnnnnnnnnnnnnnnnnnnnnnnnnnnnnnnnnnnnnnnnnnnnnnnnnnnnnnnnnnnnnnnnnnnnnnnnnnnnnnnnnnnnnnnnnnnnnnnnnnnnnnnnnnnnnnnnnnnnnnnnnnnnnnnnnnnnnnnnnnnnnnnnnnnnnnnnnnnnnnnnnnnnnnnnnnnnnnnnnnnnnnnnnnnnnnnnnnnnnnnnnnnnnnnnnnnnnnnnnnnnnnnnnnnnnnnnnnnnnnnnnnnnnnnnnnnnnnnnnnnnnnnnnnnnnnnnnnnnnnnnnnnnnnnnnnnnnnnnnnnnnnnnnnnnnnnnnnnnnnnnnnnnnnnnnnnnnnnnnnnnnnnnnnnnnnnnnnnnnnnnnnnnnnnnnnnnnnnnnnnnnnnnnnnnnnnnnnnnnnnnnnnnnnnnnnnnnnnnnnnnnnnnnnnnnnnnnnnnnnnnnnnnnnnnnnnnnnnnnnnnnnnnnnnnnnnnnnnnnnnnnnnnnnnnnnnnnnnnnnnnnnnnnnnnnnnnnnnnnnnnnnnnnnnnnnnnnnnnnnnnnnnnnnnnnnnnnnnnnnnnnnnnnnnnnnnnnnnnnnnnnnnnnnnnnnnnnnnnnnnnnnnnnnnnnnnnnnnnnnnnnnnnnnnnnnnnnnnnnnnnnnnnnnnnnnnnnnnnnnnnnnnnnnnnnnnnnnnnnnnnnnnnnnnnnnnnnnnnnnnnnnnnnnnnnnnnnnnnnnnnnnnnnnnnnnnnnnnnnnnnnnnnnnnnnnnnnnnnnnnnnnnnnnnnnnnnnnnnnnnnnnnnnnnnnnnnnnnnnnnnnnnnnnnnnnnnnnnnnnnnnnnnnnnnnnnnnnnnnnnnnnnnnnnnnnnnnnnnnnnnnnnnnnnnnnnnnnnnnnnnnnnnnnnnnnnnnnnnnnnnnnnnnnnnnnnnnnnnnnnnnnnnnnnnnnnnnnnnnnnnnnnnnnnnnnnnnnnnnnnnnnnnnnnnnnnnnnnnnnnnnnnnnnnnnnnnnnnnnnnnnnnnnnnnnnnnnnnnnnnnnnnnnnnnnnnnnnnnnnnnnnnnnnnnnnnnnnnnnnnnnnnnnnnnnnnnnnnnnnnnnnnnnnnnnnnnnnnnnnnnnnnnnnnnnnnnnnnnnnnnnnnnnnnnnnnnnnnnnnnnnnnnnnnnnnnnnnnnnnnnnnnnnnnnnnnnnnnnnnnnnnnnnnnnnnnnnnnnnnnnnnnnnnnnnnnnnnnnnnnnnnnnnnnnnnnnnnnnnnnnnnnnnnnnnnnnnnnnnnnnnnnnnnnnnnnnnnnnnnnnnnnnnnnnnnnnnnnnnnnnnnnnnnnnnnnnnnnnnnnnnnnnnnnnnnnnnnnnnnnnnnnnnnnnnnnnnnnnnnnnnnnnnnnnnnnnnnnnnnnnnnnnnnnnnnnnnnnnnnnnnnnnnnnnnnnnnnnnnnnnnnnnnnnnnnnnnnnnnnnnnnnnnnnnnnnnnnnnnnnnnnnnnnnnnnnnnnnnnnnnnnnnnnnnnnnnnnnnnnnnnnnnnnnnnnnnnnnnnnnnnnnnnnnnnnnnnnnnnnnnnnnnnnnnnnnnnnnnnnnnnnnnnnnnnnnnnnnnnnnnnnnnnnnnnnnnnnnnnnnnnnnnnnnnnnnnnnnnnnnnnnnnnnnnnnnnnnnnnnnnnnnnnnnnnnnnnnnnnnnnnnnnnnnnnnnnnnnnnnnnnnnnnnnnnnnnnnnnnnnnnnnnnnnnnnnnnnnnnnnnnnnnnnnnnnnnnnnnnnnnnnnnnnnnnnnnnnnnnnnnnnnnnnnnnnnnnnnnnnnnnnnnnnnnnnnnnnnnnnnnnnnnnnnnnnnnnnnnnnnnnnnnnnnnnnnnnnnnnnnnnnnnnnnnnnnnnnnnnnnnnnnnnnnnnnnnnnnnnnnnnnnnnnnnnnnnnnnnnnnnnnnnnnnnnnnnnnnnnnnnnnnnnnnnnnnnnnnnnnnnnnnnnnnnnnnnnnnnnnnnnnnnnnnnnnnnnnnnnnnnnnnnnnnnnnnnnnnnnnnnnnnnnnnnnnnnnnnnnnnnnnnnnnnnnnnnnnnnnnnnnnnnnnnnnnnnnnnnnnnnnnnnnnnnnnnnnnnnnnnnnnnnnnnnnnnnnnnnnnnnnnnnnnnnnnnnnnnnnnnnnnnnnnnnnnnnnnnnnnnnnnnnnnnnnnnnnnnnnnnnnnnnnnnnnnnnnnnnnnnnnnnnnnnnnnnnnnnnnnnnnnnnnnnnnnnnnnnnnnnnnnnnnnnnnnnnnnnnnnnnnnnnnnnnnnnnnnnnnnnnnnnnnnnnnnnnnnnnnnnnnnnnnnnnnnnnnnnnnnnnnnnnnnnnnnnnnnnnnnnnnnnnnnnnnnnnnnnnnnnnnnnnnnnnnnnnnnnnnnnnnnnnnnnnnnnnnnnnnnnnnnnnnnnnnnnnnnnnnnnnnnnnnnnnnnnnnnnnnnnnnnnnnnnnnnnnnnnnnnnnnnnnnnnnnnnnnnnnnnnnnnnnnnnnnnnnnnnnnnnnnnnnnnnnnnnnnnnnnnnnnnnnnnnnnnnnnnnnnnnnnnnnnnnnnnnnnnnnnnnnnnnnnnnnnnnnnnnnnnnnnnnnnnnnnnnnnnnnnnnnnnnnnnnnnnnnnnnnnnnnnnnnnnnnnnnnnnnnnnnnnnnnnnnnnnnnnnnnnnnnnnnnnnnnnnnnnnnnnnnnnnnnnnnnnnnnnnnnnnnnnnnnnnnnnnnnnnnnnnnnnnnnnnnnnnnnnnnnnnnnnnnnnnnnnnnnnnnnnnnnnnnnnnnnnnnnnnnnnnnnnnnnnnnnnnnnnnnnnnnnnnnnnnnnnnnnnnnnnnnnnnnnnnnnnnnnnnnnnnnnnnnnnnnnnnnnnnnnnnnnnnnnnnnnnnnnnnnnnnnnnnnnnnnnnnnnnnnnnnnnnnnnnnnnnnnnnnnnnnnnnnnnnnnnnnnnnnnnnnnnnnnnnnnnnnnnnnnnnnnnnnnnnnnnnnnnnnnnnnnnnnnnnnnnnnnnnnnnnnnnnnnnnnnnnnnnnnnnnnnnnnnnnnnnnnnnnnnnnnnnnnnnnnnnnnnnnnnnnnnnnnnnnnnnnnnnnnnnnnnnnnnnnnnnnnnnnnnnnnnnnnnnnnnnnnnnnnnnnnnnnnnnnnnnnnnnnnnnnnnnnnnnnnnnnnnnnnnnnnnnnnnnnnnnnnnnnnnnnnnnnnnnnnnnnnnnnnnnnnnnnnnnnnnnnnnnnnnnnnnnnnnnnnnnnnnnnnnnnnnnnnnnnnnnnnnnnnnnnnnnnnnnnnnnnnnnnnnnnnnnnnnnnnnnnnnnnnnnnnnnnnnnnnnnnnnnnnnnnnnnnnnnnnnnnnnnnnnnnnnnnnnnnnnnnnnnnnnnnnnnnnnnnnnnnnnnnnnnnnnnnnnnnnnnnnnnnnnnnnnnnnnnnnnnnnnnnnnnnnnnnnnnnnnnnnnnnnnnnnnnnnnnnnnnnnnnnnnnnnnnnnnnnnnnnnnnnnnnnnnnnnnnnnnnnnnnnnnnnnnnnnnnnnnnnnnnnnnnnnnnnnnnnnnnnnnnnnnnnnnnnnnnnnnnnnnnnnnnnnnnnnnnnnnnnnnnnnnnnnnnnnnnnnnnnnnnnnnnnnnnnnnnnnnnnnnnnnnnnnnnnnnnnnnnnnnnnnnnnnnnnnnnnnnnnnnnnnnnnnnnnnnnnnnnnnnnnnnnnnnnnnnnnnnnnnnnnnnnnnnnnnnnnnnnnnnnnnnnnnnnnnnnnnnnnnnnnnnnnnnnnnnnnnnnnnnnnnnnnnnnnnnnnnnnnnnnnnnnnnnnnnnnnnnnnnnnnnnnnnnnnnnnnnnnnnnnnnnnnnnnnnnnnnnnnnnnnnnnnnnnnnnnnnnnnnnnnnnnnnnnnnnnnnnnnnnnnnnnnnnnnnnnnnnnnnnnnnnnnnnnnnnnnnnnnnnnnnnnnnnnnnnnnnnnnnnnnnnnnnnnnnnnnnnnnnnnnnnnnnnnnnnnnnnnnnnnnnnnnnnnnnnnnnnnnnnnnnnnnnnnnnnnnnnnnnnnnnnnnnnnnnnnnnnnnnnnnnnnnnnnnnnnnnnnnnnnnnnnnnnnnnnnnnnnnnnnnnnnnnnnnnnnnnnnnnnnnnnnnnnnnnnnnnnnnnnnnnnnnnnnnnnnnnnnnnnnnnnnnnnnnnnnnnnnnnnnnnnnnnnnnnnnnnnnnnnnnnnnnnnnnnnnnnnnnnnnnnnnnnnnnnnnnnnnnnnnnnnnnnnnnnnnnnnnnnnnnnnnnnnnnnnnnnnnnnnnnnnnnnnnnnnnnnnnnnnnnnnnnnnnnnnnnnnnnnnnnnnnnnnnnnnnnnnnnnnnnnnnnnnnnnnnnnnnnnnnnnnnnnnnnnnnnnnnnnnnnnnnnnnnnnnnnnnnnnnnnnnnnnnnnnnnnnnnnnnnnnnnnnnnnnnnnnnnnnnnnnnnnnnnnnnnnnnnnnnnnnnnnnnnnnnnnnnnnnnnnnnnnnnnnnnnnnnnnnnnnnnnnnnnnnnnnnnnnnnnnnnnnnnnnnnnnnnnnnnnnnnnnnnnnnnnnnnnnnnnnnnnnnnnnnnnnnnnnnnnnnnnnnnnnnnnnnnnnnnnnnnnnnnnnnnnnnnnnnnnnnnnnnnnnnnnnnnnnnnnnnnnnnnnnnnnnnnnnnnnnnnnnnnnnnnnnnnnnnnnnnnnnnnnnnnnnnnnnnnnnnnnnnnnnnnnnnnnnnnnnnnnnnnnnnnnnnnnnnnnnnnnnnnnnnnnnnnnnnnnnnnnnnnnnnnnnnnnnnnnnnnnnnnnnnnnnnnnnnnnnnnnnnnnnnnnnnnnnnnnnnnnnnnnnnnnnnnnnnnnnnnnnnnnnnnnnnnnnnnnnnnnnnnnnnnnnnnnnnnnnnnnnnnnnnnnnnnnnnnnnnnnnnnnnnnnnnnnnnnnnnnnnnnnnnnnnnnnnnnnnnnnnnnnnnnnnnnnnnnnnnnnnnnnnnnnnnnnnnnnnnnnnnnnnnnnnnnnnnnnnnnnnnnnnnnnnnnnnnnnnnnnnnnnnnnnnnnnnnnnnnnnnnnnnnnnnnnnnnnnnnnnnnnnnnnnnnnnnnnnnnnnnnnnnnnnnnnnnnnnnnnnnnnnnnnnnnnnnnnnnnnnnnnnnnnnnnnnnnnnnnnnnnnnnnnnnnnnnnnnnnnnnnnnnnnnnnnnnnnnnnnnnnnnnnnnnnnnnnnnnnnnnnnnnnnnnnnnnnnnnnnnnnnnnnnnnnnnnnnnnnnnnnnnnnnnnnnnnnnnnnnnnnnnnnnnnnnnnnnnnnnnnnnnnnnnnnnnnnnnnnnnnnnnnnnnnnnnnnnnnnnnnnnnnnnnnnnnnnnnnnnnnnnnnnnnnnnnnnnnnnnnnnnnnnnnnnnnnnnnnnnnnnnnnnnnnnnnnnnnnnnnnnnnnnnnnnnnnnnnnnnnnnnnnnnnnnnnnnnnnnnnnnnnnnnnnnnnnnnnnnnnnnnnnnnnnnnnnnnnnnnnnnnnnnnnnnnnnnnnnnnnnnnnnnnnnnnnnnnnnnnnnnnnnnnnnnnnnnnnnnnnnnnnnnnnnnnnnnnnnnnnnnnnnnnnnnnnnnnnnnnnnnnnnnnnnnnnnnnnnnnnnnnnnnnnnnnnnnnnnnnnnnnnnnnnnnnnnnnnnnnnnnnnnnnnnnnnnnnnnnnnnnnnnnnnnnnnnnnnnnnnnnnnnnnnnnnnnnnnnnnnnnnnnnnnnnnnnnnnnnnnnnnnnnnnnnnnnnnnnnnnnnnnnnnnnnnnnnnnnnnnnnnnnnnnnnnnnnnnnnnnnnnnnnnnnnnnnnnnnnnnnnnnnnnnnnnnnnnnnnnnnnnnnnnnnnnnnnnnnnnnnnnnnnnnnnnnnnnnnnnnnnnnnnnnnnnnnnnnnnnnnnnnnnnnnnnnnnnnnnnnnnnnnnnnnnnnnnnnnnnnnnnnnnnnnnnnnnnnnnnnnnnnnnnnnnnnnnnnnnnnnnnnnnnnnnnnnnnnnnnnnnnnnnnnnnnnnnnnnnnnnnnnnnnnnnnnnnnnnnnnnnnnnnnnnnnnnnnnnnnnnnnnnnnnnnnnnnnnnnnnnnnnnnnnnnnnnnnnnnnnnnnnnnnnnnnnnnnnnnnnnnnnnnnnnnnnnnnnnnnnnnnnnnnnnnnnnnnnnnnnnnnnnnnnnnnnnnnnnnnnnnnnnnnnnnnnnnnnnnnnnnnnnnnnnnnnnnnnnnnnnnnnnnnnnnnnnnnnnnnnnnnnnnnnnnnnnnnnnnnnnnnnnnnnnnnnnnnnnnnnnnnnnnnnnnnnnnnnnnnnnnnnnnnnnnnnnnnnnnnnnnnnnnnnnnnnnnnnnnnnnnnnnnnnnnnnnnnnnnnnnnnnnnnnnnnnnnnnnnnnnnnnnnnnnnnnnnnnnnnnnnnnnnnnnnnnnnnnnnnnnnnnnnnnnnnnnnnnnnnnnnnnnnnnnnnnnnnnnnnnnnnnnnnnnnnnnnnnnnnnnnnnnnnnnnnnnnnnnnnnnnnnnnnnnnnnnnnnnnnnnnnnnnnnnnnnnnnnnnnnnnnnnnnnnnnnnnnnnnnnnnnnnnnnnnnnnnnnnnnnnnnnnnnnnnnnnnnnnnnnnnnnnnnnnnnnnnnnnnnnnnnnnnnnnnnnnnnnnnnnnnnnnnnnnnnnnnnnnnnnnnnnnnnnnnnnnnnnnnnnnnnnnnnnnnnnnnnnnnnnnnnnnnnnnnnnnnnnnnnnnnnnnnnnnnnnnnnnnnnnnnnnnnnnnnnnnnnnnnnnnnnnnnnnnnnnnnnnnnnnnnnnnnnnnnnnnnnnnnnnnnnnnnnnnnnnnnnnnnnnnnnnnnnnnnnnnnnnnnnnnnnnnnnnnnnnnnnnnnnnnnnnnnnnnnnnnnnnnnnnnnnnnnnnnnnnnnnnnnnnnnnnnnnnnnnnnnnnnnnnnnnnnnnnnnnnnnnnnnnnnnnnnnnnnnnnnnnnnnnnnnnnnnnnnnnnnnnnnnnnnnnnnnnnnnnnnnnnnnnnnnnnnnnnnnnnnnnnnnnnnnnnnnnnnnnnnnnnnnnnnnnnnnnnnnnnnnnnnnnnnnnnnnnnnnnnnnnnnnnnnnnnnnnnnnnnnnnnnnnnnnnnnnnnnnnnnnnnnnnnnnnnnnnnnnnnnnnnnnnnnnnnnnnnnnnnnnnnnnnnnnnnnnnnnnnnnnnnnnnnnnnnnnnnnnnnnnnnnnnnnnnnnnnnnnnnnnnnnnnnnnnnnnnnnnnnnnnnnnnnnnnnnnnnnnnnnnnnnnnnnnnnnnnnnnnnnnnnnnnnnnnnnnnnnnnnnnnnnnnnnnnnnnnnnnnnnnnnnnnnnnnnnnnnnnnnnnnnnnnnnnnnnnnnnnnnnnnnnnnnnnnnnnnnnnnnnnnnnnnnnnnnnnnnnnnnnnnnnnnnnnnnnnnnnnnnnnnnnnnnnnnnnnnnnnnnnnnnnnnnnnnnnnnnnnnnnnnnnnnnnnnnnnnnnnnnnnnnnnnnnnnnnnnnnnnnnnnnnnnnnnnnnnnnnnnnnnnnnnnnnnnnnnnnnnnnnnnnnnnnnnnnnnnnnnnnnnnnnnnnnnnnnnnnnnnnnnnnnnnnnnnnnnnnnnnnnnnnnnnnnnnnnnnnnnnnnnnnnnnnnnnnnnnnnnnnnnnnnnnnnnnnnnnnnnnnnnnnnnnnnnnnnnnnnnnnnnnnnnnnnnnnnnnnnnnnnnnnnnnnnnnnnnnnnnnnnnnnnnnnnnnnnnnnnnnnnnnnnnnnnnnnnnnnnnnnnnnnnnnnnnnnnnnnnnnnnnnnnnnnnnnnnnnnnnnnnnnnnnnnnnnnnnnnnnnnnnnnnnnnnnnnnnnnnnnnnnnnnnnnnnnnnnnnnnnnnnnnnnnnnnnnnnnnnnnnnnnnnnnnnnnnnnnnnnnnnnnnnnnnnnnnnnnnnnnnnnnnnnnnnnnnnnnnnnnnnnnnnnnnnnnnnnnnnnnnnnnnnnnnnnnnnnnnnnnnnnnnnnnnnnnnnnnnnnnnnnnnnnnnnnnnnnnnnnnnnnnnnnnnnnnnnnnnnnnnnnnnnnnnnnnnnnnnnnnnnnnnnnnnnnnnnnnnnnnnnnnnnnnnnnnnnnnnnnnnnnnnnnnnnnnnnnnnnnnnnnnnnnnnnnnnnnnnnnnnnnnnnnnnnnnnnnnnnnnnnnnnnnnnnnnnnnnnnnnnnnnnnnnnnnnnnnnnnnnnnnnnnnnnnnnnnnnnnnnnnnnnnnnnnnnnnnnnnnnnnnnnnnnnnnnnnnnnnnnnnnnnnnnnnnnnnnnnnnnnnnnnnnnnnnnnnnnnnnnnnnnnnnnnnnnnnnnnnnnnnnnnnnnnnnnnnnnnnnnnnnnnnnnnnnnnnnnnnnnnnnnnnnnnnnnnnnnnnnnnnnnnnnnnnnnnnnnnnnnnnnnnnnnnnnnnnnnnnnnnnnnnnnnnnnnnnnnnnnnnnnnnnnnnnnnnnnnnnnnnnnnnnnnnnnnnnnnnnnnnnnnnnnnnnnnnnnnnnnnnnnnnnnnnnnnnnnnnnnnnnnnnnnnnnnnnnnnnnnnnnnnnnnnnnnnnnnnnnnnnnnnnnnnnnnnnnnnnnnnnnnnnnnnnnnnnnnnnnnnnnnnnnnnnnnnnnnnnnnnnnnnnnnnnnnnnnnnnnnnnnnnnnnnnnnnnnnnnnnnnnnnnnnnnnnnnnnnnnnnnnnnnnnnnnnnnnnnnnnnnnnnnnnnnnnnnnnnnnnnnnnnnnnnnnnnnnnnnnnnnnnnnnnnnnnnnnnnnnnnnnnnnnnnnnnnnnnnnnnnnnnnnnnnnnnnnnnnnnnnnnnnnnnnnnnnnnnnnnnnnnnnnnnnnnnnnnnnnnnnnnnnnnnnnnnnnnnnnnnnnnnnnnnnnnnnnnnnnnnnnnnnnnnnnnnnnnnnnnnnnnnnnnnnnnnnnnnnnnnnnnnnnnnnnnnnnnnnnnnnnnnnnnnnnnnnnnnnnnnnnnnnnnnnnnnnnnnnnnnnnnnnnnnnnnnnnnnnnnnnnnnnnnnnnnnnnnnnnnnnnnnnnnnnnnnnnnnnnnnnnnnnnnnnnnnnnnnnnnnnnnnnnnnnnnnnnnnnnnnnnnnnnnnnnnnnnnnnnnnnnnnnnnnnnnnnnnnnnnnnnnnnnnnnnnnnnnnnnnnnnnnnnnnnnnnnnnnnnnnnnnnnnnnnnnnnnnnnnnnnnnnnnnnnnnnnnnnnnnnnnnnnnnnnnnnnnnnnnnnnnnnnnnnnnnnnnnnnnnnnnnnnnnnnnnnnnnnnnnnnnnnnnnnnnnnnnnnnnnnnnnnnnnnnnnnnnnnnnnnnnnnnnnnnnnnnnnnnnnnnnnnnnnnnnnnnnnnnnnnnnnnnnnnnnnnnnnnnnnnnnnnnnnnnnnnnnnnnnnnnnnnnnnnnnnnnnnnnnnnnnnnnnnnnnnnnnnnnnnnnnnnnnnnnnnnnnnnnnnnnnnnnnnnnnnnnnnnnnnnnnnnnnnnnnnnnnnnnnnnnnnnnnnnnnnnnnnnnnnnnnnnnnnnnnnnnnnnnnnnnnnnnnnnnnnnnnnnnnnnnnnnnnnnnnnnnnnnnnnnnnnnnnnnnnnnnnnnnnnnnnnnnnnnnnnnnnnnnnnnnnnnnnnnnnnnnnnnnnnnnnnnnnnnnnnnnnnnnnnnnnnnnnnnnnnnnnnnnnnnnnnnnnnnnnnnnnnnnnnnnnnnnnnnnnnnnnnnnnnnnnnnnnnnnnnnnnnnnnnnnnnnnnnnnnnnnnnnnnnnnnnnnnnnnnnnnnnnnnnnnnnnnnnnnnnnnnnnnnnnnnnnnnnnnnnnnnnnnnnnnnnnnnnnnnnnnnnnnnnnnnnnnnnnnnnnnnnnnnnnnnnnnnnnnnnnnnnnnnnnnnnnnnnnnnnnnnnnnnnnnnnnnnnnnnnnnnnnnnnnnnnnnnnnnnnnnnnnnnnnnnnnnnnnnnnnnnnnnnnnnnnnnnnnnnnnnnnnnnnnnnnnnnnnnnnnnnnnnnnnnnnnnnnnnnnnnnnnnnnnnnnnnnnnnnnnnnnnnnnnnnnnnnnnnnnnnnnnnnnnnnnnnnnnnnnnnnnnnnnnnnnnnnnnnnnnnnnnnnnnnnnnnnnnnnnnnnnnnnnnnnnnnnnnnnnnnnnnnnnnnnnnnnnnnnnnnnnnnnnnnnnnnnnnnnnnnnnnnnnnnnnnnnnnnnnnnnnnnnnnnnnnnnnnnnnnnnnnnnnnnnnnnnnnnnnnnnnnnnnnnnnnnnnnnnnnnnnnnnnnnnnnnnnnnnnnnnnnnnnnnnnnnnnnnnnnnnnnnnnnnnnnnnnnnnnnnnnnnnnnnnnnnnnnnnnnnnnnnnnnnnnnnnnnnnnnnnnnnnnnnnnnnnnnnnnnnnnnnnnnnnnnnnnnnnnnnnnnnnnnnnnnnnnnnnnnnnnnnnnnnnnnnnnnnnnnnnnnnnnnnnnnnnnnnnnnnnnnnnnnnnnnnnnnnnnnnnnnnnnnnnnnnnnnnnnnnnnnnnnnnnnnnnnnnnnnnnnnnnnnnnnnnnnnnnnnnnnnnnnnnnnnnnnnnnnnnnnnnnnnnnnnnnnnnnnnnnnnnnnnnnnnnnnnnnnnnnnnnnnnnnnnnnnnnnnnnnnnnnnnnnnnnnnnnnnnnnnnnnnnnnnnnnnnnnnnnnnnnnnnnnnnnnnnnnnnnnnnnnnnnnnnnnnnnnnnnnnnnnnnnnnnnnnnnnnnnnnnnnnnnnnnnnnnnnnnnnnnnnnnnnnnnnnnnnnnnnnnnnnnnnnnnnnnnnnnnnnnnnnnnnnnnnnnnnnnnnnnnnnnnnnnnnnnnnnnnnnnnnnnnnnnnnnnnnnnnnnnnnnnnnnnnnnnnnnnnnnnnnnnnnnnnnnnnnnnnnnnnnnnnnnnnnnnnnnnnnnnnnnnnnnnnnnnnnnnnnnnnnnnnnnnnnnnnnnnnnnnnnnnnnnnnnnnnnnnnnnnnnnnnnnnnnnnnnnnnnnnnnnnnnnnnnnnnnnnnnnnnnnnnnnnnnnnnnnnnnnnnnnnnnnnnnnnnnnnnnnnnnnnnnnnnnnnnnnnnnnnnnnnnnnnnnnnnnnnnnnnnnnnnnnnnnnnnnnnnnnnnnnnnnnnnnnnnnnnnnnnnnnnnnnnnnnnnnnnnnnnnnnnnnnnnnnnnnnnnnnnnnnnnnnnnnnnnnnnnnnnnnnnnnnnnnnnnnnnnnnnnnnnnnnnnnnnnnnnnnnnnnnnnnnnnnnnnnnnnnnnnnnnnnnnnnnnnnnnnnnnnnnnnnnnnnnnnnnnnnnnnnnnnnnnnnnnnnnnnnnnnnnnnnnnnnnnnnnnnnnnnnnnnnnnnnnnnnnnnnnnnnnnnnnnnnnnnnnnnnnnnnnnnnnnnnnnnnnnnnnnnnnnnnnnnnnnnnnnnnnnnnnnnnnnnnnnnnnnnnnnnnnnnnnnnnnnnnnnnnnnnnnnnnnnnnnnnnnnnnnnnnnnnnnnnnnnnnnnnnnnnnnnnnnnnnnnnnnnnnnnnnnnnnnnnnnnnnnnnnnnnnnnnnnnnnnnnnnnnnnnnnnnnnnnnnnnnnnnnnnnnnnnnnnnnnnnnnnnnnnnnnnnnnnnnnnnnnnnnnnnnnnnnnnnnnnnnnnnnnnnnnnnnnnnnnnnnnnnnnnnnnnnnnnnnnnnnnnnnnnnnnnnnnnnnnnnnnnnnnnnnnnnnnnnnnnnnnnnnnnnnnnnnnnnnnnnnnnnnnnnnnnnnnnnnnnnnnnnnnnnnnnnnnnnnnnnnnnnnnnnnnnnnnnnnnnnnnnnnnnnnnnnnnnnnnnnnnnnnnnnnnnnnnnnnnnnnnnnnnnnnnnnnnnnnnnnnnnnnnnnnnnnnnnnnnnnnnnnnnnnnnnnnnnnnnnnnnnnnnnnnnnnnnnnnnnnnnnnnnnnnnnnnnnnnnnnnnnnnnnnnnnnnnnnnnnnnnnnnnnnnnnnnnnnnnnnnnnnnnnnnnnnnnnnnnnnnnnnnnnnnnnnnnnnnnnnnnnnnnnnnnnnnnnnnnnnnnnnnnnnnnnnnnnnnnnnnnnnnnnnnnnnnnnnnnnnnnnnnnnnnnnnnnnnnnnnnnnnnnnnnnnnnnnnnnnnnnnnnnnnnnnnnnnnnnnnnnnnnnnnnnnnnnnnnnnnnnnnnnnnnnnnnnnnnnnnnnnnnnnnnnnnnnnnnnnnnnnnnnnnnnnnnnnnnnnnnnnnnnnnnnnnnnnnnnnnnnnnnnnnnnnnnnnnnnnnnnnnnnnnnnnnnnnnnnnnnnnnnnnnnnnnnnnnnnnnnnnnnnnnnnnnnnnnnnnnnnnnnnnnnnnnnnnnnnnnnnnnnnnnnnnnnnnnnnnnnnnnnnnnnnnnnnnnnnnnnnnnnnnnnnnnnnnnnnnnnnnnnnnnnnnnnnnnnnnnnnnnnnnnnnnnnnnnnnnnnnnnnnnnnnnnnnnnnnnnnnnnnnnnnnnnnnnnnnnnnnnnnnnnnnnnnnnnnnnnnnnnnnnnnnnnnnnnnnnnnnnnnnnnnnnnnnnnnnnnnnnnnnnnnnnnnnnnnnnnnnnnnnnnnnnnnnnnnnnnnnnnnnnnnnnnnnnnnnnnnnnnnnnnnnnnnnnnnnnnnnnnnnnnnnnnnnnnnnnnnnnnnnnnnnnnnnnnnnnnnnnnnnnnnnnnnnnnnnnnnnnnnnnnnnnnnnnnnnnnnnnnnnnnnnnnnnnnnnnnnnnnnnnnnnnnnnnnnnnnnnnnnnnnnnnnnnnnnnnnnnnnnnnnnnnnnnnnnnnnnnnnnnnnnnnnnnnnnnnnnnnnnnnnnnnnnnnnnnnnnnnnnnnnnnnnnnnnnnnnnnnnnnnnnnnnnnnnnnnnnnnnnnnnnnnnnnnnnnnnnnnnnnnnnnnnnnnnnnnnnnnnnnnnnnnnnnnnnnnnnnnnnnnnnnnnnnnnnnnnnnnnnnnnnnnnnnnnnnnnnnnnnnnnnnnnnnnnnnnnnnnnnnnnnnnnnnnnnnnnnnnnnnnnnnnnnnnnnnnnnnnnnnnnnnnnnnnnnnnnnnnnnnnnnnnnnnnnnnnnnnnnnnnnnnnnnnnnnnnnnnnnnnnnnnnnnnnnnnnnnnnnnnnnnnnnnnnnnnnnnnnnnnnnnnnnnnnnnnnnnnnnnnnnnnnnnnnnnnnnnnnnnnnnnnnnnnnnnnnnnnnnnnnnnnnnnnnnnnnnnnnnnnnnnnnnnnnnnnnnnnnnnnnnnnnnnnnnnnnnnnnnnnnnnnnnnnnnnnnnnnnnnnnnnnnnnnnnnnnnnnnnnnnnnnnnnnnnnnnnnnnnnnnnnnnnnnnnnnnnnnnnnnnnnnnnnnnnnnnnnnnnnnnnnnnnnnnnnnnnnnnnnnnnnnnnnnnnnnnnnnnnnnnnnnnnnnnnnnnnnnnnnnnnnnnnnnnnnnnnnnnnnnnnnnnnnnnnnnnnnnnnnnnnnnnnnnnnnnnnnnnnnnnnnnnnnnnnnnnnnnnnnnnnnnnnnnnnnnnnnnnnnnnnnnnnnnnnnnnnnnnnnnnnnnnnnnnnnnnnnnnnnnnnnnnnnnnnnnnnnnnnnnnnnnnnnnnnnnnnnnnnnnnnnnnnnnnnnnnnnnnnnnnnnnnnnnnnnnnnnnnnnnnnnnnnnnnnnnnnnnnnnnnnnnnnnnnnnnnnnnnnnnnnnnnnnnnnnnnnnnnnnnnnnnnnnnnnnnnnnnnnnnnnnnnnnnnnnnnnnnnnnnnnnnnnnnnnnnnnnnnnnnnnnnnnnnnnnnnnnnnnnnnnnnnnnnnnnnnnnnnnnnnnnnnnnnnnnnnnnnnnnnnnnnnnnnnnnnnnnnnnnnnnnnnnnnnnnnnnnnnnnnnnnnnnnnnnnnnnnnnnnnnnnnnnnnnnnnnnnnnnnnnnnnnnnnnnnnnnnnnnnnnnnnnnnnnnnnnnnnnnnnnnnnnnnnnnnnnnnnnnnnnnnnnnnnnnnnnnnnnnnnnnnnnnnnnnnnnnnnnnnnnnnnnnnnnnnnnnnnnnnnnnnnnnnnnnnnnnnnnnnnnnnnnnnnnnnnnnnnnnnnnnnnnnnnnnnnnnnnnnnnnnnnnnnnnnnnnnnnnnnnnnnnnnnnnnnnnnnnnnnnnnnnnnnnnnnnnnnnnnnnnnnnnnnnnnnnnnnnnnnnnnnnnnnnnnnnnnnnnnnnnnnnnnnnnnnnnnnnnnnnnnnnnnnnnnnnnnnnnnnnnnnnnnnnnnnnnnnnnnnnnnnnnnnnnnnnnnnnnnnnnnnnnnnnnnnnnnnnnnnnnnnnnnnnnnnnnnnnnnnnnnnnnnnnnnnnnnnnnnnnnnnnnnnnnnnnnnnnnnnnnnnnnnnnnnnnnnnnnnnnnnnnnnnnnnnnnnnnnnnnnnnnnnnnnnnnnnnnnnnnnnnnnnnnnnnnnnnnnnnnnnnnnnnnnnnnnnnnnnnnnnnnnnnnnnnnnnnnnnnnnnnnnnnnnnnnnnnnnnnnnnnnnnnnnnnnnnnnnnnnnnnnnnnnnnnnnnnnnnnnnnnnnnnnnnnnnnnnnnnnnnnnnnnnnnnnnnnnnnnnnnnnnnnnnnnnnnnnnnnnnnnnnnnnnnnnnnnnnnnnnnnnnnnnnnnnnnnnnnnnnnnnnnnnnnnnnnnnnnnnnnnnnnnnnnnnnnnnnnnnnnnnnnnnnnnnnnnnnnnnnnnnnnnnnnnnnnnnnnnnnnnnnnnnnnnnnnnnnnnnnnnnnnnnnnnnnnnnnnnnnnnnnnnnnnnnnnnnnnnnnnnnnnnnnnnnnnnnnnnnnnnnnnnnnnnnnnnnnnnnnnnnnnnnnnnnnnnnnnnnnnnnnnnnnnnnnnnnnnnnnnnnnnnnnnnnnnnnnnnnnnnnnnnnnnnnnnnnnnnnnnnnnnnnnnnnnnnnnnnnnnnnnnnnnnnnnnnnnnnnnnnnnnnnnnnnnnnnnnnnnnnnnnnnnnnnnnnnnnnnnnnnnnnnnnnnnnnnnnnnnnnnnnnnnnnnnnnnnnnnnnnnnnnnnnnnnnnnnnnnnnnnnnnnnnnnnnnnnnnnnnnnnnnnnnnnnnnnnnnnnnnnnnnnnnnnnnnnnnnnnnnnnnnnnnnnnnnnnnnnnnnnnnnnnnnnnnnnnnnnnnnnnnnnnnnnnnnnnnnnnnnnnnnnnnnnnnnnnnnnnnnnnnnnnnnnnnnnnnnnnnnnnnnnnnnnnnnnnnnnnnnnnnnnnnnnnnnnnnnnnnnnnnnnnnnnnnnnnnnnnnnnnnnnnnnnnnnnnnnnnnnnnnnnnnnnnnnnnnnnnnnnnnnnnnnnnnnnnnnnnnnnnnnnnnnnnnnnnnnnnnnnnnnnnnnnnnnnnnnnnnnnnnnnnnnnnnnnnnnnnnnnnnnnnnnnnnnnnnnnnnnnnnnnnnnnnnnnnnnnnnnnnnnnnnnnnnnnnnnnnnnnnnnnnnnnnnnnnnnnnnnnnnnnnnnnnnnnnnnnnnnnnnnnnnnnnnnnnnnnnnnnnnnnnnnnnnnnnnnnnnnnnnnnnnnnnnnnnnnnnnnnnnnnnnnnnnnnnnnnnnnnnnnnnnnnnnnnnnnnnnnnnnnnnnnnnnnnnnnnnnnnnnnnnnnnnnnnnnnnnnnnnnnnnnnnnnnnnnnnnnnnnnnnnnnnnnnnnnnnnnnnnnnnnnnnnnnnnnnnnnnnnnnnnnnnnnnnnnnnnnnnnnnnnnnnnnnnnnnnnnnnnnnnnnnnnnnnnnnnnnnnnnnnnnnnnnnnnnnnnnnnnnnnnnnnnnnnnnnnnnnnnnnnnnnnnnnnnnnnnnnnnnnnnnnnnnnnnnnnnnnnnnnnnnnnnnnnnnnnnnnnnnnnnnnnnnnnnnnnnnnnnnnnnnnnnnnnnnnnnnnnnnnnnnnnnnnnnnnnnnnnnnnnnnnnnnnnnnnnnnnnnnnnnnnnnnnnnnnnnnnnnnnnnnnnnnnnnnnnnnnnnnnnnnnnnnnnnnnnnnnnnnnnnnnnnnnnnnnnnnnnnnnnnnnnnnnnnnnnnnnnnnnnnnnnnnnnnnnnnnnnnnnnnnnnnnnnnnnnnnnnnnnnnnnnnnnnnnnnnnnnnnnnnnnnnnnnnnnnnnnnnnnnnnnnnnnnnnnnnnnnnnnnnnnnnnnnnnnnnnnnnnnnnnnnnnnnnnnnnnnnnnnnnnnnnnnnnnnnnnnnnnnnnnnnnnnnnnnnnnnnnnnnnnnnnnnnnnnnnnnnnnnnnnnnnnnnnnnnnnnnnnnnnnnnnnnnnnnnnnnnnnnnnnnnnnnnnnnnnnnnnnnnnnnnnnnnnnnnnnnnnnnnnnnnnnnnnnnnnnnnnnnnnnnnnnnnnnnnnnnnnnnnnnnnnnnnnnnnnnnnnnnnnnnnnnnnnnnnnnnnnnnnnnnnnnnnnnnnnnnnnnnnnnnnnnnnnnnnnnnnnnnnnnnnnnnnnnnnnnnnnnnnnnnnnnnnnnnnnnnnnnnnnnnnnnnnnnnnnnnnnnnnnnnnnnnnnnnnnnnnnnnnnnnnnnnnnnnnnnnnnnnnnnnnnnnnnnnnnnnnnnnnnnnnnnnnnnnnnnnnnnnnnnnnnnnnnnnnnnnnnnnnnnnnnnnnnnnnnnnnnnnnnnnnnnnnnnnnnnnnnnnnnnnnnnnnnnnnnnnnnnnnnnnnnnnnnnnnnnnnnnnnnnnnnnnnnnnnnnnnnnnnnnnnnnnnnnnnnnnnnnnnnnnnnnnnnnnnnnnnnnnnnnnnnnnnnnnnnnnnnnnnnnnnnnnnnnnnnnnnnnnnnnnnnnnnnnnnnnnnnnnnnnnnnnnnnnnnnnnnnnnnnnnnnnnnnnnnnnnnnnnnnnnnnnnnnnnnnnnnnnnnnnnnnnnnnnnnnnnnnnnnnnnnnnnnnnnnnnnnnnnnnnnnnnnnnnnnnnnnnnnnnnnnnnnnnnnnnnnnnnnnnnnnnnnnnnnnnnnnnnnnnnnnnnnnnnnnnnnnnnnnnnnnnnnnnnnnnnnnnnnnnnnnnnnnnnnnnnnnnnnnnnnnnnnnnnnnnnnnnnnnnnnnnnnnnnnnnnnnnnnnnnnnnnnnnnnnnnnnnnnnnnnnnnnnnnnnnnnnnnnnnnnnnnnnnnnnnnnnnnnnnnnnnnnnnnnnnnnnnnnnnnnnnnnnnnnnnnnnnnnnnnnnnnnnnnnnnnnnnnnnnnnnnnnnnnnnnnnnnnnnnnnnnnnnnnnnnnnnnnnnnnnnnnnnnnnnnnnnnnnnnnnnnnnnnnnnnnnnnnnnnnnnnnnnnnnnnnnnnnnnnnnnnnnnnnnnnnnnnnnnnnnnnnnnnnnnnnnnnnnnnnnnnnnnnnnnnnnnnnnnnnnnnnnnnnnnnnnnnnnnnnnnnnnnnnnnnnnnnnnnnnnnnnnnnnnnnnnnnnnnnnnnnnnnnnnnnnnnnnnnnnnnnnnnnnnnnnnnnnnnnnnnnnnnnnnnnnnnnnnnnnnnnnnnnnnnnnnnnnnnnnnnnnnnnnnnnnnnnnnnnnnnnnnnnnnnnnnnnnnnnnnnnnnnnnnnnnnnnnnnnnnnnnnnnnnnnnnnnnnnnnnnnnnnnnnnnnnnnnnnnnnnnnnnnnnnnnnnnnnnnnnnnnnnnnnnnnnnnnnnnnnnnnnnnnnnnnnnnnnnnnnnnnnnnnnnnnnnnnnnnnnnnnnnnnnnnnnnnnnnnnnnnnnnnnnnnnnnnnnnnnnnnnnnnnnnnnnnnnnnnnnnnnnnnnnnnnnnnnnnnnnnnnnnnnnnnnnnnnnnnnnnnnnnnnnnnnnnnnnnnnnnnnnnnnnnnnnnnnnnnnnnnnnnnnnnnnnnnnnnnnnnnnnnnnnnnnnnnnnnnnnnnnnnnnnnnnnnnnnnnnnnnnnnnnnnnnnnnnnnnnnnnnnnnnnnnnnnnnnnnnnnnnnnnnnnnnnnnnnnnnnnnnnnnnnnnnnnnnnnnnnnnnnnnnnnnnnnnnnnnnnnnnnnnnnnnnnnnnnnnnnnnnnnnnnnnnnnnnnnnnnnnnnnnnnnnnnnnnnnnnnnnnnnnnnnnnnnnnnnnnnnnnnnnnnnnnnnnnnnnnnnnnnnnnnnnnnnnnnnnnnnnnnnnnnnnnnnnnnnnnnnnnnnnnnnnnnnnnnnnnnnnnnnnnnnnnnnnnnnnnnnnnnnnnnnnnnnnnnnnnnnnnnnnnnnnnnnnnnnnnnnnnnnnnnnnnnnnnnnnnnnnnnnnnnnnnnnnnnnnnnnnnnnnnnnnnnnnnnnnnnnnnnnnnnnnnnnnnnnnnnnnnnnnnnnnnnnnnnnnnnnnnnnnnnnnnnnnnnnnnnnnnnnnnnnnnnnnnnnnnnnnnnnnnnnnnnnnnnnnnnnnnnnnnnnnnnnnnnnnnnnnnnnnnnnnnnnnnnnnnnnnnnnnnnnnnnnnnnnnnnnnnnnnnnnnnnnnnnnnnnnnnnnnnnnnnnnnnnnnnnnnnnnnnnnnnnnnnnnnnnnnnnnnnnnnnnnnnnnnnnnnnnnnnnnnnnnnnnnnnnnnnnnnnnnnnnnnnnnnnnnnnnnnnnnnnnnnnnnnnnnnnnnnnnnnnnnnnnnnnnnnnnnnnnnnnnnnnnnnnnnnnnnnnnnnnnnnnnnnnnnnnnnnnnnnnnnnnnnnnnnnnnnnnnnnnnnnnnnnnnnnnnnnnnnnnnnnnnnnnnnnnnnnnnnnnnnnnnnnnnnnnnnnnnnnnnnnnnnnnnnnnnnnnnnnnnnnnnnnnnnnnnnnnnnnnnnnnnnnnnnnnnnnnnnnnnnnnnnnnnnnnnnnnnnnnnnnnnnnnnnnnnnnnnnnnnnnnnnnnnnnnnnnnnnnnnnnnnnnnnnnnnnnnnnnnnnnnnnnnnnnnnnnnnnnnnnnnnnnnnnnnnnnnnnnnnnnnnnnnnnnnnnnnnnnnnnnnnnnnnnnnnnnnnnnnnnnnnnnnnnnnnnnnnnnnnnnnnnnnnnnnnnnnnnnnnnnnnnnnnnnnnnnnnnnnnnnnnnnnnnnnnnnnnnnnnnnnnnnnnnnnnnnnnnnnnnnnnnnnnnnnnnnnnnnnnnnnnnnnnnnnnnnnnnnnnnnnnnnnnnnnnnnnnnnnnnnnnnnnnnnnnnnnnnnnnnnnnnnnnnnnnnnnnnnnnnnnnnnnnnnnnnnnnnnnnnnnnnnnnnnnnnnnnnnnnnnnnnnnnnnnnnnnnnnnnnnnnnnnnnnnnnnnnnnnnnnnnnnnnnnnnnnnnnnnnnnnnnnnnnnnnnnnnnnnnnnnnnnnnnnnnnnnnnnnnnnnnnnnnnnnnnnnnnnnnnnnnnnnnnnnnnnnnnnnnnnnnnnnnnnnnnnnnnnnnnnnnnnnnnnnnnnnnnnnnnnnnnnnnnnnnnnnnnnnnnnnnnnnnnnnnnnnnnnnnnnnnnnnnnnnnnnnnnnnnnnnnnnnnnnnnnnnnnnnnnnnnnnnnnnnnnnnnnnnnnnnnnnnnnnnnnnnnnnnnnnnnnnnnnnnnnnnnnnnnnnnnnnnnnnnnnnnnnnnnnnnnnnnnnnnnnnnnnnnnnnnnnnnnnnnnnnnnnnnnnnnnnnnnnnnnnnnnnnnnnnnnnnnnnnnnnnnnnnnnnnnnnnnnnnnnnnnnnnnnnnnnnnnnnnnnnnnnnnnnnnnnnnnnnnnnnnnnnnnnnnnnnnnnnnnnnnnnnnnnnnnnnnnnnnnnnnnnnnnnnnnnnnnnnnnnnnnnnnnnnnnnnnnnnnnnnnnnnnnnnnnnnnnnnnnnnnnnnnnnnnnnnnnnnnnnnnnnnnnnnnnnnnnnnnnnnnnnnnnnnnnnnnnnnnnnnnnnnnnnnnnnnnnnnnnnnnnnnnnnnnnnnnnnnnnnnnnnnnnnnnnnnnnnnnnnnnnnnnnnnnnnnnnnnnnnnnnnnnnnnnnnnnnnnnnnnnnnnnnnnnnnnnnnnnnnnnnnnnnnnnnnnnnnnnnnnnnnnnnnnnnnnnnnnnnnnnnnnnnnnnnnnnnnnnnnnnnnnnnnnnnnnnnnnnnnnnnnnnnnnnnnnnnnnnnnnnnnnnnnnnnnnnnnnnnnnnnnnnnnnnnnnnnnnnnnnnnnnnnnnnnnnnnnnnnnnnnnnnnnnnnnnnnnnnnnnnnnnnnnnnnnnnnnnnnnnnnnnnnnnnnnnnnnnnnnnnnnnnnnnnnnnnnnnnnnnnnnnnnnnnnnnnnnnnnnnnnnnnnnnnnnnnnnnnnnnnnnnnnnnnnnnnnnnnnnnnnnnnnnnnnnnnnnnnnnnnnnnnnnnnnnnnnnnnnnnnnnnnnnnnnnnnnnnnnnnnnnnnnnnnnnnnnnnnnnnnnnnnnnnnnnnnnnnnnnnnnnnnnnnnnnnnnnnnnnnnnnnnnnnnnnnnnnnnnnnnnnnnnnnnnnnnnnnnnnnnnnnnnnnnnnnnnnnnnnnnnnnnnnnnnnnnnnnnnnnnnnnnnnnnnnnnnnnnnnnnnnnnnnnnnnnnnnnnnnnnnnnnnnnnnnnnnnnnnnnnnnnnnnnnnnnnnnnnnnnnnnnnnnnnnnnnnnnnnnnnnnnnnnnnnnnnnnnnnnnnnnnnnnnnnnnnnnnnnnnnnnnnnnnnnnnnnnnnnnnnnnnnnnnnnnnnnnnnnnnnnnnnnnnnnnnnnnnnnnnnnnnnnnnnnnnnnnnnnnnnnnnnnnnnnnnnnnnnnnnnnnnnnnnnnnnnnnnnnnnnnnnnnnnnnnnnnnnnnnnnnnnnnnnnnnnnnnnnnnnnnnnnnnnnnnnnnnnnnnnnnnnnnnnnnnnnnnnnnnnnnnnnnnnnnnnnnnnnnnnnnnnnnnnnnnnnnnnnnnnnnnnnnnnnnnnnnnnnnnnnnnnnnnnnnnnnnnnnnnnnnnnnnnnnnnnnnnnnnnnnnnnnnnnnnnnnnnnnnnnnnnnnnnnnnnnnnnnnnnnnnnnnnnnnnnnnnnnnnnnnnnnnnnnnnnnnnnnnnnnnnnnnnnnnnnnnnnnnnnnnnnnnnnnnnnnnnnnnnnnnnnnnnnnnnnnnnnnnnnnnnnnnnnnnnnnnnnnnnnnnnnnnnnnnnnnnnnnnnnnnnnnnnnnnnnnnnnnnnnnnnnnnnnnnnnnnnnnnnnnnnnnnnnnnnnnnnnnnnnnnnnnnnnnnnnnnnnnnnnnnnnnnnnnnnnnnnnnnnnnnnnnnnnnnnnnnnnnnnnnnnnnnnnnnnnnnnnnnnnnnnnnnnnnnnnnnnnnnnnnnnnnnnnnnnnnnnnnnnnnnnnnnnnnnnnnnnnnnnnnnnnnnnnnnnnnnnnnnnnnnnnnnnnnnnnnnnnnnnnnnnnnnnnnnnnnnnnnnnnnnnnnnnnnnnnnnnnnnnnnnnnnnnnnnnnnnnnnnnnnnnnnnnnnnnnnnnnnnnnnnnnnnnnnnnnnnnnnnnnnnnnnnnnnnnnnnnnnnnnnnnnnnnnnnnnnnnnnnnnnnnnnnnnnnnnnnnnnnnnnnnnnnnnnnnnnnnnnnnnnnnnnnnnnnnnnnnnnnnnnnnnnnnnnnnnnnnnnnnnnnnnnnnnnnnnnnnnnnnnnnnnnnnnnnnnnnnnnnnnnnnnnnnnnnnnnnnnnnnnnnnnnnnnnnnnnnnnnnnnnnnnnnnnnnnnnnnnnnnnnnnnnnnnnnnnnnnnnnnnnnnnnnnnnnnnnnnnnnnnnnnnnnnnnnnnnnnnnnnnnnnnnnnnnnnnnnnnnnnnnnnnnnnnnnnnnnnnnnnnnnnnnnnnnnnnnnnnnnnnnnnnnnnnnnnnnnnnnnnnnnnnnnnnnnnnnnnnnnnnnnnnnnnnnnnnnnnnnnnnnnnnnnnnnnnnnnnnnnnnnnnnnnnnnnnnnnnnnnnnnnnnnnnnnnnnnnnnnnnnnnnnnnnnnnnnnnnnnnnnnnnnnnnnnnnnnnnnnnnnnnnnnnnnnnnnnnnnnnnnnnnnnnnnnnnnnnnnnnnnnnnnnnnnnnnnnnnnnnnnnnnnnnnnnnnnnnnnnnnnnnnnnnnnnnnnnnnnnnnnnnnnnnnnnnnnnnnnnnnnnnnnnnnnnnnnnnnnnnnnnnnnnnnnnnnnnnnnnnnnnnnnnnnnnnnnnnnnnnnnnnnnnnnnnnnnnnnnnnnnnnnnnnnnnnnnnnnnnnnnnnnnnnnnnnnnnnnnnnnnnnnnnnnnnnnnnnnnnnnnnnnnnnnnnnnnnnnnnnnnnnnnnnnnnnnnnnnnnnnnnnnnnnnnnnnnnnnnnnnnnnnnnnnnnnnnnnnnnnnnnnnnnnnnnnnnnnnnnnnnnnnnnnnnnnnnnnnnnnnnnnnnnnnnnnnnnnnnnnnnnnnnnnnnnnnnnnnnnnnnnnnnnnnnnnnnnnnnnnnnnnnnnnnnnnnnnnnnnnnnnnnnnnnnnnnnnnnnnnnnnnnnnnnnnnnnnnnnnnnnnnnnnnnnnnnnnnnnnnnnnnnnnnnnnnnnnnnnnnnnnnnnnnnnnnnnnnnnnnnnnnnnnnnnnnnnnnnnnnnnnnnnnnnnnnnnnnnnnnnnnnnnnnnnnnnnnnnnnnnnnnnnnnnnnnnnnnnnnnnnnnnnnnnnnnnnnnnnnnnnnnnnnnnnnnnnnnnnnnnnnnnnnnnnnnnnnnnnnnnnnnnnnnnnnnnnnnnnnnnnnnnnnnnnnnnnnnnnnnnnnnnnnnnnnnnnnnnnnnnnnnnnnnnnnnnnnnnnnnnnnnnnnnnnnnnnnnnnnnnnnnnnnnnnnnnnnnnnnnnnnnnnnnnnnnnnnnnnnnnnnnnnnnnnnnnnnnnnnnnnnnnnnnnnnnnnnnnnnnnnnnnnnnnnnnnnnnnnnnnnnnnnnnnnnnnnnnnnnnnnnnnnnnnnnnnnnnnnnnnnnnnnnnnnnnnnnnnnnnnnnnnnnnnnnnnnnnnnnnnnnnnnnnnnnnnnnnnnnnnnnnnnnnnnnnnnnnnnnnnnnnnnnnnnnnnnnnnnnnnnnnnnnnnnnnnnnnnnnnnnnnnnnnnnnnnnnnnnnnnnnnnnnnnnnnnnnnnnnnnnnnnnnnnnnnnnnnnnnnnnnnnnnnnnnnnnnnnnnnnnnnnnnnnnnnnnnnnnnnnnnnnnnnnnnnnnnnnnnnnnnnnnnnnnnnnnnnnnnnnnnnnnnnnnnnnnnnnnnnnnnnnnnnnnnnnnnnnnnnnnnnnnnnnnnnnnnnnnnnnnnnnnnnnnnnnnnnnnnnnnnnnnnnnnnnnnnnnnnnnnnnnnnnnnnnnnnnnnnnnnnnnnnnnnnnnnnnnnnnnnnnnnnnnnnnnnnnnnnnnnnnnnnnnnnnnnnnnnnnnnnnnnnnnnnnnnnnnnnnnnnnnnnnnnnnnnnnnnnnnnnnnnnnnnnnnnnnnnnnnnnnnnnnnnnnnnnnnnnnnnnnnnnnnnnnnnnnnnnnnnnnnnnnnnnnnnnnnnnnnnnnnnnnnnnnnnnnnnnnnnnnnnnnnnnnnnnnnnnnnnnnnnnnnnnnnnnnnnnnnnnnnnnnnnnnnnnnnnnnnnnnnnnnnnnnnnnnnnnnnnnnnnnnnnnnnnnnnnnnnnnnnnnnnnnnnnnnnnnnnnnnnnnnnnnnnnnnnnnnnnnnnnnnnnnnnnnnnnnnnnnnnnnnnnnnnnnnnnnnnnnnnnnnnnnnnnnnnnnnnnnnnnnnnnnnnnnnnnnnnnnnnnnnnnnnnnnnnnnnnnnnnnnnnnnnnnnnnnnnnnnnnnnnnnnnnnnnnnnnnnnnnnnnnnnnnnnnnnnnnnnnnnnnnnnnnnnnnnnnnnnnnnnnnnnnnnnnnnnnnnnnnnnnnnnnnnnnnnnnnnnnnnnnnnnnnnnnnnnnnnnnnnnnnnnnnnnnnnnnnnnnnnnnnnnnnnnnnnnnnnnnnnnnnnnnnnnnnnnnnnnnnnnnnnnnnnnnnnnnnnnnnnnnnnnnnnnnnnnnnnnnnnnnnnnnnnnnnnnnnnnnnnnnnnnnnnnnnnnnnnnnnnnnnnnnnnnnnnnnnnnnnnnnnnnnnnnnnnnnnnnnnnnnnnnnnnnnnnnnnnnnnnnnnnnnnnnnnnnnnnnnnnnnnnnnnnnnnnnnnnnnnnnnnnnnnnnnnnnnnnnnnnnnnnnnnnnnnnnnnnnnnnnnnnnnnnnnnnnnnnnnnnnnnnnnnnnnnnnnnnnnnnnnnnnnnnnnnnnnnnnnnnnnnnnnnnnnnnnnnnnnnnnnnnnnnnnnnnnnnnnnnnnnnnnnnnnnnnnnnnnnnnnnnnnnnnnnnnnnnnnnnnnnnnnnnnnnnnnnnnnnnnnnnnnnnnnnnnnnnnnnnnnnnnnnnnnnnnnnnnnnnnnnnnnnnnnnnnnnnnnnnnnnnnnnnnnnnnnnnnnnnnnnnnnnnnnnnnnnnnnnnnnnnnnnnnnnnnnnnnnnnnnnnnnnnnnnnnnnnnnnnnnnnnnnnnnnnnnnnnnnnnnnnnnnnnnnnnnnnnnnnnnnnnnnnnnnnnnnnnnnnnnnnnnnnnnnnnnnnnnnnnnnnnnnnnnnnnnnnnnnnnnnnnnnnnnnnnnnnnnnnnnnnnnnnnnnnnnnnnnnnnnnnnnnnnnnnnnnnnnnnnnnnnnnnnnnnnnnnnnnnnnnnnnnnnnnnnnnnnnnnnnnnnnnnnnnnnnnnnnnnnnnnnnnnnnnnnnnnnnnnnnnnnnnnnnnnnnnnnnnnnnnnnnnnnnnnnnnnnnnnnnnnnnnnnnnnnnnnnnnnnnnnnnnnnnnnnnnnnnnnnnnnnnnnnnnnnnnnnnnnnnnnnnnnnnnnnnnnnnnnnnnnnnnnnnnnnnnnnnnnnnnnnnnnnnnnnnnnnnnnnnnnnnnnnnnnnnnnnnnnnnnnnnnnnnnnnnnnnnnnnnnnnnnnnnnnnnnnnnnnnnnnnnnnnnnnnnnnnnnnnnnnnnnnnnnnnnnnnnnnnnnnnnnnnnnnnnnnnnnnnnnnnnnnnnnnnnnnnnnnnnnnnnnnnnnnnnnnnnnnnnnnnnnnnnnnnnnnnnnnnnnnnnnnnnnnnnnnnnnnnnnnnnnnnnnnnnnnnnnnnnnnnnnnnnnnnnnnnnnnnnnnnnnnnnnnnnnnnnnnnnnnnnnnnnnnnnnnnnnnnnnnnnnnnnnnnnnnnnnnnnnnnnnnnnnnnnnnnnnnnnnnnnnnnnnnnnnnnnnnnnnnnnnnnnnnnnnnnnnnnnnnnnnnnnnnnnnnnnnnnnnnnnnnnnnnnnnnnnnnnnnnnnnnnnnnnnnnnnnnnnnnnnnnnnnnnnnnnnnnnnnnnnnnnnnnnnnnnnnnnnnnnnnnnnnnnnnnnnnnnnnnnnnnnnnnnnnnnnnnnnnnnnnnnnnnnnnnnnnnnnnnnnnnnnnnnnnnnnnnnnnnnnnnnnnnnnnnnnnnnnnnnnnnnnnnnnnnnnnnnnnnnnnnnnnnnnnnnnnnnnnnnnnnnnnnnnnnnnnnnnnnnnnnnnnnnnnnnnnnnnnnnnnnnnnnnnnnnnnnnnnnnnnnnnnnnnnnnnnnnnnnnnnnnnnnnnnnnnnnnnnnnnnnnnnnnnnnnnnnnnnnnnnnnnnnnnnnnnnnnnnnnnnnnnnnnnnnnnnnnnnnnnnnnnnnnnnnnnnnnnnnnnnnnnnnnnnnnnnnnnnnnnnnnnnnnnnnnnnnnnnnnnnnnnnnnnnnnnnnnnnnnnnnnnnnnnnnnnnnnnnnnnnnnnnnnnnnnnnnnnnnnnnnnnnnnnnnnnnnnnnnnnnnnnnnnnnnnnnnnnnnnnnnnnnnnnnnnnnnnnnnnnnnnnnnnnnnnnnnnnnnnnnnnnnnnnnnnnnnnnnnnnnnnnnnnnnnnnnnnnnnnnnnnnnnnnnnnnnnnnnnnnnnnnnnnnnnnnnnnnnnnnnnnnnnnnnnnnnnnnnnnnnnnnnnnnnnnnnnnnnnnnnnnnnnnnnnnnnnnnnnnnnnnnnnnnnnnnnnnnnnnnnnnnnnnnnnnnnnnnnnnnnnnnnnnnnnnnnnnnnnnnnnnnnnnnnnnnnnnnnnnnnnnnnnnnnnnnnnnnnnnnnnnnnnnnnnnnnnnnnnnnnnnnnnnnnnnnnnnnnnnnnnnnnnnnnnnnnnnnnnnnnnnnnnnnnnnnnnnnnnnnnnnnnnnnnnnnnnnnnnnnnnnnnnnnnnnnnnnnnnnnnnnnnnnnnnnnnnnnnnnnnnnnnnnnnnnnnnnnnnnnnnnnnnnnnnnnnnnnnnnnnnnnnnnnnnnnnnnnnnnnnnnnnnnnnnnnnnnnnnnnnnnnnnnnnnnnnnnnnnnnnnnnnnnnnnnnnnnnnnnnnnnnnnnnnnnnnnnnnnnnnnnnnnnnnnnnnnnnnnnnnnnnnnnnnnnnnnnnnnnnnnnnnnnnnnnnnnnnnnnnnnnnnnnnnnnnnnnnnnnnnnnnnnnnnnnnnnnnnnnnnnnnnnnnnnnnnnnnnnnnnnnnnnnnnnnnnnnnnnnnnnnnnnnnnnnnnnnnnnnnnnnnnnnnnnnnnnnnnnnnnnnnnnnnnnnnnnnnnnnnnnnnnnnnnnnnnnnnnnnnnnnnnnnnnnnnnnnnnnnnnnnnnnnnnnnnnnnnnnnnnnnnnnnnnnnnnnnnnnnnnnnnnnnnnnnnnnnnnnnnnnnnnnnnnnnnnnnnnnnnnnnnnnnnnnnnnnnnnnnnnnnnnnnnnnnnnnnnnnnnnnnnnnnnnnnnnnnnnnnnnnnnnnnnnnnnnnnnnnnnnnnnnnnnnnnnnnnnnnnnnnnnnnnnnnnnnnnnnnnnnnnnnnnnnnnnnnnnnnnnnnnnnnnnnnnnnnnnnnnnnnnnnnnnnnnnnnnnnnnnnnnnnnnnnnnnnnnnnnnnnnnnnnnnnnnnnnnnnnnnnnnnnnnnnnnnnnnnnnnnnnnnnnnnnnnnnnnnnnnnnnnnnnnnnnnnnnnnnnnnnnnnnnnnnnnnnnnnnnnnnnnnnnnnnnnnnnnnnnnnnnnnnnnnnnnnnnnnnnnnnnnnnnnnnnnnnnnnnnnnnnnnnnnnnnnnnnnnnnnnnnnnnnnnnnnnnnnnnnnnnnnnnnnnnnnnnnnnnnnnnnnnnnnnnnnnnnnnnnnnnnnnnnnnnnnnnnnnnnnnnnnnnnnnnnnnnnnnnnnnnnnnnnnnnnnnnnnnnnnnnnnnnnnnnnnnnnnnnnnnnnnnnnnnnnnnnnnnnnnnnnnnnnnnnnnnnnnnnnnnnnnnnnnnnnnnnnnnnnnnnnnnnnnnnnnnnnnnnnnnnnnnnnnnnnnnnnnnnnnnnnnnnnnnnnnnnnnnnnnnnnnnnnnnnnnnnnnnnnnnnnnnnnnnnnnnnnnnnnnnnnnnnnnnnnnnnnnnnnnnnnnnnnnnnnnnnnnnnnnnnnnnnnnnnnnnnnnnnnnnnnnnnnnnnnnnnnnnnnnnnnnnnnnnnnnnnnnnnnnnnnnnnnnnnnnnnnnnnnnnnnnnnnnnnnnnnnnnnnnnnnnnnnnnnnnnnnnnnnnnnnnnnnnnnnnnnnnnnnnnnnnnnnnnnnnnnnnnnnnnnnnnnnnnnnnnnnnnnnnnnnnnnnnnnnnnnnnnnnnnnnnnnnnnnnnnnnnnnnnnnnnnnnnnnnnnnnnnnnnnnnnnnnnnnnnnnnnnnnnnnnnnnnnnnnnnnnnnnnnnnnnnnnnnnnnnnnnnnnnnnnnnnnnnnnnnnnnnnnnnnnnnnnnnnnnnnnnnnnnnnnnnnnnnnnnnnnnnnnnnnnnnnnnnnnnnnnnnnnnnnnnnnnnnnnnnnnnnnnnnnnnnnnnnnnnnnnnnnnnnnnnnnnnnnnnnnnnnnnnnnnnnnnnnnnnnnnnnnnnnnnnnnnnnnnnnnnnnnnnnnnnnnnnnnnnnnnnnnnnnnnnnnnnnnnnnnnnnnnnnnnnnnnnnnnnnnnnnnnnnnnnnnnnnnnnnnnnnnnnnnnnnnnnnnnnnnnnnnnnnnnnnnnnnnnnnnnnnnnnnnnnnnnnnnnnnnnnnnnnnnnnnnnnnnnnnnnnnnnnnnnnnnnnnnnnnnnnnnnnnnnnnnnnnnnnnnnnnnnnnnnnnnnnnnnnnnnnnnnnnnnnnnnnnnnnnnnnnnnnnnnnnnnnnnnnnnnnnnnnnnnnnnnnnnnnnnnnnnnnnnnnnnnnnnnnnnnnnnnnnnnnnnnnnnnnnnnnnnnnnnnnnnnnnnnnnnnnnnnnnnnnnnnnnnnnnnnnnnnnnnnnnnnnnnnnnnnnnnnnnnnnnnnnnnnnnnnnnnnnnnnnnnnnnnnnnnnnnnnnnnnnnnnnnnnnnnnnnnnnnnnnnnnnnnnnnnnnnnnnnnnnnnnnnnnnnnnnnnnnnnnnnnnnnnnnnnnnnnnnnnnnnnnnnnnnnnnnnnnnnnnnnnnnnnnnnnnnnnnnnnnnnnnnnnnnnnnnnnnnnnnnnnnnnnnnnnnnnnnnnnnnnnnnnnnnnnnnnnnnnnnnnnnnnnnnnnnnnnnnnnnnnnnnnnnnnnnnnnnnnnnnnnnnnnnnnnnnnnnnnnnnnnnnnnnnnnnnnnnnnnnnnnnnnnnnnnnnnnnnnnnnnnnnnnnnnnnnnnnnnnnnnnnnnnnnnnnnnnnnnnnnnnnnnnnnnnnnnnnnnnnnnnnnnnnnnnnnnnnnnnnnnnnnnnnnnnnnnnnnnnnnnnnnnnnnnnnnnnnnnnnnnnnnnnnnnnnnnnnnnnnnnnnnnnnnnnnnnnnnnnnnnnnnnnnnnnnnnnnnnnnnnnnnnnnnnnnnnnnnnnnnnnnnnnnnnnnnnnnnnnnnnnnnnnnnnnnnnnnnnnnnnnnnnnnnnnnnnnnnnnnnnnnnnnnnnnnnnnnnnnnnnnnnnnnnnnnnnnnnnnnnnnnnnnnnnnnnnnnnnnnnnnnnnnnnnnnnnnnnnnnnnnnnnnnnnnnnnnnnnnnnnnnnnnnnnnnnnnnnnnnnnnnnnnnnnnnnnnnnnnnnnnnnnnnnnnnnnnnnnnnnnnnnnnnnnnnnnnnnnnnnnnnnnnnnnnnnnnnnnnnnnnnnnnnnnnnnnnnnnnnnnnnnnnnnnnnnnnnnnnnnnnnnnnnnnnnnnnnnnnnnnnnnnnnnnnnnnnnnnnnnnnnnnnnnnnnnnnnnnnnnnnnnnnnnnnnnnnnnnnnnnnnnnnnnnnnnnnnnnnnnnnnnnnnnnnnnnnnnnnnnnnnnnnnnnnnnnnnnnnnnnnnnnnnnnnnnnnnnnnnnnnnnnnnnnnnnnnnnnnnnnnnnnnnnnnnnnnnnnnnnnnnnnnnnnnnnnnnnnnnnnnnnnnnnnnnnnnnnnnnnnnnnnnnnnnnnnnnnnnnnnnnnnnnnnnnnnnnnnnnnnnnnnnnnnnnnnnnnnnnnnnnnnnnnnnnnnnnnnnnnnnnnnnnnnnnnnnnnnnnnnnnnnnnnnnnnnnnnnnnnnnnnnnnnnnnnnnnnnnnnnnnnnnnnnnnnnnnnnnnnnnnnnnnnnnnnnnnnnnnnnnnnnnnnnnnnnnnnnnnnnnnnnnnnnnnnnnnnnnnnnnnnnnnnnnnnnnnnnnnnnnnnnnnnnnnnnnnnnnnnnnnnnnnnnnnnnnnnnnnnnnnnnnnnnnnnnnnnnnnnnnnnnnnnnnnnnnnnnnnnnnnnnnnnnnnnnnnnnnnnnnnnnnnnnnnnnnnnnnnnnnnnnnnnnnnnnnnnnnnnnnnnnnnnnnnnnnnnnnnnnnnnnnnnnnnnnnnnnnnnnnnnnnnnnnnnnnnnnnnnnnnnnnnnnnnnnnnnnnnnnnnnnnnnnnnnnnnnnnnnnnnnnnnnnnnnnnnnnnnnnnnnnnnnnnnnnnnnnnnnnnnnnnnnnnnnnnnnnnnnnnnnnnnnnnnnnnnnnnnnnnnnnnnnnnnnnnnnnnnnnnnnnnnnnnnnnnnnnnnnnnnnnnnnnnnnnnnnnnnnnnnnnnnnnnnnnnnnnnnnnnnnnnnnnnnnnnnnnnnnnnnnnnnnnnnnnnnnnnnnnnnnnnnnnnnnnnnnnnnnnnnnnnnnnnnnnnnnnnnnnnnnnnnnnnnnnnnnnnnnnnnnnnnnnnnnnnnnnnnnnnnnnnnnnnnnnnnnnnnnnnnnnnnnnnnnnnnnnnnnnnnnnnnnnnnnnnnnnnnnnnnnnnnnnnnnnnnnnnnnnnnnnnnnnnnnnnnnnnnnnnnnnnnnnnnnnnnnnnnnnnnnnnnnnnnnnnnnnnnnnnnnnnnnnnnnnnnnnnnnnnnnnnnnnnnnnnnnnnnnnnnnnnnnnnnnnnnnnnnnnnnnnnnnnnnnnnnnnnnnnnnnnnnnnnnnnnnnnnnnnnnnnnnnnnnnnnnnnnnnnnnnnnnnnnnnnnnnnnnnnnnnnnnnnnnnnnnnnnnnnnnnnnnnnnnnnnnnnnnnnnnnnnnnnnnnnnnnnnnnnnnnnnnnnnnnnnnnnnnnnnnnnnnnnnnnnnnnnnnnnnnnnnnnnnnnnnnnnnnnnnnnnnnnnnnnnnnnnnnnnnnnnnnnnnnnnnnnnnnnnnnnnnnnnnnnnnnnnnnnnnnnnnnnnnnnnnnnnnnnnnnnnnnnnnnnnnnnnnnnnnnnnnnnnnnnnnnnnnnnnnnnnnnnnnnnnnnnnnnnnnnnnnnnnnnnnnnnnnnnnnnnnnnnnnnnnnnnnnnnnnnnnnnnnnnnnnnnnnnnnnnnnnnnnnnnnnnnnnnnnnnnnnnnnnnnnnnnnnnnnnnnnnnnnnnnnnnnnnnnnnnnnnnnnnnnnnnnnnnnnnnnnnnnnnnnnnnnnnnnnnnnnnnnnnnnnnnnnnnnnnnnnnnnnnnnnnnnnnnnnnnnnnnnnnnnnnnnnnnnnnnnnnnnnnnnnnnnnnnnnnnnnnnnnnnnnnnnnnnnnnnnnnnnnnnnnnnnnnnnnnnnnnnnnnnnnnnnnnnnnnnnnnnnnnnnnnnnnnnnnnnnnnnnnnnnnnnnnnnnnnnnnnnnnnnnnnnnnnnnnnnnnnnnnnnnnnnnnnnnnnnnnnnnnnnnnnnnnnnnnnnnnnnnnnnnnnnnnnnnnnnnnnnnnnnnnnnnnnnnnnnnnnnnnnnnnnnnnnnnnnnnnnnnnnnnnnnnnnnnnnnnnnnnnnnnnnnnnnnnnnnnnnnnnnnnnnnnnnnnnnnnnnnnnnnnnnnnnnnnnnnnnnnnnnnnnnnnnnnnnnnnnnnnnnnnnnnnnnnnnnnnnnnnnnnnnnnnnnnnnnnnnnnnnnnnnnnnnnnnnnnnnnnnnnnnnnnnnnnnnnnnnnnnnnnnnnnnnnnnnnnnnnnnnnnnnnnnnnnnnnnnnnnnnnnnnnnnnnnnnnnnnnnnnnnnnnnnnnnnnnnnnnnnnnnnnnnnnnnnnnnnnnnnnnnnnnnnnnnnnnnnnnnnnnnnnnnnnnnnnnnnnnnnnnnnnnnnnnnnnnnnnnnnnnnnnnnnnnnnnnnnnnnnnnnnnnnnnnnnnnnnnnnnnnnnnnnnnnnnnnnnnnnnnnnnnnnnnnnnnnnnnnnnnnnnnnnnnnnnnnnnnnnnnnnnnnnnnnnnnnnnnnnnnnnnnnnnnnnnnnnnnnnnnnnnnnnnnnnnnnnnnnnnnnnnnnnnnnnnnnnnnnnnnnnnnnnnnnnnnnnnnnnnnnnnnnnnnnnnnnnnnnnnnnnnnnnnnnnnnnnnnnnnnnnnnnnnnnnnnnnnnnnnnnnnnnnnnnnnnnnnnnnnnnnnnnnnnnnnnnnnnnnnnnnnnnnnnnnnnnnnnnnnnnnnnnnnnnnnnnnnnnnnnnnnnnnnnnnnnnnnnnnnnnnnnnnnnnnnnnnnnnnnnnnnnnnnnnnnnnnnnnnnnnnnnnnnnnnnnnnnnnnnnnnnnnnnnnnnnnnnnnnnnnnnnnnnnnnnnnnnnnnnnnnnnnnnnnnnnnnnnnnnnnnnnnnnnnnnnnnnnnnnnnnnnnnnnnnnnnnnnnnnnnnnnnnnnnnnnnnnnnnnnnnnnnnnnnnnnnnnnnnnnnnnnnnnnnnnnnnnnnnnnnnnnnnnnnnnnnnnnnnnnnnnnnnnnnnnnnnnnnnnnnnnnnnnnnnnnnnnnnnnnnnnnnnnnnnnnnnnnnnnnnnnnnnnnnnnnnnnnnnnnnnnnnnnnnnnnnnnnnnnnnnnnnnnnnnnnnnnnnnnnnnnnnnnnnnnnnnnnnnnnnnnnnnnnnnnnnnnnnnnnnnnnnnnnnnnnnnnnnnnnnnnnnnnnnnnnnnnnnnnnnnnnnnnnnnnnnnnnnnnnnnnnnnnnnnnnnnnnnnnnnnnnnnnnnnnnnnnnnnnnnnnnnnnnnnnnnnnnnnnnnnnnnnnnnnnnnnnnnnnnnnnnnnnnnnnnnnnnnnnnnnnnnnnnnnnnnnnnnnnnnnnnnnnnnnnnnnnnnnnnnnnnnnnnnnnnnnnnnnnnnnnnnnnnnnnnnnnnnnnnnnnnnnnnnnnnnnnnnnnnnnnnnnnnnnnnnnnnnnnnnnnnnnnnnnnnnnnnnnnnnnnnnnnnnnnnnnnnnnnnnnnnnnnnnnnnnnnnnnnnnnnnnnnnnnnnnnnnnnnnnnnnnnnnnnnnnnnnnnnnnnnnnnnnnnnnnnnnnnnnnnnnnnnnnnnnnnnnnnnnnnnnnnnnnnnnnnnnnnnnnnnnnnnnnnnnnnnnnnnnnnnnnnnnnnnnnnnnnnnnnnnnnnnnnnnnnnnnnnnnnnnnnnnnnnnnnnnnnnnnnnnnnnnnnnnnnnnnnnnnnnnnnnnnnnnnnnnnnnnnnnnnnnnnnnnnnnnnnnnnnnnnnnnnnnnnnnnnnnnnnnnnnnnnnnnnnnnnnnnnnnnnnnnnnnnnnnnnnnnnnnnnnnnnnnnnnnnnnnnnnnnnnnnnnnnnnnnnnnnnnnnnnnnnnnnnnnnnnnnnnnnnnnnnnnnnnnnnnnnnnnnnnnnnnnnnnnnnnnnnnnnnnnnnnnnnnnnnnnnnnnnnnnnnnnnnnnnnnnnnnnnnnnnnnnnnnnnnnnnnnnnnnnnnnnnnnnnnnnnnnnnnnnnnnnnnnnnnnnnnnnnnnnnnnnnnnnnnnnnnnnnnnnnnnnnnnnnnnnnnnnnnnnnnnnnnnnnnnnnnnnnnnnnnnnnnnnnnnnnnnnnnnnnnnnnnnnnnnnnnnnnnnnnnnnnnnnnnnnnnnnnnnnnnnnnnnnnnnnnnnnnnnnnnnnnnnnnnnnnnnnnnnnnnnnnnnnnnnnnnnnnnnnnnnnnnnnnnnnnnnnnnnnnnnnnnnnnnnnnnnnnnnnnnnnnnnnnnnnnnnnnnnnnnnnnnnnnnnnnnnnnnnnnnnnnnnnnnnnnnnnnnnnnnnnnnnnnnnnnnnnnnnnnnnnnnnnnnnnnnnnnnnnnnnnnnnnnnnnnnnnnnnnnnnnnnnnnnnnnnnnnnnnnnnnnnnnnnnnnnnnnnnnnnnnnnnnnnnnnnnnnnnnnnnnnnnnnnnnnnnnnnnnnnnnnnnnnnnnnnnnnnnnnnnnnnnnnnnnnnnnnnnnnnnnnnnnnnnnnnnnnnnnnnnnnnnnnnnnnnnnnnnnnnnnnnnnnnnnnnnnnnnnnnnnnnnnnnnnnnnnnnnnnnnnnnnnnnnnnnnnnnnnnnnnnnnnnnnnnnnnnnnnnnnnnnnnnnnnnnnnnnnnnnnnnnnnnnnnnnnnnnnnnnnnnnnnnnnnnnnnnnnnnnnnnnnnnnnnnnnnnnnnnnnnnnnnnnnnnnnnnnnnnnnnnnnnnnnnnnnnnnnnnnnnnnnnnnnnnnnnnnnnnnnnnnnnnnnnnnnnnnnnnnnnnnnnnnnnnnnnnnnnnnnnnnnnnnnnnnnnnnnnnnnnnnnnnnnnnnnnnnnnnnnnnnnnnnnnnnnnnnnnnnnnnnnnnnnnnnnnnnnnnnnnnnnnnnnnnnnnnnnnnnnnnnnnnnnnnnnnnnnnnnnnnnnnnnnnnnnnnnnnnnnnnnnnnnnnnnnnnnnnnnnnnnnnnnnnnnnnnnnnnnnnnnnnnnnnnnnnnnnnnnnnnnnnnnnnnnnnnnnnnnnnnnnnnnnnnnnnnnnnnnnnnnnnnnnnnnnnnnnnnnnnnnnnnnnnnnnnnnnnnnnnnnnnnnnnnnnnnnnnnnnnnnnnnnnnnnnnnnnnnnnnnnnnnnnnnnnnnnnnnnnnnnnnnnnnnnnnnnnnnnnnnnnnnnnnnnnnnnnnnnnnnnnnnnnnnnnnnnnnnnnnnnnnnnnnnnnnnnnnnnnnnnnnnnnnnnnnnnnnnnnnnnnnnnnnnnnnnnnnnnnnnnnnnnnnnnnnnnnnnnnnnnnnnnnnnnnnnnnnnnnnnnnnnnnnnnnnnnnnnnnnnnnnnnnnnnnnnnnnnnnnnnnnnnnnnnnnnnnnnnnnnnnnnnnnnnnnnnnnnnnnnnnnnnnnnnnnnnnnnnnnnnnnnnnnnnnnnnnnnnnnnnnnnnnnnnnnnnnnnnnnnnnnnnnnnnnnnnnnnnnnnnnnnnnnnnnnnnnnnnnnnnnnnnnnnnnnnnnnnnnnnnnnnnnnnnnnnnnnnnnnnnnnnnnnnnnnnnnnnnnnnnnnnnnnnnnnnnnnnnnnnnnnnnnnnnnnnnnnnnnnnnnnnnnnnnnnnnnnnnnnnnnnnnnnnnnnnnnnnnnnnnnnnnnnnnnnnnnnnnnnnnnnnnnnnnnnnnnnnnnnnnnnnnnnnnnnnnnnnnnnnnnnnnnnnnnnnnnnnnnnnnnnnnnnnnnnnnnnnnnnnnnnnnnnnnnnnnnnnnnnnnnnnnnnnnnnnnnnnnnnnnnnnnnnnnnnnnnnnnnnnnnnnnnnnnnnnnnnnnnnnnnnnnnnnnnnnnnnnnnnnnnnnnnnnnnnnnnnnnnnnnnnnnnnnnnnnnnnnnnnnnnnnnnnnnnnnnnnnnnnnnnnnnnnnnnnnnnnnnnnnnnnnnnnnnnnnnnnnnnnnnnnnnnnnnnnnnnnnnnnnnnnnnnnnnnnnnnnnnnnnnnnnnnnnnnnnnnnnnnnnnnnnnnnnnnnnnnnnnnnnnnnnnnnnnnnnnnnnnnnnnnnnnnnnnnnnnnnnnnnnnnnnnnnnnnnnnnnnnnnnnnnnnnnnnnnnnnnnnnnnnnnnnnnnnnnnnnnnnnnnnnnnnnnnnnnnnnnnnnnnnnnnnnnnnnnnnnnnnnnnnnnnnnnnnnnnnnnnnnnnnnnnnnnnnnnnnnnnnnnnnnnnnnnnnnnnnnnnnnnnnnnnnnnnnnnnnnnnnnnnnnnnnnnnnnnnnnnnnnnnnnnnnnnnnnnnnnnnnnnnnnnnnnnnnnnnnnnnnnnnnnnnnnnnnnnnnnnnnnnnnnnnnnnnnnnnnnnnnnnnnnnnnnnnnnnnnnnnnnnnnnnnnnnnnnnnnnnnnnnnnnnnnnnnnnnnnnnnnnnnnnnnnnnnnnnnnnnnnnnnnnnnnnnnnnnnnnnnnnnnnnnnnnnnnnnnnnnnnnnnnnnnnnnnnnnnnnnnnnnnnnnnnnnnnnnnnnnnnnnnnnnnnnnnnnnnnnnnnnnnnnnnnnnnnnnnnnnnnnnnnnnnnnnnnnnnnnnnnnnnnnnnnnnnnnnnnnnnnnnnnnnnnnnnnnnnnnnnnnnnnnnnnnnnnnnnnnnnnnnnnnnnnnnnnnnnnnnnnnnnnnnnnnnnnnnnnnnnnnnnnnnnnnnnnnnnnnnnnnnnnnnnnnnnnnnnnnnnnnnnnnnnnnnnnnnnnnnnnnnnnnnnnnnnnnnnnnnnnnnnnnnnnnnnnnnnnnnnnnnnnnnnnnnnnnnnnnnnnnnnnnnnnnnnnnnnnnnnnnnnnnnnnnnnnnnnnnnnnnnnnnnnnnnnnnnnnnnnnnnnnnnnnnnnnnnnnnnnnnnnnnnnnnnnnnnnnnnnnnnnnnnnnnnnnnnnnnnnnnnnnnnnnnnnnnnnnnnnnnnnnnnnnnnnnnnnnnnnnnnnnnnnnnnnnnnnnnnnnnnnnnnnnnnnnnnnnnnnnnnnnnnnnnnnnnnnnnnnnnnnnnnnnnnnnnnnnnnnnnnnnnnnnnnnnnnnnnnnnnnnnnnnnnnnnnnnnnnnnnnnnnnnnnnnnnnnnnnnnnnnnnnnnnnnnnnnnnnnnnnnnnnnnnnnnnnnnnnnnnnnnnnnnnnnnnnnnnnnnnnnnnnnnnnnnnnnnnnnnnnnnnnnnnnnnnnnnnnnnnnnnnnnnnnnnnnnnnnnnnnnnnnnnnnnnnnnnnnnnnnnnnnnnnnnnnnnnnnnnnnnnnnnnnnnnnnnnnnnnnnnnnnnnnnnnnnnnnnnnnnnnnnnnnnnnnnnnnnnnnnnnnnnnnnnnnnnnnnnnnnnnnnnnnnnnnnnnnnnnnnnnnnnnnnnnnnnnnnnnnnnnnnnnnnnnnnnnnnnnnnnnnnnnnnnnnnnnnnnnnnnnnnnnnnnnnnnnnnnnnnnnnnnnnnnnnnnnnnnnnnnnnnnnnnnnnnnnnnnnnnnnnnnnnnnnnnnnnnnnnnnnnnnnnnnnnnnnnnnnnnnnnnnnnnnnnnnnnnnnnnnnnnnnnnnnnnnnnnnnnnnnnnnnnnnnnnnnnnnnnnnnnnnnnnnnnnnnnnnnnnnnnnnnnnnnnnnnnnnnnnnnnnnnnnnnnnnnnnnnnnnnnnnnnnnnnnnnnnnnnnnnnnnnnnnnnnnnnnnnnnnnnnnnnnnnnnnnnnnnnnnnnnnnnnnnnnnnnnnnnnnnnnnnnnnnnnnnnnnnnnnnnnnnnnnnnnnnnnnnnnnnnnnnnnnnnnnnnnnnnnnnnnnnnnnnnnnnnnnnnnnnnnnnnnnnnnnnnnnnnnnnnnnnnnnnnnnnnnnnnnnnnnnnnnnnnnnnnnnnnnnnnnnnnnnnnnnnnnnnnnnnnnnnnnnnnnnnnnnnnnnnnnnnnnnnnnnnnnnnnnnnnnnnnnnnnnnnnnnnnnnnnnnnnnnnnnnnnnnnnnnnnnnnnnnnnnnnnnnnnnnnnnnnnnnnnnnnnnnnnnnnnnnnnnnnnnnnnnnnnnnnnnnnnnnnnnnnnnnnnnnnnnnnnnnnnnnnnnnnnnnnnnnnnnnnnnnnnnnnnnnnnnnnnnnnnnnnnnnnnnnnnnnnnnnnnnnnnnnnnnnnnnnnnnnnnnnnnnnnnnnnnnnnnnnnnnnnnnnnnnnnnnnnnnnnnnnnnnnnnnnnnnnnnnnnnnnnnnnnnnnnnnnnnnnnnnnnnnnnnnnnnnnnnnnnnnnnnnnnnnnnnnnnnnnnnnnnnnnnnnnnnnnnnnnnnnnnnnnnnnnnnnnnnnnnnnnnnnnnnnnnnnnnnnnnnnnnnnnnnnnnnnnnnnnnnnnnnnnnnnnnnnnnnnnnnnnnnnnnnnnnnnnnnnnnnnnnnnnnnnnnnnnnnnnnnnnnnnnnnnnnnnnnnnnnnnnnnnnnnnnnnnnnnnnnnnnnnnnnnnnnnnnnnnnnnnnnnnnnnnnnnnnnnnnnnnnnnnnnnnnnnnnnnnnnnnnnnnnnnnnnnnnnnnnnnnnnnnnnnnnnnnnnnnnnnnnnnnnnnnnnnnnnnnnnnnnnnnnnnnnnnnnnnnnnnnnnnnnnnnnnnnnnnnnnnnnnnnnnnnnnnnnnnnnnnnnnnnnnnnnnnnnnnnnnnnnnnnnnnnnnnnnnnnnnnnnnnnnnnnnnnnnnnnnnnnnnnnnnnnnnnnnnnnnnnnnnnnnnnnnnnnnnnnnnnnnnnnnnnnnnnnnnnnnnnnnnnnnnnnnnnnnnnnnnnnnnnnnnnnnnnnnnnnnnnnnnnnnnnnnnnnnnnnnnnnnnnnnnnnnnnnnnnnnnnnnnnnnnnnnnnnnnnnnnnnnnnnnnnnnnnnnnnnnnnnnnnnnnnnnnnnnnnnnnnnnnnnnnnnnnnnnnnnnnnnnnnnnnnnnnnnnnnnnnnnnnnnnnnnnnnnnnnnnnnnnnnnnnnnnnnnnnnnnnnnnnnnnnnnnnnnnnnnnnnnnnnnnnnnnnnnnnnnnnnnnnnnnnnnnnnnnnnnnnnnnnnnnnnnnnnnnnnnnnnnnnnnnnnnnnnnnnnnnnnnnnnnnnnnnnnnnnnnnnnnnnnnnnnnnnnnnnnnnnnnnnnnnnnnnnnnnnnnnnnnnnnnnnnnnnnnnnnnnnnnnnnnnnnnnnnnnnnnnnnnnnnnnnnnnnnnnnnnnnnnnnnnnnnnnnnnnnnnnnnnnnnnnnnnnnnnnnnnnnnnnnnnnnnnnnnnnnnnnnnnnnnnnnnnnnnnnnnnnnnnnnnnnnnnnnnnnnnnnnnnnnnnnnnnnnnnnnnnnnnnnnnnnnnnnnnnnnnnnnnnnnnnnnnnnnnnnnnnnnnnnnnnnnnnnnnnnnnnnnnnnnnnnnnnnnnnnnnnnnnnnnnnnnnnnnnnnnnnnnnnnnnnnnnnnnnnnnnnnnnnnnnnnnnnnnnnnnnnnnnnnnnnnnnnnnnnnnnnnnnnnnnnnnnnnnnnnnnnnnnnnnnnnnnnnnnnnnnnnnnnnnnnnnnnnnnnnnnnnnnnnnnnnnnnnnnnnnnnnnnnnnnnnnnnnnnnnnnnnnnnnnnnnnnnnnnnnnnnnnnnnnnnnnnnnnnnnnnnnnnnnnnnnnnnnnnnnnnnnnnnnnnnnnnnnnnnnnnnnnnnnnnnnnnnnnnnnnnnnnnnnnnnnnnnnnnnnnnnnnnnnnnnnnnnnnnnnnnnnnnnnnnnnnnnnnnnnnnnnnnnnnnnnnnnnnnnnnnnnnnnnnnnnnnnnnnnnnnnnnnnnnnnnnnnnnnnnnnnnnnnnnnnnnnnnnnnnnnnnnnnnnnnnnnnnnnnnnnnnnnnnnnnnnnnnnnnnnnnnnnnnnnnnnnnnnnnnnnnnnnnnnnnnnnnnnnnnnnnnnnnnnnnnnnnnnnnnnnnnnnnnnnnnnnnnnnnnnnnnnnnnnnnnnnnnnnnnnnnnnnnnnnnnnnnnnnnnnnnnnnnnnnnnnnnnnnnnnnnnnnnnnnnnnnnnnnnnnnnnnnnnnnnnnnnnnnnnnnnnnnnnnnnnnnnnnnnnnnnnnnnnnnnnnnnnnnnnnnnnnnnnnnnnnnnnnnnnnnnnnnnnnnnnnnnnnnnnnnnnnnnnnnnnnnnnnnnnnnnnnnnnnnnnnnnnnnnnnnnnnnnnnnnnnnnnnnnnnnnnnnnnnnnnnnnnnnnnnnnnnnnnnnnnnnnnnnnnnnnnnnnnnnnnnnnnnnnnnnnnnnnnnnnnnnnnnnnnnnnnnnnnnnnnnnnnnnnnnnnnnnnnnnnnnnnnnnnnnnnnnnnnnnnnnnnnnnnnnnnnnnnnnnnnnnnnnnnnnnnnnnnnnnnnnnnnnnnnnnnnnnnnnnnnnnnnnnnnnnnnnnnnnnnnnnnnnnnnnnnnnnnnnnnnnnnnnnnnnnnnnnnnnnnnnnnnnnnnnnnnnnnnnnnnnnnnnnnnnnnnnnnnnnnnnnnnnnnnnnnnnnnnnnnnnnnnnnnnnnnnnnnnnnnnnnnnnnnnnnnnnnnnnnnnnnnnnnnnnnnnnnnnnnnnnnnnnnnnnnnnnnnnnnnnnnnnnnnnnnnnnnnnnnnnnnnnnnnnnnnnnnnnnnnnnnnnnnnnnnnnnnnnnnnnnnnnnnnnnnnnnnnnnnnnnnnnnnnnnnnnnnnnnnnnnnnnnnnnnnnnnnnnnnnnnnnnnnnnnnnnnnnnnnnnnnnnnnnnnnnnnnnnnnnnnnnnnnnnnnnnnnnnnnnnnnnnnnnnnnnnnnnnnnnnnnnnnnnnnnnnnnnnnnnnnnnnnnnnnnnnnnnnnnnnnnnnnnnnnnnnnnnnnnnnnnnnnnnnnnnnnnnnnnnnnnnnnnnnnnnnnnnnnnnnnnnnnnnnnnnnnnnnnnnnnnnnnnnnnnnnnnnnnnnnnnnnnnnnnnnnnnnnnnnnnnnnnnnnnnnnnnnnnnnnnnnnnnnnnnnnnnnnnnnnnnnnnnnnnnnnnnnnnnnnnnnnnnnnnnnnnnnnnnnnnnnnnnnnnnnnnnnnnnnnnnnnnnnnnnnnnnnnnnnnnnnnnnnnnnnnnnnnnnnnnnnnnnnnnnnnnnnnnnnnnnnnnnnnnnnnnnnnnnnnnnnnnnnnnnnnnnnnnnnnnnnnnnnnnnnnnnnnnnnnnnnnnnnnnnnnnnnnnnnnnnnnnnnnnnnnnnnnnnnnnnnnnnnnnnnnnnnnnnnnnnnnnnnnnnnnnnnnnnnnnnnnnnnnnnnnnnnnnnnnnnnnnnnnnnnnnnnnnnnnnnnnnnnnnnnnnnnnnnnnnnnnnnnnnnnnnnnnnnnnnnnnnnnnnnnnnnnnnnnnnnnnnnnnnnnnnnnnnnnnnnnnnnnnnnnnnnnnnnnnnnnnnnnnnnnnnnnnnnnnnnnnnnnnnnnnnnnnnnnnnnnnnnnnnnnnnnnnnnnnnnnnnnnnnnnnnnnnnnnnnnnnnnnnnnnnnnnnnnnnnnnnnnnnnnnnnnnnnnnnnnnnnnnnnnnnnnnnnnnnnnnnnnnnnnnnnnnnnnnnnnnnnnnnnnnnnnnnnnnnnnnnnnnnnnnnnnnnnnnnnnnnnnnnnnnnnnnnnnnnnnnnnnnnnnnnnnnnnnnnnnnnnnnnnnnnnnnnnnnnnnnnnnnnnnnnnnnnnnnnnnnnnnnnnnnnnnnnnnnnnnnnnnnnnnnnnnnnnnnnnnnnnnnnnnnnnnnnnnnnnnnnnnnnnnnnnnnnnnnnnnnnnnnnnnnnnnnnnnnnnnnnnnnnnnnnnnnnnnnnnnnnnnnnnnnnnnnnnnnnnnnnnnnnnnnnnnnnnnnnnnnnnnnnnnnnnnnnnnnnnnnnnnnnnnnnnnnnnnnnnnnnnnnnnnnnnnnnnnnnnnnnnnnnnnnnnnnnnnnnnnnnnnnnnnnnnnnnnnnnnnnnnnnnnnnnnnnnnnnnnnnnnnnnnnnnnnnnnnnnnnnnnnnnnnnnnnnnnnnnnnnnnnnnnnnnnnnnnnnnnnnnnnnnnnnnnnnnnnnnnnnnnnnnnnnnnnnnnnnnnnnnnnnnnnnnnnnnnnnnnnnnnnnnnnnnnnnnnnnnnnnnnnnnnnnnnnnnnnnnnnnnnnnnnnnnnnnnnnnnnnnnnnnnnnnnnnnnnnnnnnnnnnnnnnnnnnnnnnnnnnnnnnnnnnnnnnnnnnnnnnnnnnnnnnnnnnnnnnnnnnnnnnnnnnnnnnnnnnnnnnnnnnnnnnnnnnnnnnnnnnnnnnnnnnnnnnnnnnnnnnnnnnnnnnnnnnnnnnnnnnnnnnnnnnnnnnnnnnnnnnnnnnnnnnnnnnnnnnnnnnnnnnnnnnnnnnnnnnnnnnnnnnnnnnnnnnnnnnnnnnnnnnnnnnnnnnnnnnnnnnnnnnnnnnnnnnnnnnnnnnnnnnnnnnnnnnnnnnnnnnnnnnnnnnnnnnnnnnnnnnnnnnnnnnnnnnnnnnnnnnnnnnnnnnnnnnnnnnnnnnnnnnnnnnnnnnnnnnnnnnnnnnnnnnnnnnnnnnnnnnnnnnnnnnnnnnnnnnnnnnnnnnnnnnnnnnnnnnnnnnnnnnnnnnnnnnnnnnnnnnnnnnnnnnnnnnnnnnnnnnnnnnnnnnnnnnnnnnnnnnnnnnnnnnnnnnnnnnnnnnnnnnnnnnnnnnnnnnnnnnnnnnnnnnnnnnnnnnnnnnnnnnnnnnnnnnnnnnnnnnnnnnnnnnnnnnnnnnnnnnnnnnnnnnnnnnnnnnnnnnnnnnnnnnnnnnnnnnnnnnnnnnnnnnnnnnnnnnnnnnnnnnnnnnnnnnnnnnnnnnnnnnnnnnnnnnnnnnnnnnnnnnnnnnnnnnnnnnnnnnnnnnnnnnnnnnnnnnnnnnnnnnnnnnnnnnnnnnnnnnnnnnnnnnnnnnnnnnnnnnnnnnnnnnnnnnnnnnnnnnnnnnnnnnnnnnnnnnnnnnnnnnnnnnnnnnnnnnnnnnnnnnnnnnnnnnnnnnnnnnnnnnnnnnnnnnnnnnnnnnnnnnnnnnnnnnnnnnnnnnnnnnnnnnnnnnnnnnnnnnnnnnnnnnnnnnnnnnnnnnnnnnnnnnnnnnnnnnnnnnnnnnnnnnnnnnnnnnnnnnnnnnnnnnnnnnnnnnnnnnnnnnnnnnnnnnnnnnnnnnnnnnnnnnnnnnnnnnnnnnnnnnnnnnnnnnnnnnnnnnnnnnnnnnnnnnnnnnnnnnnnnnnnnnnnnnnnnnnnnnnnnnnnnnnnnnnnnnnnnnnnnnnnnnnnnnnnnnnnnnnnnnnnnnnnnnnnnnnnnnnnnnnnnnnnnnnnnnnnnnnnnnnnnnnnnnnnnnnnnnnnnnnnnnnnnnnnnnnnnnnnnnnnnnnnnnnnnnnnnnnnnnnnnnnnnnnnnnnnnnnnnnnnnnnnnnnnnnnnnnnnnnnnnnnnnnnnnnnnnnnnnnnnnnnnnnnnnnnnnnnnnnnnnnnnnnnnnnnnnnnnnnnnnnnnnnnnnnnnnnnnnnnnnnnnnnnnnnnnnnnnnnnnnnnnnnnnnnnnnnnnnnnnnnnnnnnnnnnnnnnnnnnnnnnnnnnnnnnnnnnnnnnnnnnnnnnnnnnnnnnnnnnnnnnnnnnnnnnnnnnnnnnnnnnnnnnnnnnnnnnnnnnnnnnnnnnnnnnnnnnnnnnnnnnnnnnnnnnnnnnnnnnnnnnnnnnnnnnnnnnnnnnnnnnnnnnnnnnnnnnnnnnnnnnnnnnnnnnnnnnnnnnnnnnnnnnnnnnnnnnnnnnnnnnnnnnnnnnnnnnnnnnnnnnnnnnnnnnnnnnnnnnnnnnnnnnnnnnnnnnnnnnnnnnnnnnnnnnnnnnnnnnnnnnnnnnnnnnnnnnnnnnnnnnnnnnnnnnnnnnnnnnnnnnnnnnnnnnnnnnnnnnnnnnnnnnnnnnnnnnnnnnnnnnnnnnnnnnnnnnnnnnnnnnnnnnnnnnnnnnnnnnnnnnnnnnnnnnnnnnnnnnnnnnnnnnnnnnnnnnnnnnnnnnnnnnnnnnnnnnnnnnnnnnnnnnnnnnnnnnnnnnnnnnnnnnnnnnnnnnnnnnnnnnnnnnnnnnnnnnnnnnnnnnnnnnnnnnnnnnnnnnnnnnnnnnnnnnnnnnnnnnnnnnnnnnnnnnnnnnnnnnnnnnnnnnnnnnnnnnnnnnnnnnnnnnnnnnnnnnnnnnnnnnnnnnnnnnnnnnnnnnnnnnnnnnnnnnnnnnnnnnnnnnnnnnnnnnnnnnnnnnnnnnnnnnnnnnnnnnnnnnnnnnnnnnnnnnnnnnnnnnnnnnnnnnnnnnnnnnnnnnnnnnnnnnnnnnnnnnnnnnnnnnnnnnnnnnnnnnnnnnnnnnnnnnnnnnnnnnnnnnnnnnnnnnnnnnnnnnnnnnnnnnnnnnnnnnnnnnnnnnnnnnnnnnnnnnnnnnnnnnnnnnnnnnnnnnnnnnnnnnnnnnnnnnnnnnnnnnnnnnnnnnnnnnnnnnnnnnnnnnnnnnnnnnnnnnnnnnnnnnnnnnnnnnnnnnnnnnnnnnnnnnnnnnnnnnnnnnnnnnnnnnnnnnnnnnnnnnnnnnnnnnnnnnnnnnnnnnnnnnnnnnnnnnnnnnnnnnnnnnnnnnnnnnnnnnnnnnnnnnnnnnnnnnnnnnnnnnnnnnnnnnnnnnnnnnnnnnnnnnnnnnnnnnnnnnnnnnnnnnnnnnnnnnnnnnnnnnnnnnnnnnnnnnnnnnnnnnnnnnnnnnnnnnnnnnnnnnnnnnnnnnnnnnnnnnnnnnnnnnnnnnnnnnnnnnnnnnnnnnnnnnnnnnnnnnnnnnnnnnnnnnnnnnnnnnnnnnnnnnnnnnnnnnnnnnnnnnnnnnnnnnnnnnnnnnnnnnnnnnnnnnnnnnnnnnnnnnnnnnnnnnnnnnnnnnnnnnnnnnnnnnnnnnnnnnnnnnnnnnnnnnnnnnnnnnnnnnnnnnnnnnnnnnnnnnnnnnnnnnnnnnnnnnnnnnnnnnnnnnnnnnnnnnnnnnnnnnnnnnnnnnnnnnnnnnnnnnnnnnnnnnnnnnnnnnnnnnnnnnnnnnnnnnnnnnnnnnnnnnnnnnnnnnnnnnnnnnnnnnnnnnnnnnnnnnnnnnnnnnnnnnnnnnnnnnnnnnnnnnnnnnnnnnnnnnnnnnnnnnnnnnnnnnnnnnnnnnnnnnnnnnnnnnnnnnnnnnnnnnnnnnnnnnnnnnnnnnnnnnnnnnnnnnnnnnnnnnnnnnnnnnnnnnnnnnnnnnnnnnnnnnnnnnnnnnnnnnnnnnnnnnnnnnnnnnnnnnnnnnnnnnnnnnnnnnnnnnnnnnnnnnnnnnnnnnnnnnnnnnnnnnnnnnnnnnnnnnnnnnnnnnnnnnnnnnnnnnnnnnnnnnnnnnnnnnnnnnnnnnnnnnnnnnnnnnnnnnnnnnnnnnnnnnnnnnnnnnnnnnnnnnnnnnnnnnnnnnnnnnnnnnnnnnnnnnnnnnnnnnnnnnnnnnnnnnnnnnnnnnnnnnnnnnnnnnnnnnnnnnnnnnnnnnnnnnnnnnnnnnnnnnnnnnnnnnnnnnnnnnnnnnnnnnnnnnnnnnnnnnnnnnnnnnnnnnnnnnnnnnnnnnnnnnnnnnnnnnnnnnnnnnnnnnnnnnnnnnnnnnnnnnnnnnnnnnnnnnnnnnnnnnnnnnnnnnnnnnnnnnnnnnnnnnnnnnnnnnnnnnnnnnnnnnnnnnnnnnnnnnnnnnnnnnnnnnnnnnnnnnnnnnnnnnnnnnnnnnnnnnnnnnnnnnnnnnnnnnnnnnnnnnnnnnnnnnnnnnnnnnnnnnnnnnnnnnnnnnnnnnnnnnnnnnnnnnnnnnnnnnnnnnnnnnnnnnnnnnnnnnnnnnnnnnnnnnnnnnnnnnnnnnnnnnnnnnnnnnnnnnnnnnnnnnnnnnnnnnnnnnnnnnnnnnnnnnnnnnnnnnnnnnnnnnnnnnnnnnnnnnnnnnnnnnnnnnnnnnnnnnnnnnnnnnnnnnnnnnnnnnnnnnnnnnnnnnnnnnnnnnnnnnnnnnnnnnnnnnnnnnnnnnnnnnnnnnnnnnnnnnnnnnnnnnnnnnnnnnnnnnnnnnnnnnnnnnnnnnnnnnnnnnnnnnnnnnnnnnnnnnnnnnnnnnnnnnnnnnnnnnnnnnnnnnnnnnnnnnnnnnnnnnnnnnnnnnnnnnnnnnnnnnnnnnnnnnnnnnnnnnnnnnnnnnnnnnnnnnnnnnnnnnnnnnnnnnnnnnnnnnnnnnnnnnnnnnnnnnnnnnnnnnnnnnnnnnnnnnnnnnnnnnnnnnnnnnnnnnnnnnnnnnnnnnnnnnnnnnnnnnnnnnnnnnnnnnnnnnnnnnnnnnnnnnnnnnnnnnnnnnnnnnnnnnnnnnnnnnnnnnnnnnnnnnnnnnnnnnnnnnnnnnnnnnnnnnnnnnnnnnnnnnnnnnnnnnnnnnnnnnnnnnnnnnnnnnnnnnnnnnnnnnnnnnnnnnnnnnnnnnnnnnnnnnnnnnnnnnnnnnnnnnnnnnnnnnnnnnnnnnnnnnnnnnnnnnnnnnnnnnnnnnnnnnnnnnnnnnnnnnnnnnnnnnnnnnnnnnnnnnnnnnnnnnnnnnnnnnnnnnnnnnnnnnnnnnnnnnnnnnnnnnnnnnnnnnnnnnnnnnnnnnnnnnnnnnnnnnnnnnnnnnnnnnnnnnnnnnnnnnnnnnnnnnnnnnnnnnnnnnnnnnnnnnnnnnnnnnnnnnnnnnnnnnnnnnnnnnnnnnnnnnnnnnnnnnnnnnnnnnnnnnnnnnnnnnnnnnnnnnnnnnnnnnnnnnnnnnnnnnnnnnnnnnnnnnnnnnnnnnnnnnnnnnnnnnnnnnnnnnnnnnnnnnnnnnnnnnnnnnnnnnnnnnnnnnnnnnnnnnnnnnnnnnnnnnnnnnnnnnnnnnnnnnnnnnnnnnnnnnnnnnnnnnnnnnnnnnnnnnnnnnnnnnnnnnnnnnnnnnnnnnnnnnnnnnnnnnnnnnnnnnnnnnnnnnnnnnnnnnnnnnnnnnnnnnnnnnnnnnnnnnnnnnnnnnnnnnnnnnnnnnnnnnnnnnnnnnnnnnnnnnnnnnnnnnnnnnnnnnnnnnnnnnnnnnnnnnnnnnnnnnnnnnnnnnnnnnnnnnnnnnnnnnnnnnnnnnnnnnnnnnnnnnnnnnnnnnnnnnnnnnnnnnnnnnnnnnnnnnnnnnnnnnnnnnnnnnnnnnnnnnnnnnnnnnnnnnnnnnnnnnnnnnnnnnnnnnnnnnnnnnnnnnnnnnnnnnnnnnnnnnnnnnnnnnnnnnnnnnnnnnnnnnnnnnnnnnnnnnnnnnnnnnnnnnnnnnnnnnnnnnnnnnnnnnnnnnnnnnnnnnnnnnnnnnnnnnnnnnnnnnnnnnnnnnnnnnnnnnnnnnnnnnnnnnnnnnnnnnnnnnnnnnnnnnnnnnnnnnnnnnnnnnnnnnnnnnnnnnnnnnnnnnnnnnnnnnnnnnnnnnnnnnnnnnnnnnnnnnnnnnnnnnnnnnnnnnnnnnnnnnnnnnnnnnnnnnnnnnnnnnnnnnnnnnnnnnnnnnnnnnnnnnnnnnnnnnnnnnnnnnnnnnnnnnnnnnnnnnnnnnnnnnnnnnnnnnnnnnnnnnnnnnnnnnnnnnnnnnnnnnnnnnnnnnnnnnnnnnnnnnnnnnnnnnnnnnnnnnnnnnnnnnnnnnnnnnnnnnnnnnnnnnnnnnnnnnnnnnnnnnnnnnnnnnnnnnnnnnnnnnnnnnnnnnnnnnnnnnnnnnnnnnnnnnnnnnnnnnnnnnnnnnnnnnnnnnnnnnnnnnnnnnnnnnnnnnnnnnnnnnnnnnnnnnnnnnnnnnnnnnnnnnnnnnnnnnnnnnnnnnnnnnnnnnnnnnnnnnnnnnnnnnnnnnnnnnnnnnnnnnnnnnnnnnnnnnnnnnnnnnnnnnnnnnnnnnnnnnnnnnnnnnnnnnnnnnnnnnnnnnnnnnnnnnnnnnnnnnnnnnnnnnnnnnnnnnnnnnnnnnnnnnnnnnnnnnnnnnnnnnnnnnnnnnnnnnnnnnnnnnnnnnnnnnnnnnnnnnnnnnnnnnnnnnnnnnnnnnnnnnnnnnnnnnnnnnnnnnnnnnnnnnnnnnnnnnnnnnnnnnnnnnnnnnnnnnnnnnnnnnnnnnnnnnnnnnnnnnnnnnnnnnnnnnnnnnnnnnnnnnnnnnnnnnnnnnnnnnnnnnnnnnnnnnnnnnnnnnnnnnnnnnnnnnnnnnnnnnnnnnnnnnnnnnnnnnnnnnnnnnnnnnnnnnnnnnnnnnnnnnnnnnnnnnnnnnnnnnnnnnnnnnnnnnnnnnnnnnnnnnnnnnnnnnnnnnnnnnnnnnnnnnnnnnnnnnnnnnnnnnnnnnnnnnnnnnnnnnnnnnnnnnnnnnnnnnnnnnnnnnnnnnnnnnnnnnnnnnnnnnnnnnnnnnnnnnnnnnnnnnnnnnnnnnnnnnnnnnnnnnnnnnnnnnnnnnnnnnnnnnnnnnnnnnnnnnnnnnnnnnnnnnnnnnnnnnnnnnnnnnnnnnnnnnnnnnnnnnnnnnnnnnnnnnnnnnnnnnnnnnnnnnnnnnnnnnnnnnnnnnnnnnnnnnnnnnnnnnnnnnnnnnnnnnnnnnnnnnnnnnnnnnnnnnnnnnnnnnnnnnnnnnnnnnnnnnnnnnnnnnnnnnnnnnnnnnnnnnnnnnnnnnnnnnnnnnnnnnnnnnnnnnnnnnnnnnnnnnnnnnnnnnnnnnnnnnnnnnnnnnnnnnnnnnnnnnnnnnnnnnnnnnnnnnnnnnnnnnnnnnnnnnnnnnnnnnnnnnnnnnnnnnnnnnnnnnnnnnnnnnnnnnnnnnnnnnnnnnnnnnnnnnnnnnnnnnnnnnnnnnnnnnnnnnnnnnnnnnnnnnnnnnnnnnnnnnnnnnnnnnnnnnnnnnnnnnnnnnnnnnnnnnnnnnnnnnnnnnnnnnnnnnnnnnnnnnnnnnnnnnnnnnnnnnnnnnnnnnnnnnnnnnnnnnnnnnnnnnnnnnnnnnnnnnnnnnnnnnnnnnnnnnnnnnnnnnnnnnnnnnnnnnnnnnnnnnnnnnnnnnnnnnnnnnnnnnnnnnnnnnnnnnnnnnnnnnnnnnnnnnnnnnnnnnnnnnnnnnnnnnnnnnnnnnnnnnnnnnnnnnnnnnnnnnnnnnnnnnnnnnnnnnnnnnnnnnnnnnnnnnnnnnnnnnnnnnnnnnnnnnnnnnnnnnnnnnnnnnnnnnnnnnnnnnnnnnnnnnnnnnnnnnnnnnnnnnnnnnnnnnnnnnnnnnnnnnnnnnnnnnnnnnnnnnnnnnnnnnnnnnnnnnnnnnnnnnnnnnnnnnnnnnnnnnnnnnnnnnnnnnnnnnnnnnnnnnnnnnnnnnnnnnnnnnnnnnnnnnnnnnnnnnnnnnnnnnnnnnnnnnnnnnnnnnnnnnnnnnnnnnnnnnnnnnnnnnnnnnnnnnnnnnnnnnnnnnnnnnnnnnnnnnnnnnnnnnnnnnnnnnnnnnnnnnnnnnnnnnnnnnnnnnnnnnnnnnnnnnnnnnnnnnnnnnnnnnnnnnnnnnnnnnnnnnnnnnnnnnnnnnnnnnnnnnnnnnnnnnnnnnnnnnnnnnnnnnnnnnnnnnnnnnnnnnnnnnnnnnnnnnnnnnnnnnnnnnnnnnnnnnnnnnnnnnnnnnnnnnnnnnnnnnnnnnnnnnnnnnnnnnnnnnnnnnnnnnnnnnnnnnnnnnnnnnnnnnnnnnnnnnnnnnnnnnnnnnnnnnnnnnnnnnnnnnnnnnnnnnnnnnnnnnnnnnnnnnnnnnnnnnnnnnnnnnnnnnnnnnnnnnnnnnnnnnnnnnnnnnnnnnnnnnnnnnnnnnnnnnnnnnnnnnnnnnnnnnnnnnnnnnnnnnnnnnnnnnnnnnnnnnnnnnnnnnnnnnnnnnnnnnnnnnnnnnnnnnnnnnnnnnnnnnnnnnnnnnnnnnnnnnnnnnnnnnnnnnnnnnnnnnnnnnnnnnnnnnnnnnnnnnnnnnnnnnnnnnnnnnnnnnnnnnnnnnnnnnnnnnnnnnnnnnnnnnnnnnnnnnnnnnnnnnnnnnnnnnnnnnnnnnnnnnnnnnnnnnnnnnnnnnnnnnnnnnnnnnnnnnnnnnnnnnnnnnnnnnnnnnnnnnnnnnnnnnnnnnnnnnnnnnnnnnnnnnnnnnnnnnnnnnnnnnnnnnnnnnnnnnnnnnnnnnnnnnnnnnnnnnnnnnnnnnnnnnnnnnnnnnnnnnnnnnnnnnnnnnnnnnnnnnnnnnnnnnnnnnnnnnnnnnnnnnnnnnnnnnnnnnnnnnnnnnnnnnnnnnnnnnnnnnnnnnnnnnnnnnnnnnnnnnnnnnnnnnnnnnnnnnnnnnnnnnnnnnnnnnnnnnnnnnnnnnnnnnnnnnnnnnnnnnnnnnnnnnnnnnnnnnnnnnnnnnnnnnnnnnnnnnnnnnnnnnnnnnnnnnnnnnnnnnnnnnnnnnnnnnnnnnnnnnnnnnnnnnnnnnnnnnnnnnnnnnnnnnnnnnnnnnnnnnnnnnnnnnnnnnnnnnnnnnnnnnnnnnnnnnnnnnnnnnnnnnnnnnnnnnnnnnnnnnnnnnnnnnnnnnnnnnnnnnnnnnnnnnnnnnnnnnnnnnnnnnnnnnnnnnnnnnnnnnnnnnnnnnnnnnnnnnnnnnnnnnnnnnnnnnnnnnnnnnnnnnnnnnnnnnnnnnnnnnnnnnnnnnnnnnnnnnnnnnnnnnnnnnnnnnnnnnnnnnnnnnnnnnnnnnnnnnnnnnnnnnnnnnnnnnnnnnnnnnnnnnnnnnnnnnnnnnnnnnnnnnnnnnnnnnnnnnnnnnnnnnnnnnnnnnnnnnnnnnnnnnnnnnnnnnnnnnnnnnnnnnnnnnnnnnnnnnnnnnnnnnnnnnnnnnnnnnnnnnnnnnnnnnnnnnnnnnnnnnnnnnnnnnnnnnnnnnnnnnnnnnnnnnnnnnnnnnnnnnnnnnnnnnnnnnnnnnnnnnnnnnnnnnnnnnnnnnnnnnnnnnnnnnnnnnnnnnnnnnnnnnnnnnnnnnnnnnnnnnnnnnnnnnnnnnnnnnnnnnnnnnnnnnnnnnnnnnnnnnnnnnnnnnnnnnnnnnnnnnnnnnnnnnnnnnnnnnnnnnnnnnnnnnnnnnnnnnnnnnnnnnnnnnnnnnnnnnnnnnnnnnnnnnnnnnnnnnnnnnnnnnnnnnnnnnnnnnnnnnnnnnnnnnnnnnnnnnnnnnnnnnnnnnnnnnnnnnnnnnnnnnnnnnnnnnnnnnnnnnnnnnnnnnnnnnnnnnnnnnnnnnnnnnnnnnnnnnnnnnnnnnnnnnnnnnnnnnnnnnnnnnnnnnnnnnnnnnnnnnnnnnnnnnnnnnnnnnnnnnnnnnnnnnnnnnnnnnnnnnnnnnnnnnnnnnnnnnnnnnnnnnnnnnnnnnnnnnnnnnnnnnnnnnnnnnnnnnnnnnnnnnnnnnnnnnnnnnnnnnnnnnnnnnnnnnnnnnnnnnnnnnnnnnnnnnnnnnnnnnnnnnnnnnnnnnnnnnnnnnnnnnnnnnnnnnnnnnnnnnnnnnnnnnnnnnnnnnnnnnnnnnnnnnnnnnnnnnnnnnnnnnnnnnnnnnnnnnnnnnnnnnnnnnnnnnnnnnnnnnnnnnnnnnnnnnnnnnnnnnnnnnnnnnnnnnnnnnnnnnnnnnnnnnnnnnnnnnnnnnnnnnnnnnnnnnnnnnnnnnnnnnnnnnnnnnnnnnnnnnnnnnnnnnnnnnnnnnnnnnnnnnnnnnnnnnnnnnnnnnnnnnnnnnnnnnnnnnnnnnnnnnnnnnnnnnnnnnnnnnnnnnnnnnnnnnnnnnnnnnnnnnnnnnnnnnnnnnnnnnnnnnnnnnnnnnnnnnnnnnnnnnnnnnnnnnnnnnnnnnnnnnnnnnnnnnnnnnnnnnnnnnnnnnnnnnnnnnnnnnnnnnnnnnnnnnnnnnnnnnnnnnnnnnnnnnnnnnnnnnnnnnnnnnnnnnnnnnnnnnnnnnnnnnnnnnnnnnnnnnnnnnnnnnnnnnnnnnnnnnnnnnnnnnnnnnnnnnnnnnnnnnnnnnnnnnnnnnnnnnnnnnnnnnnnnnnnnnnnnnnnnnnnnnnnnnnnnnnnnnnnnnnnnnnnnnnnnnnnnnnnnnnnnnnnnnnnnnnnnnnnnnnnnnnnnnnnnnnnnnnnnnnnnnnnnnnnnnnnnnnnnnnnnnnnnnnnnnnnnnnnnnnnnnnnnnnnnnnnnnnnnnnnnnnnnnnnnnnnnnnnnnnnnnnnnnnnnnnnnnnnnnnnnnnnnnnnnnnnnnnnnnnnnnnnnnnnnnnnnnnnnnnnnnnnnnnnnnnnnnnnnnnnnnnnnnnnnnnnnnnnnnnnnnnnnnnnnnnnnnnnnnnnnnnnnnnnnnnnnnnnnnnnnnnnnnnnnnnnnnnnnnnnnnnnnnnnnnnnnnnnnnnnnnnnnnnnnnnnnnnnnnnnnnnnnnnnnnnnnnnnnnnnnnnnnnnnnnnnnnnnnnnnnnnnnnnnnnnnnnnnnnnnnnnnnnnnnnnnnnnnnnnnnnnnnnnnnnnnnnnnnnnnnnnnnnnnnnnnnnnnnnnnnnnnnnnnnnnnnnnnnnnnnnnnnnnnnnnnnnnnnnnnnnnnnnnnnnnnnnnnnnnnnnnnnnnnnnnnnnnnnnnnnnnnnnnnnnnnnnnnnnnnnnnnnnnnnnnnnnnnnnnnnnnnnnnnnnnnnnnnnnnnnnnnnnnnnnnnnnnnnnnnnnnnnnnnnnnnnnnnnnnnnnnnnnnnnnnnnnnnnnnnnnnnnnnnnnnnnnnnnnnnnnnnnnnnnnnnnnnnnnnnnnnnnnnnnnnnnnnnnnnnnnnnnnnnnnnnnnnnnnnnnnnnnnnnnnnnnnnnnnnnnnnnnnnnnnnnnnnnnnnnnnnnnnnnnnnnnnnnnnnnnnnnnnnnnnnnnnnnnnnnnnnnnnnnnnnnnnnnnnnnnnnnnnnnnnnnnnnnnnnnnnnnnnnnnnnnnnnnnnnnnnnnnnnnnnnnnnnnnnnnnnnnnnnnnnnnnnnnnnnnnnnnnnnnnnnnnnnnnnnnnnnnnnnnnnnnnnnnnnnnnnnnnnnnnnnnnnnnnnnnnnnnnnnnnnnnnnnnnnnnnnnnnnnnnnnnnnnnnnnnnnnnnnnnnnnnnnnnnnnnnnnnnnnnnnnnnnnnnnnnnnnnnnnnnnnnnnnnnnnnnnnnnnnnnnnnnnnnnnnnnnnnnnnnnnnnnnnnnnnnnnnnnnnnnnnnnnnnnnnnnnnnnnnnnnnnnnnnnnnnnnnnnnnnnnnnnnnnnnnnnnnnnnnnnnnnnnnnnnnnnnnnnnnnnnnnnnnnnnnnnnnnnnnnnnnnnnnnnnnnnnnnnnnnnnnnnnnnnnnnnnnnnnnnnnnnnnnnnnnnnnnnnnnnnnnnnnnnnnnnnnnnnnnnnnnnnnnnnnnnnnnnnnnnnnnnnnnnnnnnnnnnnnnnnnnnnnnnnnnnnnnnnnnnnnnnnnnnnnnnnnnnnnnnnnnnnnnnnnnnnnnnnnnnnnnnnnnnnnnnnnnnnnnnnnnnnnnnnnnnnnnnnnnnnnnnnnnnnnnnnnnnnnnnnnnnnnnnnnnnnnnnnnnnnnnnnnnnnnnnnnnnnnnnnnnnnnnnnnnnnnnnnnnnnnnnnnnnnnnnnnnnnnnnnnnnnnnnnnnnncatatagtagatgcaagaatcgttccgaatctgccacaataactgcggattcctttcccaaagcctttttcgcccacggacaggccgtttgccccttcccactaacatcccgtaaacctccccttaaattcccgcccggccaatgggaactcagcgggaagtattttagatgtgtatgggatggggcaaatggggcttctattgatagtgggtatcaaaatgggaggaagtccacaaattgcgcgaattcatacgaattgcttttccagttacgctaccaactgtggtagataacctaaaataaaggacttacttcccaatcgggcaagtaatccatatgtttggagcccgaaggtcccagaacgattggccgacggggacatcgaccttcctgacgctggcgtcgagcgaggcacgagcatggacgccagcaacatctcctgtagtccatactcgcaagctcgctgcactccaggctcaccaacgttggaaggcaaattcacaaattcacaaccggtaaatatggcttgtgaatttgcaacctgctgatagacgggtaattatgaggctaattcacaaaaaaggggtctcttatacatccgcggaagccgattgtaaacaggatatgatgtatccacgctaccagtctataatacatatagaaatagtatatataatatataatagtattatatattattatatattgatattatatcatctctaccttcccttcatctcttgtttgcggcatgagccactgcaaaccggcattctcccctggtccggctggatataagagataagcgtattttgtgaatttgtcccccaactcactgtgccacaataacacacggattcacaagccatatttaccggttgtgaatttgtgaatctgaccttgccggccttaaggaagtttgaaattagagccctattttggacttgacaaattattccttggtaaatttggtgtataatagctatggggcataatgatgttagcctgtggaacggcctctgtaaaggatcaacaagctatcaaccctccccatgcgacaggagcttcaatgtattataatttgacagacaaaccctggatcagtgtgctacagcttgacgggcattctgccaggctcggcctggctgaggtcctgcgaaaagcacacacactgcgtttggcttacggcaatccgatggaccgcatgtccgttttccgtttcctcctcgccctgggctattggtgttttgccaatacaaaacaagcgccggtatcagataagccactgcctcaggcatggacggactggcttgaacaaaaccaagaatatttcgaattgttcggtgatggccccagattctaccaatccccaggaacatccagaatacgccccagcacggaccttatccacgagcttcccacggcaaacaatttctggcacttccgccatgtgaccgatttcatcgatggcatttgcccagcttgctgcgttaccggtctgctgcgcctgccactctttaccaccgtaggcggcagcggaatcggagccggcatcaacagaactcctcccttctatgccatctggcagggtgatagtctgtcggaatcgatattcctgaattgggaacccacttcccggttgggtgttcctgcctggctgaacccgtttggatcccaaaacgagaaggatgtagccttgctgactggcctcacctggctgccccgcaaggtattcctgcttggcccggtgtcagacggagcaaaatgcagcgcctgcggagaagagcatgagcctctggtctatgcctgcaacaatgaggcggtgaaagtgcctccgaaccttgtctggaacgaccctcacgcgatttaccgggatgacaataatggcctgactgcccaggtggctctgatgtccggggacaaatacactttcgctaacagggattggcataaacccctggtcggcttcttacgggcgaaaggcatgtctcggaccgccacgctgtttttagtgggcttcacaagcgttcaagccaaatgtgtggacgtttgggaaaagaccattgccctatccggaaaaacaagctccgaggaactgctggaccagatatccgaaagagcctactccctgcacaggatgaggaaacaagaccgccggggcgattacaaggaatccgtgggaatcaccgccgtggcggacatcatcccgcacgtagagcatcgggttgacgtccattcgggcgagatggtggaaaacagcggcaatgtctggcaggaagcggatgaagattacggattcttcatgaagcgttttgccgtttctctagtgccggaaattacggttgccgccaagcttgaacgagaacaactggctcggcgcaagccctggcccctaaaaccaaaatcaattaaaaaaccttcatccggaggcgataatgaatgagagcaccgtgaaatttgttcggagcctgggcgaactcaaagagggcgacctgggcttgctcagaaagctcaggggtcgccgtctggatgaatccctgccgggtttcgacctgttttccggcctgtggtggccactccgcagtataagccccaaaacccccaggcggaaggtggtctggctagtcaccaagcttttcgcggaattccgctttgagcaaaagaaaggcgccagcctgccttggctcatgggcagaatatgccgtggacttaaagaagaaaaagagttcccacgtgttttagccaggttcgaccgcttgctcacgctcgagttgaaccaactggaggaaccgctggcgcaagtgctcgcgattttaaaaagacatgacattgccagtctggactgggttgccctcatcgatgacctctccgcttgggaacgggaatcaaacagagcgatatggtcagacacatttatttcagcatttaataatcagcaaggaggaatcaaatgttgattgaaatacacatgatccaaaaccacagcccggccaacctgaaccgggacgacctgggcgcgcccaagacctgttatttcggtggggtgttgcggtcccgcatctccagccagtgcctaaagcggagcatcaggatgagcgatgaattcaaaaacttgctcgggggtatccgtacccgtcggttggccgagttgattacaaaagctacaggacaggactgcaggaatcaggcagaggaagttctgaacaaagccggtttgaaacacgaaaacggacatagtaagatgctggtgttcatgacccggaacaagatcgatgcccttgctcaaattgtcaccagcgaaggcctgagtgttgcagagaaagccaagaaagcggcagatgtaatatcgggggcaatacattcccctgacatcgctctgtgcggaagaatgctcgagcccgataccaaggacaagaacacagacaaggtcaagtgggaaaataccactgttgaagcagccctgcaggtgtcgcacgccatttcaacccacatcgcccgcccagaaatagattactatgtagcagctgatgacgagcctggcgacgacacaggtgctggattcatagacgaggcgatgtttgcttcggcctgtttctacaaatattactcaattgattggaataccttgataatcaacctccagggtaatgaaaagttggcagctcatactgtcggagcctttatccaggccgctgcactcactaatcccagcggaaagcagaacagctttgccgcacataaccttcccgatggaatattggtagaaataaaagagacacctgtcagctatgcaaatgcctttgtgcgaccggtgggaatcgttaaggattctgacttggtagaacaaagcattggccaactggccaactatgtgaaggatataagtgccggtttcttccctggacagatgaaaggcaacgctctgtggttctcgcccaatggacgttatcccctaaagcctcaacagggcacgctggacataaagccagtttgcaacctgctagaacttgttcgcgaagcagttgagatgttgggttttgaatgggatgatgtaaaaaacgagaaagtagagagttgaaatgtcttctccgcctaataccctgttcctgagattggaggctccccttcaggcctggggaagcaatgaggccaaattcgccgtgcgcaggacagccgacgcgcccaccaaatccggagtggcaggcctgctctgcgctgccctgggaatcagccgggccgaagccggacagtattggctgggtgaaattgccaaattgcgcatgggggtgcggatagaccgcccgggcatccgctggtgggattaccatactgtgggagcggagcagaagctgcgcatttctgacctgaaaatgcccaacggcctagttctggttggcactgccctggccaaaaacctgggcgcggacaagatcaaatccaaacccggggctttgctctcccgacgcgagtatttggctgatgccagcttcctggttgcgctccagggtgaaccggatatcgtggcacaactggctgaagcgctgaaaaaaccagtctggacgctttatctggggcgaaaatcctgtcccccctcccgtccggtggatgaacacccgccagggttttatgccagtctgaaagaggctttgcggtcgatcccggcgcaactgagggaaaaaggcgaaccgatacctgacagtgttccctgtgtgctcgactgggttccggcccatgatgacgtgcacgctccgccgaacgccgaagcgcattacgacgtgccggtgtcctttgagcctccccaccacttgccccggctggtgatccgctgtaacctgccattggaccgcaacttcgaggcagagaccgtgctttccggcaaagcctggcaaccgccccgcaaccgggcaaattacgacaatcctgaatacaaaagggtccgcgctgagcgtttggtgatggacaatgccgcctgcatgttctgcaaggcacccgccactactgtgcagcacgtgaattaccgacgcgccggaggcagcgagaagccggaggacttgcgcgccctctgccgcctctgccacgatgcctgcaccatgctggaatatggcagcggcatgaccatggaccgcatagatccctgtgaccccgcctggcgtgagcgcatcttggccaaacgcgaggaaataatcaaattccgctcgctggagcagcgcaggcgcaaactcgatccgaaggaggagaacggatgatgtatctatcccaactgctcatcgacacaggcggcaaccctgaccggccaaggcccgggcgcttgtggctgaacaatatctataatgtccaccggcggctcagcatggctttccccatgcgcaagcgcaaggaaggagacccgaggtttctgcagccctttgaccccgcagattttgaaaagcgccagttcctctttcgggtggacaacaacaccgatggagaaaatcaaagggcgatggttttggtgcagtcgtccctgccgccggattgggactgggctttccagaatgccacgggatttttggcagcccctccccaggttaaggaatacgatccccagttctcagcaggtcagcggctgcgcttccgcatcctcgtgaatgccagtgtcaaacgcaaaatcgacgagttgcgggaaggacccggaggaaaggaaaaaacgggaagggttctgcacaaacgggtcgcccttacctgggacacaaattccaacccaaaggatgcggtggcgcaatggtttgccgccaaggctggcagactgggcttcacgcccggggagaccgaactggtaagcctgggctgggtatacggttccaaaccggagccccggggaaattcgccccggcgtgagaacgaataccgtcccctgagataccgttccgccctgctggaaggttatctgacagtggatgatgcctttctgttccgggaagccttggaaaaaggtatcggcagcgccaaaggaatgggcttcggcctcctttccgtggttccggcaagtgatgcgtaacagagaccttcacctaatgccaaaaatgcgggaccgcttcacctatctctatgtggagcatgccaaaatagacaaagaacaacaggcaatcgcctttcacgatgccatgggctccactcctgttccctgcgctggactggccctgctgatgctggggccaggcgtatccatcacccatgcggccatccttgttttagcagaatgcggctgtttggtggcttgggtgggggaacagggagtccgcttttactcatccgggacagggaccacccgtagttccgccaaccttatgcgtcaggctgccgcctggtcaaatcgagatacgcatctgcggatagttcgcagaatgtatgaattgaggttcaaggaaaaactggacccaaccctctctcttgaacagataaggggaaaagagggagcgagagtacgggatacctatttcagactttcaaaagaattcgatgtgcccatgagtgcgaggaattacgacaggagcaactggaataaaaccgaccccatcaacagagccctgtccgttgccaattcctgtctctatggcatctgccacgccgcgatagtggccgctggctattcacctgccctgggtttcgttcatactggcaaacaactgtcatttgtttatgacattgccgatctttataaaatggaaacctccgtgcccgcggctttcatagccacagccgcaggggtcgataacctggacagaaggacacgcattgcctgccgtgaccagttctatcaatttggtctgctaaagaagatagtggccgacattcacgcccttttcggtattctggaaacttcggacgatgagccagaccttgctgatgtcgatccagccgtgccaggcgggctttggaacccagatgataaagtgagccccggcggcttgtcatggggtctggatgatcctggaggccatgatgatggttctggtgcttgaaaaagttccctctggcctgagaggagaaattacacgctggctcctcgaaatcaaggctggagtatttgtcggtcaggtatcggccatgataagggaaaagctgtgggacaaggccaggtctggttgtgccggtggaacttgtatcatgatttacagcaagcattgcgaacaaggctttggaattgagttttggggtgccgcggaaaggatagtgacagaatgggaaggattgaaattgatgaccaagcatccgtgatccatacttgaagcctgttcaatggcctcaaagcgtctactttcgaagtgtgttccccacctgcgtgggggtgaaccgcggattcgccaagcttgtccctaccgtgatgcgtgttccccacctgcgtgggggtgaaccgaagagcggttttgggcgtataacggcccgcttgtgttccccacctgcgtgggggtgaaccgcctctgggccttagctccgcacaggacaagcagtgt

SEQ ID NO: 1104 - DNA, 103389 bp, Artificial Sequence
  Synthetic Oligonucleotide
  misc_feature (1)..(95919): n is a, c, g, or t
nnnnnnnnnnnnnnnnnnnnnnnnnnnnnnnnnnnnnnnnnnnnnnnnnnnnnnnnnnnnnnnnnnnnnnnnnnnnnnnnnnnnnnnnnnnnnnnnnnnnnnnnnnnnnnnnnnnnnnnnnnnnnnnnnnnnnnnnnnnnnnnnnnnnnnnnnnnnnnnnnnnnnnnnnnnnnnnnnnnnnnnnnnnnnnnnnnnnnnnnnnnnnnnnnnnnnnnnnnnnnnnnnnnnnnnnnnnnnnnnnnnnnnnnnnnnnnnnnnnnnnnnnnnnnnnnnnnnnnnnnnnnnnnnnnnnnnnnnnnnnnnnnnnnnnnnnnnnnnnnnnnnnnnnnnnnnnnnnnnnnnnnnnnnnnnnnnnnnnnnnnnnnnnnnnnnnnnnnnnnnnnnnnnnnnnnnnnnnnnnnnnnnnnnnnnnnnnnnnnnnnnnnnnnnnnnnnnnnnnnnnnnnnnnnnnnnnnnnnnnnnnnnnnnnnnnnnnnnnnnnnnnnnnnnnnnnnnnnnnnnnnnnnnnnnnnnnnnnnnnnnnnnnnnnnnnnnnnnnnnnnnnnnnnnnnnnnnnnnnnnnnnnnnnnnnnnnnnnnnnnnnnnnnnnnnnnnnnnnnnnnnnnnnnnnnnnnnnnnnnnnnnnnnnnnnnnnnnnnnnnnnnnnnnnnnnnnnnnnnnnnnnnnnnnnnnnnnnnnnnnnnnnnnnnnnnnnnnnnnnnnnnnnnnnnnnnnnnnnnnnnnnnnnnnnnnnnnnnnnnnnnnnnnnnnnnnnnnnnnnnnnnnnnnnnnnnnnnnnnnnnnnnnnnnnnnnnnnnnnnnnnnnnnnnnnnnnnnnnnnnnnnnnnnnnnnnnnnnnnnnnnnnnnnnnnnnnnnnnnnnnnnnnnnnnnnnnnnnnnnnnnnnnnnnnnnnnnnnnnnnnnnnnnnnnnnnnnnnnnnnnnnnnnnnnnnnnnnnnnnnnnnnnnnnnnnnnnnnnnnnnnnnnnnnnnnnnnnnnnnnnnnnnnnnnnnnnnnnnnnnnnnnnnnnnnnnnnnnnnnnnnnnnnnnnnnnnnnnnnnnnnnnnnnnnnnnnnnnnnnnnnnnnnnnnnnnnnnnnnnnnnnnnnnnnnnnnnnnnnnnnnnnnnnnnnnnnnnnnnnnnnnnnnnnnnnnnnnnnnnnnnnnnnnnnnnnnnnnnnnnnnnnnnnnnnnnnnnnnnnnnnnnnnnnnnnnnnnnnnnnnnnnnnnnnnnnnnnnnnnnnnnnnnnnnnnnnnnnnnnnnnnnnnnnnnnnnnnnnnnnnnnnnnnnnnnnnnnnnnnnnnnnnnnnnnnnnnnnnnnnnnnnnnnnnnnnnnnnnnnnnnnnnnnnnnnnnnnnnnnnnnnnnnnnnnnnnnnnnnnnnnnnnnnnnnnnnnnnnnnnnnnnnnnnnnnnnnnnnnnnnnnnnnnnnnnnnnnnnnnnnnnnnnnnnnnnnnnnnnnnnnnnnnnnnnnnnnnnnnnnnnnnnnnnnnnnnnnnnnnnnnnnnnnnnnnnnnnnnnnnnnnnnnnnnnnnnnnnnnnnnnnnnnnnnnnnnnnnnnnnnnnnnnnnnnnnnnnnnnnnnnnnnnnnnnnnnnnnnnnnnnnnnnnnnnnnnnnnnnnnnnnnnnnnnnnnnnnnnnnnnnnnnnnnnnnnnnnnnnnnnnnnnnnnnnnnnnnnnnnnnnnnnnnnnnnnnnnnnnnnnnnnnnnnnnnnnnnnnnnnnnnnnnnnnnnnnnnnnnnnnnnnnnnnnnnnnnnnnnnnnnnnnnnnnnnnnnnnnnnnnnnnnnnnnnnnnnnnnnnnnnnnnnnnnnnnnnnnnnnnnnnnnnnnnnnnnnnnnnnnnnnnnnnnnnnnnnnnnnnnnnnnnnnnnnnnnnnnnnnnnnnnnnnnnnnnnnnnnnnnnnnnnnnnnnnnnnnnnnnnnnnnnnnnnnnnnnnnnnnnnnnnnnnnnnnnnnnnnnnnnnnnnnnnnnnnnnnnnnnnnnnnnnnnnnnnnnnnnnnnnnnnnnnnnnnnnnnnnnnnnnnnnnnnnnnnnnnnnnnnnnnnnnnnnnnnnnnnnnnnnnnnnnnnnnnnnnnnnnnnnnnnnnnnnnnnnnnnnnnnnnnnnnnnnnnnnnnnnnnnnnnnnnnnnnnnnnnnnnnnnnnnnnnnnnnnnnnnnnnnnnnnnnnnnnnnnnnnnnnnnnnnnnnnnnnnnnnnnnnnnnnnnnnnnnnnnnnnnnnnnnnnnnnnnnnnnnnnnnnnnnnnnnnnnnnnnnnnnnnnnnnnnnnnnnnnnnnnnnnnnnnnnnnnnnnnnnnnnnnnnnnnnnnnnnnnnnnnnnnnnnnnnnnnnnnnnnnnnnnnnnnnnnnnnnnnnnnnnnnnnnnnnnnnnnnnnnnnnnnnnnnnnnnnnnnnnnnnnnnnnnnnnnnnnnnnnnnnnnnnnnnnnnnnnnnnnnnnnnnnnnnnnnnnnnnnnnnnnnnnnnnnnnnnnnnnnnnnnnnnnnnnnnnnnnnnnnnnnnnnnnnnnnnnnnnnnnnnnnnnnnnnnnnnnnnnnnnnnnnnnnnnnnnnnnnnnnnnnnnnnnnnnnnnnnnnnnnnnnnnnnnnnnnnnnnnnnnnnnnnnnnnnnnnnnnnnnnnnnnnnnnnnnnnnnnnnnnnnnnnnnnnnnnnnnnnnnnnnnnnnnnnnnnnnnnnnnnnnnnnnnnnnnnnnnnnnnnnnnnnnnnnnnnnnnnnnnnnnnnnnnnnnnnnnnnnnnnnnnnnnnnnnnnnnnnnnnnnnnnnnnnnnnnnnnnnnnnnnnnnnnnnnnnnnnnnnnnnnnnnnnnnnnnnnnnnnnnnnnnnnnnnnnnnnnnnnnnnnnnnnnnnnnnnnnnnnnnnnnnnnnnnnnnnnnnnnnnnnnnnnnnnnnnnnnnnnnnnnnnnnnnnnnnnnnnnnnnnnnnnnnnnnnnnnnnnnnnnnnnnnnnnnnnnnnnnnnnnnnnnnnnnnnnnnnnnnnnnnnnnnnnnnnnnnnnnnnnnnnnnnnnnnnnnnnnnnnnnnnnnnnnnnnnnnnnnnnnnnnnnnnnnnnnnnnnnnnnnnnnnnnnnnnnnnnnnnnnnnnnnnnnnnnnnnnnnnnnnnnnnnnnnnnnnnnnnnnnnnnnnnnnnnnnnnnnnnnnnnnnnnnnnnnnnnnnnnnnnnnnnnnnnnnnnnnnnnnnnnnnnnnnnnnnnnnnnnnnnnnnnnnnnnnnnnnnnnnnnnnnnnnnnnnnnnnnnnnnnnnnnnnnnnnnnnnnnnnnnnnnnnnnnnnnnnnnnnnnnnnnnnnnnnnnnnnnnnnnnnnnnnnnnnnnnnnnnnnnnnnnnnnnnnnnnnnnnnnnnnnnnnnnnnnnnnnnnnnnnnnnnnnnnnnnnnnnnnnnnnnnnnnnnnnnnnnnnnnnnnnnnnnnnnnnnnnnnnnnnnnnnnnnnnnnnnnnnnnnnnnnnnnnnnnnnnnnnnnnnnnnnnnnnnnnnnnnnnnnnnnnnnnnnnnnnnnnnnnnnnnnnnnnnnnnnnnnnnnnnnnnnnnnnnnnnnnnnnnnnnnnnnnnnnnnnnnnnnnnnnnnnnnnnnnnnnnnnnnnnnnnnnnnnnnnnnnnnnnnnnnnnnnnnnnnnnnnnnnnnnnnnnnnnnnnnnnnnnnnnnnnnnnnnnnnnnnnnnnnnnnnnnnnnnnnnnnnnnnnnnnnnnnnnnnnnnnnnnnnnnnnnnnnnnnnnnnnnnnnnnnnnnnnnnnnnnnnnnnnnnnnnnnnnnnnnnnnnnnnnnnnnnnnnnnnnnnnnnnnnnnnnnnnnnnnnnnnnnnnnnnnnnnnnnnnnnnnnnnnnnnnnnnnnnnnnnnnnnnnnnnnnnnnnnnnnnnnnnnnnnnnnnnnnnnnnnnnnnnnnnnnnnnnnnnnnnnnnnnnnnnnnnnnnnnnnnnnnnnnnnnnnnnnnnnnnnnnnnnnnnnnnnnnnnnnnnnnnnnnnnnnnnnnnnnnnnnnnnnnnnnnnnnnnnnnnnnnnnnnnnnnnnnnnnnnnnnnnnnnnnnnnnnnnnnnnnnnnnnnnnnnnnnnnnnnnnnnnnnnnnnnnnnnnnnnnnnnnnnnnnnnnnnnnnnnnnnnnnnnnnnnnnnnnnnnnnnnnnnnnnnnnnnnnnnnnnnnnnnnnnnnnnnnnnnnnnnnnnnnnnnnnnnnnnnnnnnnnnnnnnnnnnnnnnnnnnnnnnnnnnnnnnnnnnnnnnnnnnnnnnnnnnnnnnnnnnnnnnnnnnnnnnnnnnnnnnnnnnnnnnnnnnnnnnnnnnnnnnnnnnnnnnnnnnnnnnnnnnnnnnnnnnnnnnnnnnnnnnnnnnnnnnnnnnnnnnnnnnnnnnnnnnnnnnnnnnnnnnnnnnnnnnnnnnnnnnnnnnnnnnnnnnnnnnnnnnnnnnnnnnnnnnnnnnnnnnnnnnnnnnnnnnnnnnnnnnnnnnnnnnnnnnnnnnnnnnnnnnnnnnnnnnnnnnnnnnnnnnnnnnnnnnnnnnnnnnnnnnnnnnnnnnnnnnnnnnnnnnnnnnnnnnnnnnnnnnnnnnnnnnnnnnnnnnnnnnnnnnnnnnnnnnnnnnnnnnnnnnnnnnnnnnnnnnnnnnnnnnnnnnnnnnnnnnnnnnnnnnnnnnnnnnnnnnnnnnnnnnnnnnnnnnnnnnnnnnnnnnnnnnnnnnnnnnnnnnnnnnnnnnnnnnnnnnnnnnnnnnnnnnnnnnnnnnnnnnnnnnnnnnnnnnnnnnnnnnnnnnnnnnnnnnnnnnnnnnnnnnnnnnnnnnnnnnnnnnnnnnnnnnnnnnnnnnnnnnnnnnnnnnnnnnnnnnnnnnnnnnnnnnnnnnnnnnnnnnnnnnnnnnnnnnnnnnnnnnnnnnnnnnnnnnnnnnnnnnnnnnnnnnnnnnnnnnnnnnnnnnnnnnnnnnnnnnnnnnnnnnnnnnnnnnnnnnnnnnnnnnnnnnnnnnnnnnnnnnnnnnnnnnnnnnnnnnnnnnnnnnnnnnnnnnnnnnnnnnnnnnnnnnnnnnnnnnnnnnnnnnnnnnnnnnnnnnnnnnnnnnnnnnnnnnnnnnnnnnnnnnnnnnnnnnnnnnnnnnnnnnnnnnnnnnnnnnnnnnnnnnnnnnnnnnnnnnnnnnnnnnnnnnnnnnnnnnnnnnnnnnnnnnnnnnnnnnnnnnnnnnnnnnnnnnnnnnnnnnnnnnnnnnnnnnnnnnnnnnnnnnnnnnnnnnnnnnnnnnnnnnnnnnnnnnnnnnnnnnnnnnnnnnnnnnnnnnnnnnnnnnnnnnnnnnnnnnnnnnnnnnnnnnnnnnnnnnnnnnnnnnnnnnnnnnnnnnnnnnnnnnnnnnnnnnnnnnnnnnnnnnnnnnnnnnnnnnnnnnnnnnnnnnnnnnnnnnnnnnnnnnnnnnnnnnnnnnnnnnnnnnnnnnnnnnnnnnnnnnnnnnnnnnnnnnnnnnnnnnnnnnnnnnnnnnnnnnnnnnnnnnnnnnnnnnnnnnnnnnnnnnnnnnnnnnnnnnnnnnnnnnnnnnnnnnnnnnnnnnnnnnnnnnnnnnnnnnnnnnnnnnnnnnnnnnnnnnnnnnnnnnnnnnnnnnnnnnnnnnnnnnnnnnnnnnnnnnnnnnnnnnnnnnnnnnnnnnnnnnnnnnnnnnnnnnnnnnnnnnnnnnnnnnnnnnnnnnnnnnnnnnnnnnnnnnnnnnnnnnnnnnnnnnnnnnnnnnnnnnnnnnnnnnnnnnnnnnnnnnnnnnnnnnnnnnnnnnnnnnnnnnnnnnnnnnnnnnnnnnnnnnnnnnnnnnnnnnnnnnnnnnnnnnnnnnnnnnnnnnnnnnnnnnnnnnnnnnnnnnnnnnnnnnnnnnnnnnnnnnnnnnnnnnnnnnnnnnnnnnnnnnnnnnnnnnnnnnnnnnnnnnnnnnnnnnnnnnnnnnnnnnnnnnnnnnnnnnnnnnnnnnnnnnnnnnnnnnnnnnnnnnnnnnnnnnnnnnnnnnnnnnnnnnnnnnnnnnnnnnnnnnnnnnnnnnnnnnnnnnnnnnnnnnnnnnnnnnnnnnnnnnnnnnnnnnnnnnnnnnnnnnnnnnnnnnnnnnnnnnnnnnnnnnnnnnnnnnnnnnnnnnnnnnnnnnnnnnnnnnnnnnnnnnnnnnnnnnnnnnnnnnnnnnnnnnnnnnnnnnnnnnnnnnnnnnnnnnnnnnnnnnnnnnnnnnnnnnnnnnnnnnnnnnnnnnnnnnnnnnnnnnnnnnnnnnnnnnnnnnnnnnnnnnnnnnnnnnnnnnnnnnnnnnnnnnnnnnnnnnnnnnnnnnnnnnnnnnnnnnnnnnnnnnnnnnnnnnnnnnnnnnnnnnnnnnnnnnnnnnnnnnnnnnnnnnnnnnnnnnnnnnnnnnnnnnnnnnnnnnnnnnnnnnnnnnnnnnnnnnnnnnnnnnnnnnnnnnnnnnnnnnnnnnnnnnnnnnnnnnnnnnnnnnnnnnnnnnnnnnnnnnnnnnnnnnnnnnnnnnnnnnnnnnnnnnnnnnnnnnnnnnnnnnnnnnnnnnnnnnnnnnnnnnnnnnnnnnnnnnnnnnnnnnnnnnnnnnnnnnnnnnnnnnnnnnnnnnnnnnnnnnnnnnnnnnnnnnnnnnnnnnnnnnnnnnnnnnnnnnnnnnnnnnnnnnnnnnnnnnnnnnnnnnnnnnnnnnnnnnnnnnnnnnnnnnnnnnnnnnnnnnnnnnnnnnnnnnnnnnnnnnnnnnnnnnnnnnnnnnnnnnnnnnnnnnnnnnnnnnnnnnnnnnnnnnnnnnnnnnnnnnnnnnnnnnnnnnnnnnnnnnnnnnnnnnnnnnnnnnnnnnnnnnnnnnnnnnnnnnnnnnnnnnnnnnnnnnnnnnnnnnnnnnnnnnnnnnnnnnnnnnnnnnnnnnnnnnnnnnnnnnnnnnnnnnnnnnnnnnnnnnnnnnnnnnnnnnnnnnnnnnnnnnnnnnnnnnnnnnnnnnnnnnnnnnnnnnnnnnnnnnnnnnnnnnnnnnnnnnnnnnnnnnnnnnnnnnnnnnnnnnnnnnnnnnnnnnnnnnnnnnnnnnnnnnnnnnnnnnnnnnnnnnnnnnnnnnnnnnnnnnnnnnnnnnnnnnnnnnnnnnnnnnnnnnnnnnnnnnnnnnnnnnnnnnnnnnnnnnnnnnnnnnnnnnnnnnnnnnnnnnnnnnnnnnnnnnnnnnnnnnnnnnnnnnnnnnnnnnnnnnnnnnnnnnnnnnnnnnnnnnnnnnnnnnnnnnnnnnnnnnnnnnnnnnnnnnnnnnnnnnnnnnnnnnnnnnnnnnnnnnnnnnnnnnnnnnnnnnnnnnnnnnnnnnnnnnnnnnnnnnnnnnnnnnnnnnnnnnnnnnnnnnnnnnnnnnnnnnnnnnnnnnnnnnnnnnnnnnnnnnnnnnnnnnnnnnnnnnnnnnnnnnnnnnnnnnnnnnnnnnnnnnnnnnnnnnnnnnnnnnnnnnnnnnnnnnnnnnnnnnnnnnnnnnnnnnnnnnnnnnnnnnnnnnnnnnnnnnnnnnnnnnnnnnnnnnnnnnnnnnnnnnnnnnnnnnnnnnnnnnnnnnnnnnnnnnnnnnnnnnnnnnnnnnnnnnnnnnnnnnnnnnnnnnnnnnnnnnnnnnnnnnnnnnnnnnnnnnnnnnnnnnnnnnnnnnnnnnnnnnnnnnnnnnnnnnnnnnnnnnnnnnnnnnnnnnnnnnnnnnnnnnnnnnnnnnnnnnnnnnnnnnnnnnnnnnnnnnnnnnnnnnnnnnnnnnnnnnnnnnnnnnnnnnnnnnnnnnnnnnnnnnnnnnnnnnnnnnnnnnnnnnnnnnnnnnnnnnnnnnnnnnnnnnnnnnnnnnnnnnnnnnnnnnnnnnnnnnnnnnnnnnnnnnnnnnnnnnnnnnnnnnnnnnnnnnnnnnnnnnnnnnnnnnnnnnnnnnnnnnnnnnnnnnnnnnnnnnnnnnnnnnnnnnnnnnnnnnnnnnnnnnnnnnnnnnnnnnnnnnnnnnnnnnnnnnnnnnnnnnnnnnnnnnnnnnnnnnnnnnnnnnnnnnnnnnnnnnnnnnnnnnnnnnnnnnnnnnnnnnnnnnnnnnnnnnnnnnnnnnnnnnnnnnnnnnnnnnnnnnnnnnnnnnnnnnnnnnnnnnnnnnnnnnnnnnnnnnnnnnnnnnnnnnnnnnnnnnnnnnnnnnnnnnnnnnnnnnnnnnnnnnnnnnnnnnnnnnnnnnnnnnnnnnnnnnnnnnnnnnnnnnnnnnnnnnnnnnnnnnnnnnnnnnnnnnnnnnnnnnnnnnnnnnnnnnnnnnnnnnnnnnnnnnnnnnnnnnnnnnnnnnnnnnnnnnnnnnnnnnnnnnnnnnnnnnnnnnnnnnnnnnnnnnnnnnnnnnnnnnnnnnnnnnnnnnnnnnnnnnnnnnnnnnnnnnnnnnnnnnnnnnnnnnnnnnnnnnnnnnnnnnnnnnnnnnnnnnnnnnnnnnnnnnnnnnnnnnnnnnnnnnnnnnnnnnnnnnnnnnnnnnnnnnnnnnnnnnnnnnnnnnnnnnnnnnnnnnnnnnnnnnnnnnnnnnnnnnnnnnnnnnnnnnnnnnnnnnnnnnnnnnnnnnnnnnnnnnnnnnnnnnnnnnnnnnnnnnnnnnnnnnnnnnnnnnnnnnnnnnnnnnnnnnnnnnnnnnnnnnnnnnnnnnnnnnnnnnnnnnnnnnnnnnnnnnnnnnnnnnnnnnnnnnnnnnnnnnnnnnnnnnnnnnnnnnnnnnnnnnnnnnnnnnnnnnnnnnnnnnnnnnnnnnnnnnnnnnnnnnnnnnnnnnnnnnnnnnnnnnnnnnnnnnnnnnnnnnnnnnnnnnnnnnnnnnnnnnnnnnnnnnnnnnnnnnnnnnnnnnnnnnnnnnnnnnnnnnnnnnnnnnnnnnnnnnnnnnnnnnnnnnnnnnnnnnnnnnnnnnnnnnnnnnnnnnnnnnnnnnnnnnnnnnnnnnnnnnnnnnnnnnnnnnnnnnnnnnnnnnnnnnnnnnnnnnnnnnnnnnnnnnnnnnnnnnnnnnnnnnnnnnnnnnnnnnnnnnnnnnnnnnnnnnnnnnnnnnnnnnnnnnnnnnnnnnnnnnnnnnnnnnnnnnnnnnnnnnnnnnnnnnnnnnnnnnnnnnnnnnnnnnnnnnnnnnnnnnnnnnnnnnnnnnnnnnnnnnnnnnnnnnnnnnnnnnnnnnnnnnnnnnnnnnnnnnnnnnnnnnnnnnnnnnnnnnnnnnnnnnnnnnnnnnnnnnnnnnnnnnnnnnnnnnnnnnnnnnnnnnnnnnnnnnnnnnnnnnnnnnnnnnnnnnnnnnnnnnnnnnnnnnnnnnnnnnnnnnnnnnnnnnnnnnnnnnnnnnnnnnnnnnnnnnnnnnnnnnnnnnnnnnnnnnnnnnnnnnnnnnnnnnnnnnnnnnnnnnnnnnnnnnnnnnnnnnnnnnnnnnnnnnnnnnnnnnnnnnnnnnnnnnnnnnnnnnnnnnnnnnnnnnnnnnnnnnnnnnnnnnnnnnnnnnnnnnnnnnnnnnnnnnnnnnnnnnnnnnnnnnnnnnnnnnnnnnnnnnnnnnnnnnnnnnnnnnnnnnnnnnnnnnnnnnnnnnnnnnnnnnnnnnnnnnnnnnnnnnnnnnnnnnnnnnnnnnnnnnnnnnnnnnnnnnnnnnnnnnnnnnnnnnnnnnnnnnnnnnnnnnnnnnnnnnnnnnnnnnnnnnnnnnnnnnnnnnnnnnnnnnnnnnnnnnnnnnnnnnnnnnnnnnnnnnnnnnnnnnnnnnnnnnnnnnnnnnnnnnnnnnnnnnnnnnnnnnnnnnnnnnnnnnnnnnnnnnnnnnnnnnnnnnnnnnnnnnnnnnnnnnnnnnnnnnnnnnnnnnnnnnnnnnnnnnnnnnnnnnnnnnnnnnnnnnnnnnnnnnnnnnnnnnnnnnnnnnnnnnnnnnnnnnnnnnnnnnnnnnnnnnnnnnnnnnnnnnnnnnnnnnnnnnnnnnnnnnnnnnnnnnnnnnnnnnnnnnnnnnnnnnnnnnnnnnnnnnnnnnnnnnnnnnnnnnnnnnnnnnnnnnnnnnnnnnnnnnnnnnnnnnnnnnnnnnnnnnnnnnnnnnnnnnnnnnnnnnnnnnnnnnnnnnnnnnnnnnnnnnnnnnnnnnnnnnnnnnnnnnnnnnnnnnnnnnnnnnnnnnnnnnnnnnnnnnnnnnnnnnnnnnnnnnnnnnnnnnnnnnnnnnnnnnnnnnnnnnnnnnnnnnnnnnnnnnnnnnnnnnnnnnnnnnnnnnnnnnnnnnnnnnnnnnnnnnnnnnnnnnnnnnnnnnnnnnnnnnnnnnnnnnnnnnnnnnnnnnnnnnnnnnnnnnnnnnnnnnnnnnnnnnnnnnnnnnnnnnnnnnnnnnnnnnnnnnnnnnnnnnnnnnnnnnnnnnnnnnnnnnnnnnnnnnnnnnnnnnnnnnnnnnnnnnnnnnnnnnnnnnnnnnnnnnnnnnnnnnnnnnnnnnnnnnnnnnnnnnnnnnnnnnnnnnnnnnnnnnnnnnnnnnnnnnnnnnnnnnnnnnnnnnnnnnnnnnnnnnnnnnnnnnnnnnnnnnnnnnnnnnnnnnnnnnnnnnnnnnnnnnnnnnnnnnnnnnnnnnnnnnnnnnnnnnnnnnnnnnnnnnnnnnnnnnnnnnnnnnnnnnnnnnnnnnnnnnnnnnnnnnnnnnnnnnnnnnnnnnnnnnnnnnnnnnnnnnnnnnnnnnnnnnnnnnnnnnnnnnnnnnnnnnnnnnnnnnnnnnnnnnnnnnnnnnnnnnnnnnnnnnnnnnnnnnnnnnnnnnnnnnnnnnnnnnnnnnnnnnnnnnnnnnnnnnnnnnnnnnnnnnnnnnnnnnnnnnnnnnnnnnnnnnnnnnnnnnnnnnnnnnnnnnnnnnnnnnnnnnnnnnnnnnnnnnnnnnnnnnnnnnnnnnnnnnnnnnnnnnnnnnnnnnnnnnnnnnnnnnnnnnnnnnnnnnnnnnnnnnnnnnnnnnnnnnnnnnnnnnnnnnnnnnnnnnnnnnnnnnnnnnnnnnnnnnnnnnnnnnnnnnnnnnnnnnnnnnnnnnnnnnnnnnnnnnnnnnnnnnnnnnnnnnnnnnnnnnnnnnnnnnnnnnnnnnnnnnnnnnnnnnnnnnnnnnnnnnnnnnnnnnnnnnnnnnnnnnnnnnnnnnnnnnnnnnnnnnnnnnnnnnnnnnnnnnnnnnnnnnnnnnnnnnnnnnnnnnnnnnnnnnnnnnnnnnnnnnnnnnnnnnnnnnnnnnnnnnnnnnnnnnnnnnnnnnnnnnnnnnnnnnnnnnnnnnnnnnnnnnnnnnnnnnnnnnnnnnnnnnnnnnnnnnnnnnnnnnnnnnnnnnnnnnnnnnnnnnnnnnnnnnnnnnnnnnnnnnnnnnnnnnnnnnnnnnnnnnnnnnnnnnnnnnnnnnnnnnnnnnnnnnnnnnnnnnnnnnnnnnnnnnnnnnnnnnnnnnnnnnnnnnnnnnnnnnnnnnnnnnnnnnnnnnnnnnnnnnnnnnnnnnnnnnnnnnnnnnnnnnnnnnnnnnnnnnnnnnnnnnnnnnnnnnnnnnnnnnnnnnnnnnnnnnnnnnnnnnnnnnnnnnnnnnnnnnnnnnnnnnnnnnnnnnnnnnnnnnnnnnnnnnnnnnnnnnnnnnnnnnnnnnnnnnnnnnnnnnnnnnnnnnnnnnnnnnnnnnnnnnnnnnnnnnnnnnnnnnnnnnnnnnnnnnnnnnnnnnnnnnnnnnnnnnnnnnnnnnnnnnnnnnnnnnnnnnnnnnnnnnnnnnnnnnnnnnnnnnnnnnnnnnnnnnnnnnnnnnnnnnnnnnnnnnnnnnnnnnnnnnnnnnnnnnnnnnnnnnnnnnnnnnnnnnnnnnnnnnnnnnnnnnnnnnnnnnnnnnnnnnnnnnnnnnnnnnnnnnnnnnnnnnnnnnnnnnnnnnnnnnnnnnnnnnnnnnnnnnnnnnnnnnnnnnnnnnnnnnnnnnnnnnnnnnnnnnnnnnnnnnnnnnnnnnnnnnnnnnnnnnnnnnnnnnnnnnnnnnnnnnnnnnnnnnnnnnnnnnnnnnnnnnnnnnnnnnnnnnnnnnnnnnnnnnnnnnnnnnnnnnnnnnnnnnnnnnnnnnnnnnnnnnnnnnnnnnnnnnnnnnnnnnnnnnnnnnnnnnnnnnnnnnnnnnnnnnnnnnnnnnnnnnnnnnnnnnnnnnnnnnnnnnnnnnnnnnnnnnnnnnnnnnnnnnnnnnnnnnnnnnnnnnnnnnnnnnnnnnnnnnnnnnnnnnnnnnnnnnnnnnnnnnnnnnnnnnnnnnnnnnnnnnnnnnnnnnnnnnnnnnnnnnnnnnnnnnnnnnnnnnnnnnnnnnnnnnnnnnnnnnnnnnnnnnnnnnnnnnnnnnnnnnnnnnnnnnnnnnnnnnnnnnnnnnnnnnnnnnnnnnnnnnnnnnnnnnnnnnnnnnnnnnnnnnnnnnnnnnnnnnnnnnnnnnnnnnnnnnnnnnnnnnnnnnnnnnnnnnnnnnnnnnnnnnnnnnnnnnnnnnnnnnnnnnnnnnnnnnnnnnnnnnnnnnnnnnnnnnnnnnnnnnnnnnnnnnnnnnnnnnnnnnnnnnnnnnnnnnnnnnnnnnnnnnnnnnnnnnnnnnnnnnnnnnnnnnnnnnnnnnnnnnnnnnnnnnnnnnnnnnnnnnnnnnnnnnnnnnnnnnnnnnnnnnnnnnnnnnnnnnnnnnnnnnnnnnnnnnnnnnnnnnnnnnnnnnnnnnnnnnnnnnnnnnnnnnnnnnnnnnnnnnnnnnnnnnnnnnnnnnnnnnnnnnnnnnnnnnnnnnnnnnnnnnnnnnnnnnnnnnnnnnnnnnnnnnnnnnnnnnnnnnnnnnnnnnnnnnnnnnnnnnnnnnnnnnnnnnnnnnnnnnnnnnnnnnnnnnnnnnnnnnnnnnnnnnnnnnnnnnnnnnnnnnnnnnnnnnnnnnnnnnnnnnnnnnnnnnnnnnnnnnnnnnnnnnnnnnnnnnnnnnnnnnnnnnnnnnnnnnnnnnnnnnnnnnnnnnnnnnnnnnnnnnnnnnnnnnnnnnnnnnnnnnnnnnnnnnnnnnnnnnnnnnnnnnnnnnnnnnnnnnnnnnnnnnnnnnnnnnnnnnnnnnnnnnnnnnnnnnnnnnnnnnnnnnnnnnnnnnnnnnnnnnnnnnnnnnnnnnnnnnnnnnnnnnnnnnnnnnnnnnnnnnnnnnnnnnnnnnnnnnnnnnnnnnnnnnnnnnnnnnnnnnnnnnnnnnnnnnnnnnnnnnnnnnnnnnnnnnnnnnnnnnnnnnnnnnnnnnnnnnnnnnnnnnnnnnnnnnnnnnnnnnnnnnnnnnnnnnnnnnnnnnnnnnnnnnnnnnnnnnnnnnnnnnnnnnnnnnnnnnnnnnnnnnnnnnnnnnnnnnnnnnnnnnnnnnnnnnnnnnnnnnnnnnnnnnnnnnnnnnnnnnnnnnnnnnnnnnnnnnnnnnnnnnnnnnnnnnnnnnnnnnnnnnnnnnnnnnnnnnnnnnnnnnnnnnnnnnnnnnnnnnnnnnnnnnnnnnnnnnnnnnnnnnnnnnnnnnnnnnnnnnnnnnnnnnnnnnnnnnnnnnnnnnnnnnnnnnnnnnnnnnnnnnnnnnnnnnnnnnnnnnnnnnnnnnnnnnnnnnnnnnnnnnnnnnnnnnnnnnnnnnnnnnnnnnnnnnnnnnnnnnnnnnnnnnnnnnnnnnnnnnnnnnnnnnnnnnnnnnnnnnnnnnnnnnnnnnnnnnnnnnnnnnnnnnnnnnnnnnnnnnnnnnnnnnnnnnnnnnnnnnnnnnnnnnnnnnnnnnnnnnnnnnnnnnnnnnnnnnnnnnnnnnnnnnnnnnnnnnnnnnnnnnnnnnnnnnnnnnnnnnnnnnnnnnnnnnnnnnnnnnnnnnnnnnnnnnnnnnnnnnnnnnnnnnnnnnnnnnnnnnnnnnnnnnnnnnnnnnnnnnnnnnnnnnnnnnnnnnnnnnnnnnnnnnnnnnnnnnnnnnnnnnnnnnnnnnnnnnnnnnnnnnnnnnnnnnnnnnnnnnnnnnnnnnnnnnnnnnnnnnnnnnnnnnnnnnnnnnnnnnnnnnnnnnnnnnnnnnnnnnnnnnnnnnnnnnnnnnnnnnnnnnnnnnnnnnnnnnnnnnnnnnnnnnnnnnnnnnnnnnnnnnnnnnnnnnnnnnnnnnnnnnnnnnnnnnnnnnnnnnnnnnnnnnnnnnnnnnnnnnnnnnnnnnnnnnnnnnnnnnnnnnnnnnnnnnnnnnnnnnnnnnnnnnnnnnnnnnnnnnnnnnnnnnnnnnnnnnnnnnnnnnnnnnnnnnnnnnnnnnnnnnnnnnnnnnnnnnnnnnnnnnnnnnnnnnnnnnnnnnnnnnnnnnnnnnnnnnnnnnnnnnnnnnnnnnnnnnnnnnnnnnnnnnnnnnnnnnnnnnnnnnnnnnnnnnnnnnnnnnnnnnnnnnnnnnnnnnnnnnnnnnnnnnnnnnnnnnnnnnnnnnnnnnnnnnnnnnnnnnnnnnnnnnnnnnnnnnnnnnnnnnnnnnnnnnnnnnnnnnnnnnnnnnnnnnnnnnnnnnnnnnnnnnnnnnnnnnnnnnnnnnnnnnnnnnnnnnnnnnnnnnnnnnnnnnnnnnnnnnnnnnnnnnnnnnnnnnnnnnnnnnnnnnnnnnnnnnnnnnnnnnnnnnnnnnnnnnnnnnnnnnnnnnnnnnnnnnnnnnnnnnnnnnnnnnnnnnnnnnnnnnnnnnnnnnnnnnnnnnnnnnnnnnnnnnnnnnnnnnnnnnnnnnnnnnnnnnnnnnnnnnnnnnnnnnnnnnnnnnnnnnnnnnnnnnnnnnnnnnnnnnnnnnnnnnnnnnnnnnnnnnnnnnnnnnnnnnnnnnnnnnnnnnnnnnnnnnnnnnnnnnnnnnnnnnnnnnnnnnnnnnnnnnnnnnnnnnnnnnnnnnnnnnnnnnnnnnnnnnnnnnnnnnnnnnnnnnnnnnnnnnnnnnnnnnnnnnnnnnnnnnnnnnnnnnnnnnnnnnnnnnnnnnnnnnnnnnnnnnnnnnnnnnnnnnnnnnnnnnnnnnnnnnnnnnnnnnnnnnnnnnnnnnnnnnnnnnnnnnnnnnnnnnnnnnnnnnnnnnnnnnnnnnnnnnnnnnnnnnnnnnnnnnnnnnnnnnnnnnnnnnnnnnnnnnnnnnnnnnnnnnnnnnnnnnnnnnnnnnnnnnnnnnnnnnnnnnnnnnnnnnnnnnnnnnnnnnnnnnnnnnnnnnnnnnnnnnnnnnnnnnnnnnnnnnnnnnnnnnnnnnnnnnnnnnnnnnnnnnnnnnnnnnnnnnnnnnnnnnnnnnnnnnnnnnnnnnnnnnnnnnnnnnnnnnnnnnnnnnnnnnnnnnnnnnnnnnnnnnnnnnnnnnnnnnnnnnnnnnnnnnnnnnnnnnnnnnnnnnnnnnnnnnnnnnnnnnnnnnnnnnnnnnnnnnnnnnnnnnnnnnnnnnnnnnnnnnnnnnnnnnnnnnnnnnnnnnnnnnnnnnnnnnnnnnnnnnnnnnnnnnnnnnnnnnnnnnnnnnnnnnnnnnnnnnnnnnnnnnnnnnnnnnnnnnnnnnnnnnnnnnnnnnnnnnnnnnnnnnnnnnnnnnnnnnnnnnnnnnnnnnnnnnnnnnnnnnnnnnnnnnnnnnnnnnnnnnnnnnnnnnnnnnnnnnnnnnnnnnnnnnnnnnnnnnnnnnnnnnnnnnnnnnnnnnnnnnnnnnnnnnnnnnnnnnnnnnnnnnnnnnnnnnnnnnnnnnnnnnnnnnnnnnnnnnnnnnnnnnnnnnnnnnnnnnnnnnnnnnnnnnnnnnnnnnnnnnnnnnnnnnnnnnnnnnnnnnnnnnnnnnnnnnnnnnnnnnnnnnnnnnnnnnnnnnnnnnnnnnnnnnnnnnnnnnnnnnnnnnnnnnnnnnnnnnnnnnnnnnnnnnnnnnnnnnnnnnnnnnnnnnnnnnnnnnnnnnnnnnnnnnnnnnnnnnnnnnnnnnnnnnnnnnnnnnnnnnnnnnnnnnnnnnnnnnnnnnnnnnnnnnnnnnnnnnnnnnnnnnnnnnnnnnnnnnnnnnnnnnnnnnnnnnnnnnnnnnnnnnnnnnnnnnnnnnnnnnnnnnnnnnnnnnnnnnnnnnnnnnnnnnnnnnnnnnnnnnnnnnnnnnnnnnnnnnnnnnnnnnnnnnnnnnnnnnnnnnnnnnnnnnnnnnnnnnnnnnnnnnnnnnnnnnnnnnnnnnnnnnnnnnnnnnnnnnnnnnnnnnnnnnnnnnnnnnnnnnnnnnnnnnnnnnnnnnnnnnnnnnnnnnnnnnnnnnnnnnnnnnnnnnnnnnnnnnnnnnnnnnnnnnnnnnnnnnnnnnnnnnnnnnnnnnnnnnnnnnnnnnnnnnnnnnnnnnnnnnnnnnnnnnnnnnnnnnnnnnnnnnnnnnnnnnnnnnnnnnnnnnnnnnnnnnnnnnnnnnnnnnnnnnnnnnnnnnnnnnnnnnnnnnnnnnnnnnnnnnnnnnnnnnnnnnnnnnnnnnnnnnnnnnnnnnnnnnnnnnnnnnnnnnnnnnnnnnnnnnnnnnnnnnnnnnnnnnnnnnnnnnnnnnnnnnnnnnnnnnnnnnnnnnnnnnnnnnnnnnnnnnnnnnnnnnnnnnnnnnnnnnnnnnnnnnnnnnnnnnnnnnnnnnnnnnnnnnnnnnnnnnnnnnnnnnnnnnnnnnnnnnnnnnnnnnnnnnnnnnnnnnnnnnnnnnnnnnnnnnnnnnnnnnnnnnnnnnnnnnnnnnnnnnnnnnnnnnnnnnnnnnnnnnnnnnnnnnnnnnnnnnnnnnnnnnnnnnnnnnnnnnnnnnnnnnnnnnnnnnnnnnnnnnnnnnnnnnnnnnnnnnnnnnnnnnnnnnnnnnnnnnnnnnnnnnnnnnnnnnnnnnnnnnnnnnnnnnnnnnnnnnnnnnnnnnnnnnnnnnnnnnnnnnnnnnnnnnnnnnnnnnnnnnnnnnnnnnnnnnnnnnnnnnnnnnnnnnnnnnnnnnnnnnnnnnnnnnnnnnnnnnnnnnnnnnnnnnnnnnnnnnnnnnnnnnnnnnnnnnnnnnnnnnnnnnnnnnnnnnnnnnnnnnnnnnnnnnnnnnnnnnnnnnnnnnnnnnnnnnnnnnnnnnnnnnnnnnnnnnnnnnnnnnnnnnnnnnnnnnnnnnnnnnnnnnnnnnnnnnnnnnnnnnnnnnnnnnnnnnnnnnnnnnnnnnnnnnnnnnnnnnnnnnnnnnnnnnnnnnnnnnnnnnnnnnnnnnnnnnnnnnnnnnnnnnnnnnnnnnnnnnnnnnnnnnnnnnnnnnnnnnnnnnnnnnnnnnnnnnnnnnnnnnnnnnnnnnnnnnnnnnnnnnnnnnnnnnnnnnnnnnnnnnnnnnnnnnnnnnnnnnnnnnnnnnnnnnnnnnnnnnnnnnnnnnnnnnnnnnnnnnnnnnnnnnnnnnnnnnnnnnnnnnnnnnnnnnnnnnnnnnnnnnnnnnnnnnnnnnnnnnnnnnnnnnnnnnnnnnnnnnnnnnnnnnnnnnnnnnnnnnnnnnnnnnnnnnnnnnnnnnnnnnnnnnnnnnnnnnnnnnnnnnnnnnnnnnnnnnnnnnnnnnnnnnnnnnnnnnnnnnnnnnnnnnnnnnnnnnnnnnnnnnnnnnnnnnnnnnnnnnnnnnnnnnnnnnnnnnnnnnnnnnnnnnnnnnnnnnnnnnnnnnnnnnnnnnnnnnnnnnnnnnnnnnnnnnnnnnnnnnnnnnnnnnnnnnnnnnnnnnnnnnnnnnnnnnnnnnnnnnnnnnnnnnnnnnnnnnnnnnnnnnnnnnnnnnnnnnnnnnnnnnnnnnnnnnnnnnnnnnnnnnnnnnnnnnnnnnnnnnnnnnnnnnnnnnnnnnnnnnnnnnnnnnnnnnnnnnnnnnnnnnnnnnnnnnnnnnnnnnnnnnnnnnnnnnnnnnnnnnnnnnnnnnnnnnnnnnnnnnnnnnnnnnnnnnnnnnnnnnnnnnnnnnnnnnnnnnnnnnnnnnnnnnnnnnnnnnnnnnnnnnnnnnnnnnnnnnnnnnnnnnnnnnnnnnnnnnnnnnnnnnnnnnnnnnnnnnnnnnnnnnnnnnnnnnnnnnnnnnnnnnnnnnnnnnnnnnnnnnnnnnnnnnnnnnnnnnnnnnnnnnnnnnnnnnnnnnnnnnnnnnnnnnnnnnnnnnnnnnnnnnnnnnnnnnnnnnnnnnnnnnnnnnnnnnnnnnnnnnnnnnnnnnnnnnnnnnnnnnnnnnnnnnnnnnnnnnnnnnnnnnnnnnnnnnnnnnnnnnnnnnnnnnnnnnnnnnnnnnnnnnnnnnnnnnnnnnnnnnnnnnnnnnnnnnnnnnnnnnnnnnnnnnnnnnnnnnnnnnnnnnnnnnnnnnnnnnnnnnnnnnnnnnnnnnnnnnnnnnnnnnnnnnnnnnnnnnnnnnnnnnnnnnnnnnnnnnnnnnnnnnnnnnnnnnnnnnnnnnnnnnnnnnnnnnnnnnnnnnnnnnnnnnnnnnnnnnnnnnnnnnnnnnnnnnnnnnnnnnnnnnnnnnnnnnnnnnnnnnnnnnnnnnnnnnnnnnnnnnnnnnnnnnnnnnnnnnnnnnnnnnnnnnnnnnnnnnnnnnnnnnnnnnnnnnnnnnnnnnnnnnnnnnnnnnnnnnnnnnnnnnnnnnnnnnnnnnnnnnnnnnnnnnnnnnnnnnnnnnnnnnnnnnnnnnnnnnnnnnnnnnnnnnnnnnnnnnnnnnnnnnnnnnnnnnnnnnnnnnnnnnnnnnnnnnnnnnnnnnnnnnnnnnnnnnnnnnnnnnnnnnnnnnnnnnnnnnnnnnnnnnnnnnnnnnnnnnnnnnnnnnnnnnnnnnnnnnnnnnnnnnnnnnnnnnnnnnnnnnnnnnnnnnnnnnnnnnnnnnnnnnnnnnnnnnnnnnnnnnnnnnnnnnnnnnnnnnnnnnnnnnnnnnnnnnnnnnnnnnnnnnnnnnnnnnnnnnnnnnnnnnnnnnnnnnnnnnnnnnnnnnnnnnnnnnnnnnnnnnnnnnnnnnnnnnnnnnnnnnnnnnnnnnnnnnnnnnnnnnnnnnnnnnnnnnnnnnnnnnnnnnnnnnnnnnnnnnnnnnnnnnnnnnnnnnnnnnnnnnnnnnnnnnnnnnnnnnnnnnnnnnnnnnnnnnnnnnnnnnnnnnnnnnnnnnnnnnnnnnnnnnnnnnnnnnnnnnnnnnnnnnnnnnnnnnnnnnnnnnnnnnnnnnnnnnnnnnnnnnnnnnnnnnnnnnnnnnnnnnnnnnnnnnnnnnnnnnnnnnnnnnnnnnnnnnnnnnnnnnnnnnnnnnnnnnnnnnnnnnnnnnnnnnnnnnnnnnnnnnnnnnnnnnnnnnnnnnnnnnnnnnnnnnnnnnnnnnnnnnnnnnnnnnnnnnnnnnnnnnnnnnnnnnnnnnnnnnnnnnnnnnnnnnnnnnnnnnnnnnnnnnnnnnnnnnnnnnnnnnnnnnnnnnnnnnnnnnnnnnnnnnnnnnnnnnnnnnnnnnnnnnnnnnnnnnnnnnnnnnnnnnnnnnnnnnnnnnnnnnnnnnnnnnnnnnnnnnnnnnnnnnnnnnnnnnnnnnnnnnnnnnnnnnnnnnnnnnnnnnnnnnnnnnnnnnnnnnnnnnnnnnnnnnnnnnnnnnnnnnnnnnnnnnnnnnnnnnnnnnnnnnnnnnnnnnnnnnnnnnnnnnnnnnnnnnnnnnnnnnnnnnnnnnnnnnnnnnnnnnnnnnnnnnnnnnnnnnnnnnnnnnnnnnnnnnnnnnnnnnnnnnnnnnnnnnnnnnnnnnnnnnnnnnnnnnnnnnnnnnnnnnnnnnnnnnnnnnnnnnnnnnnnnnnnnnnnnnnnnnnnnnnnnnnnnnnnnnnnnnnnnnnnnnnnnnnnnnnnnnnnnnnnnnnnnnnnnnnnnnnnnnnnnnnnnnnnnnnnnnnnnnnnnnnnnnnnnnnnnnnnnnnnnnnnnnnnnnnnnnnnnnnnnnnnnnnnnnnnnnnnnnnnnnnnnnnnnnnnnnnnnnnnnnnnnnnnnnnnnnnnnnnnnnnnnnnnnnnnnnnnnnnnnnnnnnnnnnnnnnnnnnnnnnnnnnnnnnnnnnnnnnnnnnnnnnnnnnnnnnnnnnnnnnnnnnnnnnnnnnnnnnnnnnnnnnnnnnnnnnnnnnnnnnnnnnnnnnnnnnnnnnnnnnnnnnnnnnnnnnnnnnnnnnnnnnnnnnnnnnnnnnnnnnnnnnnnnnnnnnnnnnnnnnnnnnnnnnnnnnnnnnnnnnnnnnnnnnnnnnnnnnnnnnnnnnnnnnnnnnnnnnnnnnnnnnnnnnnnnnnnnnnnnnnnnnnnnnnnnnnnnnnnnnnnnnnnnnnnnnnnnnnnnnnnnnnnnnnnnnnnnnnnnnnnnnnnnnnnnnnnnnnnnnnnnnnnnnnnnnnnnnnnnnnnnnnnnnnnnnnnnnnnnnnnnnnnnnnnnnnnnnnnnnnnnnnnnnnnnnnnnnnnnnnnnnnnnnnnnnnnnnnnnnnnnnnnnnnnnnnnnnnnnnnnnnnnnnnnnnnnnnnnnnnnnnnnnnnnnnnnnnnnnnnnnnnnnnnnnnnnnnnnnnnnnnnnnnnnnnnnnnnnnnnnnnnnnnnnnnnnnnnnnnnnnnnnnnnnnnnnnnnnnnnnnnnnnnnnnnnnnnnnnnnnnnnnnnnnnnnnnnnnnnnnnnnnnnnnnnnnnnnnnnnnnnnnnnnnnnnnnnnnnnnnnnnnnnnnnnnnnnnnnnnnnnnnnnnnnnnnnnnnnnnnnnnnnnnnnnnnnnnnnnnnnnnnnnnnnnnnnnnnnnnnnnnnnnnnnnnnnnnnnnnnnnnnnnnnnnnnnnnnnnnnnnnnnnnnnnnnnnnnnnnnnnnnnnnnnnnnnnnnnnnnnnnnnnnnnnnnnnnnnnnnnnnnnnnnnnnnnnnnnnnnnnnnnnnnnnnnnnnnnnnnnnnnnnnnnnnnnnnnnnnnnnnnnnnnnnnnnnnnnnnnnnnnnnnnnnnnnnnnnnnnnnnnnnnnnnnnnnnnnnnnnnnnnnnnnnnnnnnnnnnnnnnnnnnnnnnnnnnnnnnnnnnnnnnnnnnnnnnnnnnnnnnnnnnnnnnnnnnnnnnnnnnnnnnnnnnnnnnnnnnnnnnnnnnnnnnnnnnnnnnnnnnnnnnnnnnnnnnnnnnnnnnnnnnnnnnnnnnnnnnnnnnnnnnnnnnnnnnnnnnnnnnnnnnnnnnnnnnnnnnnnnnnnnnnnnnnnnnnnnnnnnnnnnnnnnnnnnnnnnnnnnnnnnnnnnnnnnnnnnnnnnnnnnnnnnnnnnnnnnnnnnnnnnnnnnnnnnnnnnnnnnnnnnnnnnnnnnnnnnnnnnnnnnnnnnnnnnnnnnnnnnnnnnnnnnnnnnnnnnnnnnnnnnnnnnnnnnnnnnnnnnnnnnnnnnnnnnnnnnnnnnnnnnnnnnnnnnnnnnnnnnnnnnnnnnnnnnnnnnnnnnnnnnnnnnnnnnnnnnnnnnnnnnnnnnnnnnnnnnnnnnnnnnnnnnnnnnnnnnnnnnnnnnnnnnnnnnnnnnnnnnnnnnnnnnnnnnnnnnnnnnnnnnnnnnnnnnnnnnnnnnnnnnnnnnnnnnnnnnnnnnnnnnnnnnnnnnnnnnnnnnnnnnnnnnnnnnnnnnnnnnnnnnnnnnnnnnnnnnnnnnnnnnnnnnnnnnnnnnnnnnnnnnnnnnnnnnnnnnnnnnnnnnnnnnnnnnnnnnnnnnnnnnnnnnnnnnnnnnnnnnnnnnnnnnnnnnnnnnnnnnnnnnnnnnnnnnnnnnnnnnnnnnnnnnnnnnnnnnnnnnnnnnnnnnnnnnnnnnnnnnnnnnnnnnnnnnnnnnnnnnnnnnnnnnnnnnnnnnnnnnnnnnnnnnnnnnnnnnnnnnnnnnnnnnnnnnnnnnnnnnnnnnnnnnnnnnnnnnnnnnnnnnnnnnnnnnnnnnnnnnnnnnnnnnnnnnnnnnnnnnnnnnnnnnnnnnnnnnnnnnnnnnnnnnnnnnnnnnnnnnnnnnnnnnnnnnnnnnnnnnnnnnnnnnnnnnnnnnnnnnnnnnnnnnnnnnnnnnnnnnnnnnnnnnnnnnnnnnnnnnnnnnnnnnnnnnnnnnnnnnnnnnnnnnnnnnnnnnnnnnnnnnnnnnnnnnnnnnnnnnnnnnnnnnnnnnnnnnnnnnnnnnnnnnnnnnnnnnnnnnnnnnnnnnnnnnnnnnnnnnnnnnnnnnnnnnnnnnnnnnnnnnnnnnnnnnnnnnnnnnnnnnnnnnnnnnnnnnnnnnnnnnnnnnnnnnnnnnnnnnnnnnnnnnnnnnnnnnnnnnnnnnnnnnnnnnnnnnnnnnnnnnnnnnnnnnnnnnnnnnnnnnnnnnnnnnnnnnnnnnnnnnnnnnnnnnnnnnnnnnnnnnnnnnnnnnnnnnnnnnnnnnnnnnnnnnnnnnnnnnnnnnnnnnnnnnnnnnnnnnnnnnnnnnnnnnnnnnnnnnnnnnnnnnnnnnnnnnnnnnnnnnnnnnnnnnnnnnnnnnnnnnnnnnnnnnnnnnnnnnnnnnnnnnnnnnnnnnnnnnnnnnnnnnnnnnnnnnnnnnnnnnnnnnnnnnnnnnnnnnnnnnnnnnnnnnnnnnnnnnnnnnnnnnnnnnnnnnnnnnnnnnnnnnnnnnnnnnnnnnnnnnnnnnnnnnnnnnnnnnnnnnnnnnnnnnnnnnnnnnnnnnnnnnnnnnnnnnnnnnnnnnnnnnnnnnnnnnnnnnnnnnnnnnnnnnnnnnnnnnnnnnnnnnnnnnnnnnnnnnnnnnnnnnnnnnnnnnnnnnnnnnnnnnnnnnnnnnnnnnnnnnnnnnnnnnnnnnnnnnnnnnnnnnnnnnnnnnnnnnnnnnnnnnnnnnnnnnnnnnnnnnnnnnnnnnnnnnnnnnnnnnnnnnnnnnnnnnnnnnnnnnnnnnnnnnnnnnnnnnnnnnnnnnnnnnnnnnnnnnnnnnnnnnnnnnnnnnnnnnnnnnnnnnnnnnnnnnnnnnnnnnnnnnnnnnnnnnnnnnnnnnnnnnnnnnnnnnnnnnnnnnnnnnnnnnnnnnnnnnnnnnnnnnnnnnnnnnnnnnnnnnnnnnnnnnnnnnnnnnnnnnnnnnnnnnnnnnnnnnnnnnnnnnnnnnnnnnnnnnnnnnnnnnnnnnnnnnnnnnnnnnnnnnnnnnnnnnnnnnnnnnnnnnnnnnnnnnnnnnnnnnnnnnnnnnnnnnnnnnnnnnnnnnnnnnnnnnnnnnnnnnnnnnnnnnnnnnnnnnnnnnnnnnnnnnnnnnnnnnnnnnnnnnnnnnnnnnnnnnnnnnnnnnnnnnnnnnnnnnnnnnnnnnnnnnnnnnnnnnnnnnnnnnnnnnnnnnnnnnnnnnnnnnnnnnnnnnnnnnnnnnnnnnnnnnnnnnnnnnnnnnnnnnnnnnnnnnnnnnnnnnnnnnnnnnnnnnnnnnnnnnnnnnnnnnnnnnnnnnnnnnnnnnnnnnnnnnnnnnnnnnnnnnnnnnnnnnnnnnnnnnnnnnnnnnnnnnnnnnnnnnnnnnnnnnnnnnnnnnnnnnnnnnnnnnnnnnnnnnnnnnnnnnnnnnnnnnnnnnnnnnnnnnnnnnnnnnnnnnnnnnnnnnnnnnnnnnnnnnnnnnnnnnnnnnnnnnnnnnnnnnnnnnnnnnnnnnnnnnnnnnnnnnnnnnnnnnnnnnnnnnnnnnnnnnnnnnnnnnnnnnnnnnnnnnnnnnnnnnnnnnnnnnnnnnnnnnnnnnnnnnnnnnnnnnnnnnnnnnnnnnnnnnnnnnnnnnnnnnnnnnnnnnnnnnnnnnnnnnnnnnnnnnnnnnnnnnnnnnnnnnnnnnnnnnnnnnnnnnnnnnnnnnnnnnnnnnnnnnnnnnnnnnnnnnnnnnnnnnnnnnnnnnnnnnnnnnnnnnnnnnnnnnnnnnnnnnnnnnnnnnnnnnnnnnnnnnnnnnnnnnnnnnnnnnnnnnnnnnnnnnnnnnnnnnnnnnnnnnnnnnnnnnnnnnnnnnnnnnnnnnnnnnnnnnnnnnnnnnnnnnnnnnnnnnnnnnnnnnnnnnnnnnnnnnnnnnnnnnnnnnnnnnnnnnnnnnnnnnnnnnnnnnnnnnnnnnnnnnnnnnnnnnnnnnnnnnnnnnnnnnnnnnnnnnnnnnnnnnnnnnnnnnnnnnnnnnnnnnnnnnnnnnnnnnnnnnnnnnnnnnnnnnnnnnnnnnnnnnnnnnnnnnnnnnnnnnnnnnnnnnnnnnnnnnnnnnnnnnnnnnnnnnnnnnnnnnnnnnnnnnnnnnnnnnnnnnnnnnnnnnnnnnnnnnnnnnnnnnnnnnnnnnnnnnnnnnnnnnnnnnnnnnnnnnnnnnnnnnnnnnnnnnnnnnnnnnnnnnnnnnnnnnnnnnnnnnnnnnnnnnnnnnnnnnnnnnnnnnnnnnnnnnnnnnnnnnnnnnnnnnnnnnnnnnnnnnnnnnnnnnnnnnnnnnnnnnnnnnnnnnnnnnnnnnnnnnnnnnnnnnnnnnnnnnnnnnnnnnnnnnnnnnnnnnnnnnnnnnnnnnnnnnnnnnnnnnnnnnnnnnnnnnnnnnnnnnnnnnnnnnnnnnnnnnnnnnnnnnnnnnnnnnnnnnnnnnnnnnnnnnnnnnnnnnnnnnnnnnnnnnnnnnnnnnnnnnnnnnnnnnnnnnnnnnnnnnnnnnnnnnnnnnnnnnnnnnnnnnnnnnnnnnnnnnnnnnnnnnnnnnnnnnnnnnnnnnnnnnnnnnnnnnnnnnnnnnnnnnnnnnnnnnnnnnnnnnnnnnnnnnnnnnnnnnnnnnnnnnnnnnnnnnnnnnnnnnnnnnnnnnnnnnnnnnnnnnnnnnnnnnnnnnnnnnnnnnnnnnnnnnnnnnnnnnnnnnnnnnnnnnnnnnnnnnnnnnnnnnnnnnnnnnnnnnnnnnnnnnnnnnnnnnnnnnnnnnnnnnnnnnnnnnnnnnnnnnnnnnnnnnnnnnnnnnnnnnnnnnnnnnnnnnnnnnnnnnnnnnnnnnnnnnnnnnnnnnnnnnnnnnnnnnnnnnnnnnnnnnnnnnnnnnnnnnnnnnnnnnnnnnnnnnnnnnnnnnnnnnnnnnnnnnnnnnnnnnnnnnnnnnnnnnnnnnnnnnnnnnnnnnnnnnnnnnnnnnnnnnnnnnnnnnnnnnnnnnnnnnnnnnnnnnnnnnnnnnnnnnnnnnnnnnnnnnnnnnnnnnnnnnnnnnnnnnnnnnnnnnnnnnnnnnnnnnnnnnnnnnnnnnnnnnnnnnnnnnnnnnnnnnnnnnnnnnnnnnnnnnnnnnnnnnnnnnnnnnnnnnnnnnnnnnnnnnnnnnnnnnnnnnnnnnnnnnnnnnnnnnnnnnnnnnnnnnnnnnnnnnnnnnnnnnnnnnnnnnnnnnnnnnnnnnnnnnnnnnnnnnnnnnnnnnnnnnnnnnnnnnnnnnnnnnnnnnnnnnnnnnnnnnnnnnnnnnnnnnnnnnnnnnnnnnnnnnnnnnnnnnnnnnnnnnnnnnnnnnnnnnnnnnnnnnnnnnnnnnnnnnnnnnnnnnnnnnnnnnnnnnnnnnnnnnnnnnnnnnnnnnnnnnnnnnnnnnnnnnnnnnnnnnnnnnnnnnnnnnnnnnnnnnnnnnnnnnnnnnnnnnnnnnnnnnnnnnnnnnnnnnnnnnnnnnnnnnnnnnnnnnnnnnnnnnnnnnnnnnnnnnnnnnnnnnnnnnnnnnnnnnnnnnnnnnnnnnnnnnnnnnnnnnnnnnnnnnnnnnnnnnnnnnnnnnnnnnnnnnnnnnnnnnnnnnnnnnnnnnnnnnnnnnnnnnnnnnnnnnnnnnnnnnnnnnnnnnnnnnnnnnnnnnnnnnnnnnnnnnnnnnnnnnnnnnnnnnnnnnnnnnnnnnnnnnnnnnnnnnnnnnnnnnnnnnnnnnnnnnnnnnnnnnnnnnnnnnnnnnnnnnnnnnnnnnnnnnnnnnnnnnnnnnnnnnnnnnnnnnnnnnnnnnnnnnnnnnnnnnnnnnnnnnnnnnnnnnnnnnnnnnnnnnnnnnnnnnnnnnnnnnnnnnnnnnnnnnnnnnnnnnnnnnnnnnnnnnnnnnnnnnnnnnnnnnnnnnnnnnnnnnnnnnnnnnnnnnnnnnnnnnnnnnnnnnnnnnnnnnnnnnnnnnnnnnnnnnnnnnnnnnnnnnnnnnnnnnnnnnnnnnnnnnnnnnnnnnnnnnnnnnnnnnnnnnnnnnnnnnnnnnnnnnnnnnnnnnnnnnnnnnnnnnnnnnnnnnnnnnnnnnnnnnnnnnnnnnnnnnnnnnnnnnnnnnnnnnnnnnnnnnnnnnnnnnnnnnnnnnnnnnnnnnnnnnnnnnnnnnnnnnnnnnnnnnnnnnnnnnnnnnnnnnnnnnnnnnnnnnnnnnnnnnnnnnnnnnnnnnnnnnnnnnnnnnnnnnnnnnnnnnnnnnnnnnnnnnnnnnnnnnnnnnnnnnnnnnnnnnnnnnnnnnnnnnnnnnnnnnnnnnnnnnnnnnnnnnnnnnnnnnnnnnnnnnnnnnnnnnnnnnnnnnnnnnnnnnnnnnnnnnnnnnnnnnnnnnnnnnnnnnnnnnnnnnnnnnnnnnnnnnnnnnnnnnnnnnnnnnnnnnnnnnnnnnnnnnnnnnnnnnnnnnnnnnnnnnnnnnnnnnnnnnnnnnnnnnnnnnnnnnnnnnnnnnnnnnnnnnnnnnnnnnnnnnnnnnnnnnnnnnnnnnnnnnnnnnnnnnnnnnnnnnnnnnnnnnnnnnnnnnnnnnnnnnnnnnnnnnnnnnnnnnnnnnnnnnnnnnnnnnnnnnnnnnnnnnnnnnnnnnnnnnnnnnnnnnnnnnnnnnnnnnnnnnnnnnnnnnnnnnnnnnnnnnnnnnnnnnnnnnnnnnnnnnnnnnnnnnnnnnnnnnnnnnnnnnnnnnnnnnnnnnnnnnnnnnnnnnnnnnnnnnnnnnnnnnnnnnnnnnnnnnnnnnnnnnnnnnnnnnnnnnnnnnnnnnnnnnnnnnnnnnnnnnnnnnnnnnnnnnnnnnnnnnnnnnnnnnnnnnnnnnnnnnnnnnnnnnnnnnnnnnnnnnnnnnnnnnnnnnnnnnnnnnnnnnnnnnnnnnnnnnnnnnnnnnnnnnnnnnnnnnnnnnnnnnnnnnnnnnnnnnnnnnnnnnnnnnnnnnnnnnnnnnnnnnnnnnnnnnnnnnnnnnnnnnnnnnnnnnnnnnnnnnnnnnnnnnnnnnnnnnnnnnnnnnnnnnnnnnnnnnnnnnnnnnnnnnnnnnnnnnnnnnnnnnnnnnnnnnnnnnnnnnnnnnnnnnnnnnnnnnnnnnnnnnnnnnnnnnnnnnnnnnnnnnnnnnnnnnnnnnnnnnnnnnnnnnnnnnnnnnnnnnnnnnnnnnnnnnnnnnnnnnnnnnnnnnnnnnnnnnnnnnnnnnnnnnnnnnnnnnnnnnnnnnnnnnnnnnnnnnnnnnnnnnnnnnnnnnnnnnnnnnnnnnnnnnnnnnnnnnnnnnnnnnnnnnnnnnnnnnnnnnnnnnnnnnnnnnnnnnnnnnnnnnnnnnnnnnnnnnnnnnnnnnnnnnnnnnnnnnnnnnnnnnnnnnnnnnnnnnnnnnnnnnnnnnnnnnnnnnnnnnnnnnnnnnnnnnnnnnnnnnnnnnnnnnnnnnnnnnnnnnnnnnnnnnnnnnnnnnnnnnnnnnnnnnnnnnnnnnnnnnnnnnnnnnnnnnnnnnnnnnnnnnnnnnnnnnnnnnnnnnnnnnnnnnnnnnnnnnnnnnnnnnnnnnnnnnnnnnnnnnnnnnnnnnnnnnnnnnnnnnnnnnnnnnnnnnnnnnnnnnnnnnnnnnnnnnnnnnnnnnnnnnnnnnnnnnnnnnnnnnnnnnnnnnnnnnnnnnnnnnnnnnnnnnnnnnnnnnnnnnnnnnnnnnnnnnnnnnnnnnnnnnnnnnnnnnnnnnnnnnnnnnnnnnnnnnnnnnnnnnnnnnnnnnnnnnnnnnnnnnnnnnnnnnnnnnnnnnnnnnnnnnnnnnnnnnnnnnnnnnnnnnnnnnnnnnnnnnnnnnnnnnnnnnnnnnnnnnnnnnnnnnnnnnnnnnnnnnnnnnnnnnnnnnnnnnnnnnnnnnnnnnnnnnnnnnnnnnnnnnnnnnnnnnnnnnnnnnnnnnnnnnnnnnnnnnnnnnnnnnnnnnnnnnnnnnnnnnnnnnnnnnnnnnnnnnnnnnnnnnnnnnnnnnnnnnnnnnnnnnnnnnnnnnnnnnnnnnnnnnnnnnnnnnnnnnnnnnnnnnnnnnnnnnnnnnnnnnnnnnnnnnnnnnnnnnnnnnnnnnnnnnnnnnnnnnnnnnnnnnnnnnnnnnnnnnnnnnnnnnnnnnnnnnnnnnnnnnnnnnnnnnnnnnnnnnnnnnnnnnnnnnnnnnnnnnnnnnnnnnnnnnnnnnnnnnnnnnnnnnnnnnnnnnnnnnnnnnnnnnnnnnnnnnnnnnnnnnnnnnnnnnnnnnnnnnnnnnnnnnnnnnnnnnnnnnnnnnnnnnnnnnnnnnnnnnnnnnnnnnnnnnnnnnnnnnnnnnnnnnnnnnnnnnnnnnnnnnnnnnnnnnnnnnnnnnnnnnnnnnnnnnnnnnnnnnnnnnnnnnnnnnnnnnnnnnnnnnnnnnnnnnnnnnnnnnnnnnnnnnnnnnnnnnnnnnnnnnnnnnnnnnnnnnnnnnnnnnnnnnnnnnnnnnnnnnnnnnnnnnnnnnnnnnnnnnnnnnnnnnnnnnnnnnnnnnnnnnnnnnnnnnnnnnnnnnnnnnnnnnnnnnnnnnnnnnnnnnnnnnnnnnnnnnnnnnnnnnnnnnnnnnnnnnnnnnnnnnnnnnnnnnnnnnnnnnnnnnnnnnnnnnnnnnnnnnnnnnnnnnnnnnnnnnnnnnnnnnnnnnnnnnnnnnnnnnnnnnnnnnnnnnnnnnnnnnnnnnnnnnnnnnnnnnnnnnnnnnnnnnnnnnnnnnnnnnnnnnnnnnnnnnnnnnnnnnnnnnnnnnnnnnnnnnnnnnnnnnnnnnnnnnnnnnnnnnnnnnnnnnnnnnnnnnnnnnnnnnnnnnnnnnnnnnnnnnnnnnnnnnnnnnnnnnnnnnnnnnnnnnnnnnnnnnnnnnnnnnnnnnnnnnnnnnnnnnnnnnnnnnnnnnnnnnnnnnnnnnnnnnnnnnnnnnnnnnnnnnnnnnnnnnnnnnnnnnnnnnnnnnnnnnnnnnnnnnnnnnnnnnnnnnnnnnnnnnnnnnnnnnnnnnnnnnnnnnnnnnnnnnnnnnnnnnnnnnnnnnnnnnnnnnnnnnnnnnnnnnnnnnnnnnnnnnnnnnnnnnnnnnnnnnnnnnnnnnnnnnnnnnnnnnnnnnnnnnnnnnnnnnnnnnnnnnnnnnnnnnnnnnnnnnnnnnnnnnnnnnnnnnnnnnnnnnnnnnnnnnnnnnnnnnnnnnnnnnnnnnnnnnnnnnnnnnnnnnnnnnnnnnnnnnnnnnnnnnnnnnnnnnnnnnnnnnnnnnnnnnnnnnnnnnnnnnnnnnnnnnnnnnnnnnnnnnnnnnnnnnnnnnnnnnnnnnnnnnnnnnnnnnnnnnnnnnnnnnnnnnnnnnnnnnnnnnnnnnnnnnnnnnnnnnnnnnnnnnnnnnnnnnnnnnnnnnnnnnnnnnnnnnnnnnnnnnnnnnnnnnnnnnnnnnnnnnnnnnnnnnnnnnnnnnnnnnnnnnnnnnnnnnnnnnnnnnnnnnnnnnnnnnnnnnnnnnnnnnnnnnnnnnnnnnnnnnnnnnnnnnnnnnnnnnnnnnnnnnnnnnnnnnnnnnnnnnnnnnnnnnnnnnnnnnnnnnnnnnnnnnnnnnnnnnnnnnnnnnnnnnnnnnnnnnnnnnnnnnnnnnnnnnnnnnnnnnnnnnnnnnnnnnnnnnnnnnnnnnnnnnnnnnnnnnnnnnnnnnnnnnnnnnnnnnnnnnnnnnnnnnnnnnnnnnnnnnnnnnnnnnnnnnnnnnnnnnnnnnnnnnnnnnnnnnnnnnnnnnnnnnnnnnnnnnnnnnnnnnnnnnnnnnnnnnnnnnnnnnnnnnnnnnnnnnnnnnnnnnnnnnnnnnnnnnnnnnnnnnnnnnnnnnnnnnnnnnnnnnnnnnnnnnnnnnnnnnnnnnnnnnnnnnnnnnnnnnnnnnnnnnnnnnnnnnnnnnnnnnnnnnnnnnnnnnnnnnnnnnnnnnnnnnnnnnnnnnnnnnnnnnnnnnnnnnnnnnnnnnnnnnnnnnnnnnnnnnnnnnnnnnnnnnnnnnnnnnnnnnnnnnnnnnnnnnnnnnnnnnnnnnnnnnnnnnnnnnnnnnnnnnnnnnnnnnnnnnnnnnnnnnnnnnnnnnnnnnnnnnnnnnnnnnnnnnnnnnnnnnnnnnnnnnnnnnnnnnnnnnnnnnnnnnnnnnnnnnnnnnnnnnnnnnnnnnnnnnnnnnnnnnnnnnnnnnnnnnnnnnnnnnnnnnnnnnnnnnnnnnnnnnnnnnnnnnnnnnnnnnnnnnnnnnnnnnnnnnnnnnnnnnnnnnnnnnnnnnnnnnnnnnnnnnnnnnnnnnnnnnnnnnnnnnnnnnnnnnnnnnnnnnnnnnnnnnnnnnnnnnnnnnnnnnnnnnnnnnnnnnnnnnnnnnnnnnnnnnnnnnnnnnnnnnnnnnnnnnnnnnnnnnnnnnnnnnnnnnnnnnnnnnnnnnnnnnnnnnnnnnnnnnnnnnnnnnnnnnnnnnnnnnnnnnnnnnnnnnnnnnnnnnnnnnnnnnnnnnnnnnnnnnnnnnnnnnnnnnnnnnnnnnnnnnnnnnnnnnnnnnnnnnnnnnnnnnnnnnnnnnnnnnnnnnnnnnnnnnnnnnnnnnnnnnnnnnnnnnnnnnnnnnnnnnnnnnnnnnnnnnnnnnnnnnnnnnnnnnnnnnnnnnnnnnnnnnnnnnnnnnnnnnnnnnnnnnnnnnnnnnnnnnnnnnnnnnnnnnnnnnnnnnnnnnnnnnnnnnnnnnnnnnnnnnnnnnnnnnnnnnnnnnnnnnnnnnnnnnnnnnnnnnnnnnnnnnnnnnnnnnnnnnnnnnnnnnnnnnnnnnnnnnnnnnnnnnnnnnnnnnnnnnnnnnnnnnnnnnnnnnnnnnnnnnnnnnnnnnnnnnnnnnnnnnnnnnnnnnnnnnnnnnnnnnnnnnnnnnnnnnnnnnnnnnnnnnnnnnnnnnnnnnnnnnnnnnnnnnnnnnnnnnnnnnnnnnnnnnnnnnnnnnnnnnnnnnnnnnnnnnnnnnnnnnnnnnnnnnnnnnnnnnnnnnnnnnnnnnnnnnnnnnnnnnnnnnnnnnnnnnnnnnnnnnnnnnnnnnnnnnnnnnnnnnnnnnnnnnnnnnnnnnnnnnnnnnnnnnnnnnnnnnnnnnnnnnnnnnnnnnnnnnnnnnnnnnnnnnnnnnnnnnnnnnnnnnnnnnnnnnnnnnnnnnnnnnnnnnnnnnnnnnnnnnnnnnnnnnnnnnnnnnnnnnnnnnnnnnnnnnnnnnnnnnnnnnnnnnnnnnnnnnnnnnnnnnnnnnnnnnnnnnnnnnnnnnnnnnnnnnnnnnnnnnnnnnnnnnnnnnnnnnnnnnnnnnnnnnnnnnnnnnnnnnnnnnnnnnnnnnnnnnnnnnnnnnnnnnnnnnnnnnnnnnnnnnnnnnnnnnnnnnnnnnnnnnnnnnnnnnnnnnnnnnnnnnnnnnnnnnnnnnnnnnnnnnnnnnnnnnnnnnnnnnnnnnnnnnnnnnnnnnnnnnnnnnnnnnnnnnnnnnnnnnnnnnnnnnnnnnnnnnnnnnnnnnnnnnnnnnnnnnnnnnnnnnnnnnnnnnnnnnnnnnnnnnnnnnnnnnnnnnnnnnnnnnnnnnnnnnnnnnnnnnnnnnnnnnnnnnnnnnnnnnnnnnnnnnnnnnnnnnnnnnnnnnnnnnnnnnnnnnnnnnnnnnnnnnnnnnnnnnnnnnnnnnnnnnnnnnnnnnnnnnnnnnnnnnnnnnnnnnnnnnnnnnnnnnnnnnnnnnnnnnnnnnnnnnnnnnnnnnnnnnnnnnnnnnnnnnnnnnnnnnnnnnnnnnnnnnnnnnnnnnnnnnnnnnnnnnnnnnnnnnnnnnnnnnnnnnnnnnnnnnnnnnnnnnnnnnnnnnnnnnnnnnnnnnnnnnnnnnnnnnnnnnnnnnnnnnnnnnnnnnnnnnnnnnnnnnnnnnnnnnnnnnnnnnnnnnnnnnnnnnnnnnnnnnnnnnnnnnnnnnnnnnnnnnnnnnnnnnnnnnnnnnnnnnnnnnnnnnnnnnnnnnnnnnnnnnnnnnnnnnnnnnnnnnnnnnnnnnnnnnnnnnnnnnnnnnnnnnnnnnnnnnnnnnnnnnnnnnnnnnnnnnnnnnnnnnnnnnnnnnnnnnnnnnnnnnnnnnnnnnnnnnnnnnnnnnnnnnnnnnnnnnnnnnnnnnnnnnnnnnnnnnnnnnnnnnnnnnnnnnnnnnnnnnnnnnnnnnnnnnnnnnnnnnnnnnnnnnnnnnnnnnnnnnnnnnnnnnnnnnnnnnnnnnnnnnnnnnnnnnnnnnnnnnnnnnnnnnnnnnnnnnnnnnnnnnnnnnnnnnnnnnnnnnnnnnnnnnnnnnnnnnnnnnnnnnnnnnnnnnnnnnnnnnnnnnnnnnnnnnnnnnnnnnnnnnnnnnnnnnnnnnnnnnnnnnnnnnnnnnnnnnnnnnnnnnnnnnnnnnnnnnnnnnnnnnnnnnnnnnnnnnnnnnnnnnnnnnnnnnnnnnnnnnnnnnnnnnnnnnnnnnnnnnnnnnnnnnnnnnnnnnnnnnnnnnnnnnnnnnnnnnnnnnnnnnnnnnnnnnnnnnnnnnnnnnnnnnnnnnnnnnnnnnnnnnnnnnnnnnnnnnnnnnnnnnnnnnnnnnnnnnnnnnnnnnnnnnnnnnnnnnnnnnnnnnnnnnnnnnnnnnnnnnnnnnnnnnnnnnnnnnnnnnnnnnnnnnnnnnnnnnnnnnnnnnnnnnnnnnnnnnnnnnnnnnnnnnnnnnnnnnnnnnnnnnnnnnnnnnnnnnnnnnnnnnnnnnnnnnnnnnnnnnnnnnnnnnnnnnnnnnnnnnnnnnnnnnnnnnnnnnnnnnnnnnnnnnnnnnnnnnnnnnnnnnnnnnnnnnnnnnnnnnnnnnnnnnnnnnnnnnnnnnnnnnnnnnnnnnnnnnnnnnnnnnnnnnnnnnnnnnnnnnnnnnnnnnnnnnnnnnnnnnnnnnnnnnnnnnnnnnnnnnnnnnnnnnnnnnnnnnnnnnnnnnnnnnnnnnnnnnnnnnnnnnnnnnnnnnnnnnnnnnnnnnnnnnnnnnnnnnnnnnnnnnnnnnnnnnnnnnnnnnnnnnnnnnnnnnnnnnnnnnnnnnnnnnnnnnnnnnnnnnnnnnnnnnnnnnnnnnnnnnnnnnnnnnnnnnnnnnnnnnnnnnnnnnnnnnnnnnnnnnnnnnnnnnnnnnnnnnnnnnnnnnnnnnnnnnnnnnnnnnnnnnnnnnnnnnnnnnnnnnnnnnnnnnnnnnnnnnnnnnnnnnnnnnnnnnnnnnnnnnnnnnnnnnnnnnnnnnnnnnnnnnnnnnnnnnnnnnnnnnnnnnnnnnnnnnnnnnnnnnnnnnnnnnnnnnnnnnnnnnnnnnnnnnnnnnnnnnnnnnnnnnnnnnnnnnnnnnnnnnnnnnnnnnnnnnnnnnnnnnnnnnnnnnnnnnnnnnnnnnnnnnnnnnnnnnnnnnnnnnnnnnnnnnnnnnnnnnnnnnnnnnnnnnnnnnnnnnnnnnnnnnnnnnnnnnnnnnnnnnnnnnnnnnnnnnnnnnnnnnnnnnnnnnnnnnnnnnnnnnnnnnnnnnnnnnnnnnnnnnnnnnnnnnnnnnnnnnnnnnnnnnnnnnnnnnnnnnnnnnnnnnnnnnnnnnnnnnnnnnnnnnnnnnnnnnnnnnnnnnnnnnnnnnnnnnnnnnnnnnnnnnnnnnnnnnnnnnnnnnnnnnnnnnnnnnnnnnnnnnnnnnnnnnnnnnnnnnnnnnnnnnnnnnnnnnnnnnnnnnnnnnnnnnnnnnnnnnnnnnnnnnnnnnnnnnnnnnnnnnnnnnnnnnnnnnnnnnnnnnnnnnnnnnnnnnnnnnnnnnnnnnnnnnnnnnnnnnnnnnnnnnnnnnnnnnnnnnnnnnnnnnnnnnnnnnnnnnnnnnnnnnnnnnnnnnnnnnnnnnnnnnnnnnnnnnnnnnnnnnnnnnnnnnnnnnnnnnnnnnnnnnnnnnnnnnnnnnnnnnnnnnnnnnnnnnnnnnnnnnnnnnnnnnnnnnnnnnnnnnnnnnnnnnnnnnnnnnnnnnnnnnnnnnnnnnnnnnnnnnnnnnnnnnnnnnnnnnnnnnnnnnnnnnnnnnnnnnnnnnnnnnnnnnnnnnnnnnnnnnnnnnnnnnnnnnnnnnnnnnnnnnnnnnnnnnnnnnnnnnnnnnnnnnnnnnnnnnnnnnnnnnnnnnnnnnnnnnnnnnnnnnnnnnnnnnnnnnnnnnnnnnnnnnnnnnnnnnnnnnnnnnnnnnnnnnnnnnnnnnnnnnnnnnnnnnnnnnnnnnnnnnnnnnnnnnnnnnnnnnnnnnnnnnnnnnnnnnnnnnnnnnnnnnnnnnnnnnnnnnnnnnnnnnnnnnnnnnnnnnnnnnnnnnnnnnnnnnnnnnnnnnnnnnnnnnnnnnnnnnnnnnnnnnnnnnnnnnnnnnnnnnnnnnnnnnnnnnnnnnnnnnnnnnnnnnnnnnnnnnnnnnnnnnnnnnnnnnnnnnnnnnnnnnnnnnnnnnnnnnnnnnnnnnnnnnnnnnnnnnnnnnnnnnnnnnnnnnnnnnnnnnnnnnnnnnnnnnnnnnnnnnnnnnnnnnnnnnnnnnnnnnnnnnnnnnnnnnnnnnnnnnnnnnnnnnnnnnnnnnnnnnnnnnnnnnnnnnnnnnnnnnnnnnnnnnnnnnnnnnnnnnnnnnnnnnnnnnnnnnnnnnnnnnnnnnnnnnnnnnnnnnnnnnnnnnnnnnnnnnnnnnnnnnnnnnnnnnnnnnnnnnnnnnnnnnnnnnnnnnnnnnnnnnnnnnnnnnnnnnnnnnnnnnnnnnnnnnnnnnnnnnnnnnnnnnnnnnnnnnnnnnnnnnnnnnnnnnnnnnnnnnnnnnnnnnnnnnnnnnnnnnnnnnnnnnnnnnnnnnnnnnnnnnnnnnnnnnnnnnnnnnnnnnnnnnnnnnnnnnnnnnnnnnnnnnnnnnnnnnnnnnnnnnnnnnnnnnnnnnnnnnnnnnnnnnnnnnnnnnnnnnnnnnnnnnnnnnnnnnnnnnnnnnnnnnnnnnnnnnnnnnnnnnnnnnnnnnnnnnnnnnnnnnnnnnnnnnnnnnnnnnnnnnnnnnnnnnnnnnnnnnnnnnnnnnnnnnnnnnnnnnnnnnnnnnnnnnnnnnnnnnnnnnnnnnnnnnnnnnnnnnnnnnnnnnnnnnnnnnnnnnnnnnnnnnnnnnnnnnnnnnnnnnnnnnnnnnnnnnnnnnnnnnnnnnnnnnnnnnnnnnnnnnnnnnnnnnnnnnnnnnnnnnnnnnnnnnnnnnnnnnnnnnnnnnnnnnnnnnnnnnnnnnnnnnnnnnnnnnnnnnnnnnnnnnnnnnnnnnnnnnnnnnnnnnnnnnnnnnnnnnnnnnnnnnnnnnnnnnnnnnnnnnnnnnnnnnnnnnnnnnnnnnnnnnnnnnnnnnnnnnnnnnnnnnnnnnnnnnnnnnnnnnnnnnnnnnnnnnnnnnnnnnnnnnnnnnnnnnnnnnnnnnnnnnnnnnnnnnnnnnnnnnnnnnnnnnnnnnnnnnnnnnnnnnnnnnnnnnnnnnnnnnnnnnnnnnnnnnnnnnnnnnnnnnnnnnnnnnnnnnnnnnnnnnnnnnnnnnnnnnnnnnnnnnnnnnnnnnnnnnnnnnnnnnnnnnnnnnnnnnnnnnnnnnnnnnnnnnnnnnnnnnnnnnnnnnnnnnnnnnnnnnnnnnnnnnnnnnnnnnnnnnnnnnnnnnnnnnnnnnnnnnnnnnnnnnnnnnnnnnnnnnnnnnnnnnnnnnnnnnnnnnnnnnnnnnnnnnnnnnnnnnnnnnnnnnnnnnnnnnnnnnnnnnnnnnnnnnnnnnnnnnnnnnnnnnnnnnnnnnnnnnnnnnnnnnnnnnnnnnnnnnnnnnnnnnnnnnnnnnnnnnnnnnnnnnnnnnnnnnnnnnnnnnnnnnnnnnnnnnnnnnnnnnnnnnnnnnnnnnnnnnnnnnnnnnnnnnnnnnnnnnnnnnnnnnnnnnnnnnnnnnnnnnnnnnnnnnnnnnnnnnnnnnnnnnnnnnnnnnnnnnnnnnnnnnnnnnnnnnnnnnnnnnnnnnnnnnnnnnnnnnnnnnnnnnnnnnnnnnnnnnnnnnnnnnnnnnnnnnnnnnnnnnnnnnnnnnnnnnnnnnnnnnnnnnnnnnnnnnnnnnnnnnnnnnnnnnnnnnnnnnnnnnnnnnnnnnnnnnnnnnnnnnnnnnnnnnnnnnnnnnnnnnnnnnnnnnnnnnnnnnnnnnnnnnnnnnnnnnnnnnnnnnnnnnnnnnnnnnnnnnnnnnnnnnnnnnnnnnnnnnnnnnnnnnnnnnnnnnnnnnnnnnnnnnnnnnnnnnnnnnnnnnnnnnnnnnnnnnnnnnnnnnnnnnnnnnnnnnnnnnnnnnnnnnnnnnnnnnnnnnnnnnnnnnnnnnnnnnnnnnnnnnnnnnnnnnnnnnnnnnnnnnnnnnnnnnnnnnnnnnnnnnnnnnnnnnnnnnnnnnnnnnnnnnnnnnnnnnnnnnnnnnnnnnnnnnnnnnnnnnnnnnnnnnnnnnnnnnnnnnnnnnnnnnnnnnnnnnnnnnnnnnnnnnnnnnnnnnnnnnnnnnnnnnnnnnnnnnnnnnnnnnnnnnnnnnnnnnnnnnnnnnnnnnnnnnnnnnnnnnnnnnnnnnnnnnnnnnnnnnnnnnnnnnnnnnnnnnnnnnnnnnnnnnnnnnnnnnnnnnnnnnnnnnnnnnnnnnnnnnnnnnnnnnnnnnnnnnnnnnnnnnnnnnnnnnnnnnnnnnnnnnnnnnnnnnnnnnnnnnnnnnnnnnnnnnnnnnnnnnnnnnnnnnnnnnnnnnnnnnnnnnnnnnnnnnnnnnnnnnnnnnnnnnnnnnnnnnnnnnnnnnnnnnnnnnnnnnnnnnnnnnnnnnnnnnnnnnnnnnnnnnnnnnnnnnnnnnnnnnnnnnnnnnnnnnnnnnnnnnnnnnnnnnnnnnnnnnnnnnnnnnnnnnnnnnnnnnnnnnnnnnnnnnnnnnnnnnnnnnnnnnnnnnnnnnnnnnnnnnnnnnnnnnnnnnnnnnnnnnnnnnnnnnnnnnnnnnnnnnnnnnnnnnnnnnnnnnnnnnnnnnnnnnnnnnnnnnnnnnnnnnnnnnnnnnnnnnnnnnnnnnnnnnnnnnnnnnnnnnnnnnnnnnnnnnnnnnnnnnnnnnnnnnnnnnnnnnnnnnnnnnnnnnnnnnnnnnnnnnnnnnnnnnnnnnnnnnnnnnnnnnnnnnnnnnnnnnnnnnnnnnnnnnnnnnnnnnnnnnnnnnnnnnnnnnnnnnnnnnnnnnnnnnnnnnnnnnnnnnnnnnnnnnnnnnnnnnnnnnnnnnnnnnnnnnnnnnnnnnnnnnnnnnnnnnnnnnnnnnnnnnnnnnnnnnnnnnnnnnnnnnnnnnnnnnnnnnnnnnnnnnnnnnnnnnnnnnnnnnnnnnnnnnnnnnnnnnnnnnnnnnnnnnnnnnnnnnnnnnnnnnnnnnnnnnnnnnnnnnnnnnnnnnnnnnnnnnnnnnnnnnnnnnnnnnnnnnnnnnnnnnnnnnnnnnnnnnnnnnnnnnnnnnnnnnnnnnnnnnnnnnnnnnnnnnnnnnnnnnnnnnnnnnnnnnnnnnnnnnnnnnnnnnnnnnnnnnnnnnnnnnnnnnnnnnnnnnnnnnnnnnnnnnnnnnnnnnnnnnnnnnnnnnnnnnnnnnnnnnnnnnnnnnnnnnnnnnnnnnnnnnnnnnnnnnnnnnnnnnnnnnnnnnnnnnnnnnnnnnnnnnnnnnnnnnnnnnnnnnnnnnnnnnnnnnnnnnnnnnnnnnnnnnnnnnnnnnnnnnnnnnnnnnnnnnnnnnnnnnnnnnnnnnnnnnnnnnnnnnnnnnnnnnnnnnnnnnnnnnnnnnnnnnnnnnnnnnnnnnnnnnnnnnnnnnnnnnnnnnnnnnnnnnnnnnnnnnnnnnnnnnnnnnnnnnnnnnnnnnnnnnnnnnnnnnnnnnnnnnnnnnnnnnnnnnnnnnnnnnnnnnnnnnnnnnnnnnnnnnnnnnnnnnnnnnnnnnnnnnnnnnnnnnnnnnnnnnnnnnnnnnnnnnnnnnnnnnnnnnnnnnnnnnnnnnnnnnnnnnnnnnnnnnnnnnnnnnnnnnnnnnnnnnnnnnnnnnnnnnnnnnnnnnnnnnnnnnnnnnnnnnnnnnnnnnnnnnnnnnnnnnnnnnnnnnnnnnnnnnnnnnnnnnnnnnnnnnnnnnnnnnnnnnnnnnnnnnnnnnnnnnnnnnnnnnnnnnnnnnnnnnnnnnnnnnnnnnnnnnnnnnnnnnnnnnnnnnnnnnnnnnnnnnnnnnnnnnnnnnnnnnnnnnnnnnnnnnnnnnnnnnnnnnnnnnnnnnnnnnnnnnnnnnnnnnnnnnnnnnnnnnnnnnnnnnnnnnnnnnnnnnnnnnnnnnnnnnnnnnnnnnnnnnnnnnnnnnnnnnnnnnnnnnnnnnnnnnnnnnnnnnnnnnnnnnnnnnnnnnnnnnnnnnnnnnnnnnnnnnnnnnnnnnnnnnnnnnnnnnnnnnnnnnnnnnnnnnnnnnnnnnnnnnnnnnnnnnnnnnnnnnnnnnnnnnnnnnnnnnnnnnnnnnnnnnnnnnnnnnnnnnnnnnnnnnnnnnnnnnnnnnnnnnnnnnnnnnnnnnnnnnnnnnnnnnnnnnnnnnnnnnnnnnnnnnnnnnnnnnnnnnnnnnnnnnnnnnnnnnnnnnnnnnnnnnnnnnnnnnnnnnnnnnnnnnnnnnnnnnnnnnnnnnnnnnnnnnnnnnnnnnnnnnnnnnnnnnnnnnnnnnnnnnnnnnnnnnnnnnnnnnnnnnnnnnnnnnnnnnnnnnnnnnnnnnnnnnnnnnnnnnnnnnnnnnnnnnnnnnnnnnnnnnnnnnnnnnnnnnnnnnnnnnnnnnnnnnnnnnnnnnnnnnnnnnnnnnnnnnnnnnnnnnnnnnnnnnnnnnnnnnnnnnnnnnnnnnnnnnnnnnnnnnnnnnnnnnnnnnnnnnnnnnnnnnnnnnnnnnnnnnnnnnnnnnnnnnnnnnnnnnnnnnnnnnnnnnnnnnnnnnnnnnnnnnnnnnnnnnnnnnnnnnnnnnnnnnnnnnnnnnnnnnnnnnnnnnnnnnnnnnnnnnnnnnnnnnnnnnnnnnnnnnnnnnnnnnnnnnnnnnnnnnnnnnnnnnnnnnnnnnnnnnnnnnnnnnnnnnnnnnnnnnnnnnnnnnnnnnnnnnnnnnnnnnnnnnnnnnnnnnnnnnnnnnnnnnnnnnnnnnnnnnnnnnnnnnnnnnnnnnnnnnnnnnnnnnnnnnnnnnnnnnnnnnnnnnnnnnnnnnnnnnnnnnnnnnnnnnnnnnnnnnnnnnnnnnnnnnnnnnnnnnnnnnnnnnnnnnnnnnnnnnnnnnnnnnnnnnnnnnnnnnnnnnnnnnnnnnnnnnnnnnnnnnnnnnnnnnnnnnnnnnnnnnnnnnnnnnnnnnnnnnnnnnnnnnnnnnnnnnnnnnnnnnnnnnnnnnnnnnnnnnnnnnnnnnnnnnnnnnnnnnnnnnnnnnnnnnnnnnnnnnnnnnnnnnnnnnnnnnnnnnnnnnnnnnnnnnnnnnnnnnnnnnnnnnnnnnnnnnnnnnnnnnnnnnnnnnnnnnnnnnnnnnnnnnnnnnnnnnnnnnnnnnnnnnnnnnnnnnnnnnnnnnnnnnnnnnnnnnnnnnnnnnnnnnnnnnnnnnnnnnnnnnnnnnnnnnnnnnnnnnnnnnnnnnnnnnnnnnnnnnnnnnnnnnnnnnnnnnnnnnnnnnnnnnnnnnnnnnnnnnnnnnnnnnnnnnnnnnnnnnnnnnnnnnnnnnnnnnnnnnnnnnnnnnnnnnnnnnnnnnnnnnnnnnnnnnnnnnnnnnnnnnnnnnnnnnnnnnnnnnnnnnnnnnnnnnnnnnnnnnnnnnnnnnnnnnnnnnnnnnnnnnnnnnnnnnnnnnnnnnnnnnnnnnnnnnnnnnnnnnnnnnnnnnnnnnnnnnnnnnnnnnnnnnnnnnnnnnnnnnnnnnnnnnnnnnnnnnnnnnnnnnnnnnnnnnnnnnnnnnnnnnnnnnnnnnnnnnnnnnnnnnnnnnnnnnnnnnnnnnnnnnnnnnnnnnnnnnnnnnnnnnnnnnnnnnnnnnnnnnnnnnnnnnnnnnnnnnnnnnnnnnnnnnnnnnnnnnnnnnnnnnnnnnnnnnnnnnnnnnnnnnnnnnnnnnnnnnnnnnnnnnnnnnnnnnnnnnnnnnnnnnnnnnnnnnnnnnnnnnnnnnnnnnnnnnnnnnnnnnnnnnnnnnnnnnnnnnnnnnnnnnnnnnnnnnnnnnnnnnnnnnnnnnnnnnnnnnnnnnnnnnnnnnnnnnnnnnnnnnnnnnnnnnnnnnnnnnnnnnnnnnnnnnnnnnnnnnnnnnnnnnnnnnnnnnnnnnnnnnnnnnnnnnnnnnnnnnnnnnnnnnnnnnnnnnnnnnnnnnnnnnnnnnnnnnnnnnnnnnnnnnnnnnnnnnnnnnnnnnnnnnnnnnnnnnnnnnnnnnnnnnnnnnnnnnnnnnnnnnnnnnnnnnnnnnnnnnnnnnnnnnnnnnnnnnnnnnnnnnnnnnnnnnnnnnnnnnnnnnnnnnnnnnnnnnnnnnnnnnnnnnnnnnnnnnnnnnnnnnnnnnnnnnnnnnnnnnnnnnnnnnnnnnnnnnnnnnnnnnnnnnnnnnnnnnnnnnnnnnnnnnnnnnnnnnnnnnnnnnnnnnnnnnnnnnnnnnnnnnnnnnnnnnnnnnnnnnnnnnnnnnnnnnnnnnnnnnnnnnnnnnnnnnnnnnnnnnnnnnnnnnnnnnnnnnnnnnnnnnnnnnnnnnnnnnnnnnnnnnnnnnnnnnnnnnnnnnnnnnnnnnnnnnnnnnnnnnnnnnnnnnnnnnnnnnnnnnnnnnnnnnnnnnnnnnnnnnnnnnnnnnnnnnnnnnnnnnnnnnnnnnnnnnnnnnnnnnnnnnnnnnnnnnnnnnnnnnnnnnnnnnnnnnnnnnnnnnnnnnnnnnnnnnnnnnnnnnnnnnnnnnnnnnnnnnnnnnnnnnnnnnnnnnnnnnnnnnnnnnnnnnnnnnnnnnnnnnnnnnnnnnnnnnnnnnnnnnnnnnnnnnnnnnnnnnnnnnnnnnnnnnnnnnnnnnnnnnnnnnnnnnnnnnnnnnnnnnnnnnnnnnnnnnnnnnnnnnnnnnnnnnnnnnnnnnnnnnnnnnnnnnnnnnnnnnnnnnnnnnnnnnnnnnnnnnnnnnnnnnnnnnnnnnnnnnnnnnnnnnnnnnnnnnnnnnnnnnnnnnnnnnnnnnnnnnnnnnnnnnnnnnnnnnnnnnnnnnnnnnnnnnnnnnnnnnnnnnnnnnnnnnnnnnnnnnnnnnnnnnnnnnnnnnnnnnnnnnnnnnnnnnnnnnnnnnnnnnnnnnnnnnnnnnnnnnnnnnnnnnnnnnnnnnnnnnnnnnnnnnnnnnnnnnnnnnnnnnnnnnnnnnnnnnnnnnnnnnnnnnnnnnnnnnnnnnnnnnnnnnnnnnnnnnnnnnnnnnnnnnnnnnnnnnnnnnnnnnnnnnnnnnnnnnnnnnnnnnnnnnnnnnnnnnnnnnnnnnnnnnnnnnnnnnnnnnnnnnnnnnnnnnnnnnnnnnnnnnnnnnnnnnnnnnnnnnnnnnnnnnnnnnnnnnnnnnnnnnnnnnnnnnnnnnnnnnnnnnnnnnnnnnnnnnnnnnnnnnnnnnnnnnnnnnnnnnnnnnnnnnnnnnnnnnnnnnnnnnnnnnnnnnnnnnnnnnnnnnnnnnnnnnnnnnnnnnnnnnnnnnnnnnnnnnnnnnnnnnnnnnnnnnnnnnnnnnnnnnnnnnnnnnnnnnnnnnnnnnnnnnnnnnnnnnnnnnnnnnnnnnnnnnnnnnnnnnnnnnnnnnnnnnnnnnnnnnnnnnnnnnnnnnnnnnnnnnnnnnnnnnnnnnnnnnnnnnnnnnnnnnnnnnnnnnnnnnnnnnnnnnnnnnnnnnnnnnnnnnnnnnnnnnnnnnnnnnnnnnnnnnnnnnnnnnnnnnnnnnnnnnnnnnnnnnnnnnnnnnnnnnnnnnnnnnnnnnnnnnnnnnnnnnnnnnnnnnnnnnnnnnnnnnnnnnnnnnnnnnnnnnnnnnnnnnnnnnnnnnnnnnnnnnnnnnnnnnnnnnnnnnnnnnnnnnnnnnnnnnnnnnnnnnnnnnnnnnnnnnnnnnnnnnnnnnnnnnnnnnnnnnnnnnnnnnnnnnnnnnnnnnnnnnnnnnnnnnnnnnnnnnnnnnnnnnnnnnnnnnnnnnnnnnnnnnnnnnnnnnnnnnnnnnnnnnnnnnnnnnnnnnnnnnnnnnnnnnnnnnnnnnnnnnnnnnnnnnnnnnnnnnnnnnnnnnnnnnnnnnnnnnnnnnnnnnnnnnnnnnnnnnnnnnnnnnnnnnnnnnnnnnnnnnnnnnnnnnnnnnnnnnnnnnnnnnnnnnnnnnnnnnnnnnnnnnnnnnnnnnnnnnnnnnnnnnnnnnnnnnnnnnnnnnnnnnnnnnnnnnnnnnnnnnnnnnnnnnnnnnnnnnnnnnnnnnnnnnnnnnnnnnnnnnnnnnnnnnnnnnnnnnnnnnnnnnnnnnnnnnnnnnnnnnnnnnnnnnnnnnnnnnnnnnnnnnnnnnnnnnnnnnnnnnnnnnnnnnnnnnnnnnnnnnnnnnnnnnnnnnnnnnnnnnnnnnnnnnnnnnnnnnnnnnnnnnnnnnnnnnnnnnnnnnnnnnnnnnnnnnnnnnnnnnnnnnnnnnnnnnnnnnnnnnnnnnnnnnnnnnnnnnnnnnnnnnnnnnnnnnnnnnnnnnnnnnnnnnnnnnnnnnnnnnnnnnnnnnnnnnnnnnnnnnnnnnnnnnnnnnnnnnnnnnnnnnnnnnnnnnnnnnnnnnnnnnnnnnnnnnnnnnnnnnnnnnnnnnnnnnnnnnnnnnnnnnnnnnnnnnnnnnnnnnnnnnnnnnnnnnnnnnnnnnnnnnnnnnnnnnnnnnnnnnnnnnnnnnnnnnnnnnnnnnnnnnnnnnnnnnnnnnnnnnnnnnnnnnnnnnnnnnnnnnnnnnnnnnnnnnnnnnnnnnnnnnnnnnnnnnnnnnnnnnnnnnnnnnnnnnnnnnnnnnnnnnnnnnnnnnnnnnnnnnnnnnnnnnnnnnnnnnnnnnnnnnnnnnnnnnnnnnnnnnnnnnnnnnnnnnnnnnnnnnnnnnnnnnnnnnnnnnnnnnnnnnnnnnnnnnnnnnnnnnnnnnnnnnnnnnnnnnnnnnnnnnnnnnnnnnnnnnnnnnnnnnnnnnnnnnnnnnnnnnnnnnnnnnnnnnnnnnnnnnnnnnnnnnnnnnnnnnnnnnnnnnnnnnnnnnnnnnnnnnnnnnnnnnnnnnnnnnnnnnnnnnnnnnnnnnnnnnnnnnnnnnnnnnnnnnnnnnnnnnnnnnnnnnnnnnnnnnnnnnnnnnnnnnnnnnnnnnnnnnnnnnnnnnnnnnnnnnnnnnnnnnnnnnnnnnnnnnnnnnnnnnnnnnnnnnnnnnnnnnnnnnnnnnnnnnnnnnnnnnnnnnnnnnnnnnnnnnnnnnnnnnnnnnnnnnnnnnnnnnnnnnnnnnnnnnnnnnnnnnnnnnnnnnnnnnnnnnnnnnnnnnnnnnnnnnnnnnnnnnnnnnnnnnnnnnnnnnnnnnnnnnnnnnnnnnnnnnnnnnnnnnnnnnnnnnnnnnnnnnnnnnnnnnnnnnnnnnnnnnnnnnnnnnnnnnnnnnnnnnnnnnnnnnnnnnnnnnnnnnnnnnnnnnnnnnnnnnnnnnnnnnnnnnnnnnnnnnnnnnnnnnnnnnnnnnnnnnnnnnnnnnnnnnnnnnnnnnnnnnnnnnnnnnnnnnnnnnnnnnnnnnnnnnnnnnnnnnnnnnnnnnnnnnnnnnnnnnnnnnnnnnnnnnnnnnnnnnnnnnnnnnnnnnnnnnnnnnnnnnnnnnnnnnnnnnnnnnnnnnnnnnnnnnnnnnnnnnnnnnnnnnnnnnnnnnnnnnnnnnnnnnnnnnnnnnnnnnnnnnnnnnnnnnnnnnnnnnnnnnnnnnnnnnnnnnnnnnnnnnnnnnnnnnnnnnnnnnnnnnnnnnnnnnnnnnnnnnnnnnnnnnnnnnnnnnnnnnnnnnnnnnnnnnnnnnnnnnnnnnnnnnnnnnnnnnnnnnnnnnnnnnnnnnnnnnnnnnnnnnnnnnnnnnnnnnnnnnnnnnnnnnnnnnnnnnnnnnnnnnnnnnnnnnnnnnnnnnnnnnnnnnnnnnnnnnnnnnnnnnnnnnnnnnnnnnnnnnnnnnnnnnnnnnnnnnnnnnnnnnnnnnnnnnnnnnnnnnnnnnnnnnnnnnnnnnnnnnnnnnnnnnnnnnnnnnnnnnnnnnnnnnnnnnnnnnnnnnnnnnnnnnnnnnnnnnnnnnnnnnnnnnnnnnnnnnnnnnnnnnnnnnnnnnnnnnnnnnnnnnnnnnnnnnnnnnnnnnnnnnnnnnnnnnnnnnnnnnnnnnnnnnnnnnnnnnnnnnnnnnnnnnnnnnnnnnnnnnnnnnnnnnnnnnnnnnnnnnnnnnnnnnnnnnnnnnnnnnnnnnnnnnnnnnnnnnnnnnnnnnnnnnnnnnnnnnnnnnnnnnnnnnnnnnnnnnnnnnnnnnnnnnnnnnnnnnnnnnnnnnnnnnnnnnnnnnnnnnnnnnnnnnnnnnnnnnnnnnnnnnnnnnnnnnnnnnnnnnnnnnnnnnnnnnnnnnnnnnnnnnnnnnnnnnnnnnnnnnnnnnnnnnnnnnnnnnnnnnnnnnnnnnnnnnnnnnnnnnnnnnnnnnnnnnnnnnnnnnnnnnnnnnnnnnnnnnnnnnnnnnnnnnnnnnnnnnnnnnnnnnnnnnnnnnnnnnnnnnnnnnnnnnnnnnnnnnnnnnnnnnnnnnnnnnnnnnnnnnnnnnnnnnnnnnnnnnnnnnnnnnnnnnnnnnnnnnnnnnnnnnnnnnnnnnnnnnnnnnnnnnnnnnnnnnnnnnnnnnnnnnnnnnnnnnnnnnnnnnnnnnnnnnnnnnnnnnnnnnnnnnnnnnnnnnnnnnnnnnnnnnnnnnnnnnnnnnnnnnnnnnnnnnnnnnnnnnnnnnnnnnnnnnnnnnnnnnnnnnnnnnnnnnnnnnnnnnnnnnnnnnnnnnnnnnnnnnnnnnnnnnnnnnnnnnnnnnnnnnnnnnnnnnnnnnnnnnnnnnnnnnnnnnnnnnnnnnnnnnnnnnnnnnnnnnnnnnnnnnnnnnnnnnnnnnnnnnnnnnnnnnnnnnnnnnnnnnnnnnnnnnnnnnnnnnnnnnnnnnnnnnnnnnnnnnnnnnnnnnnnnnnnnnnnnnnnnnnnnnnnnnnnnnnnnnnnnnnnnnnnnnnnnnnnnnnnnnnnnnnnnnnnnnnnnnnnnnnnnnnnnnnnnnnnnnnnnnnnnnnnnnnnnnnnnnnnnnnnnnnnnnnnnnnnnnnnnnnnnnnnnnnnnnnnnnnnnnnnnnnnnnnnnnnnnnnnnnnnnnnnnnnnnnnnnnnnnnnnnnnnnnnnnnnnnnnnnnnnnnnnnnnnnnnnnnnnnnnnnnnnnnnnnnnnnnnnnnnnnnnnnnnnnnnnnnnnnnnnnnnnnnnnnnnnnnnnnnnnnnnnnnnnnnnnnnnnnnnnnnnnnnnnnnnnnnnnnnnnnnnnnnnnnnnnnnnnnnnnnnnnnnnnnnnnnnnnnnnnnnnnnnnnnnnnnnnnnnnnnnnnnnnnnnnnnnnnnnnnnnnnnnnnnnnnnnnnnnnnnnnnnnnnnnnnnnnnnnnnnnnnnnnnnnnnnnnnnnnnnnnnnnnnnnnnnnnnnnnnnnnnnnnnnnnnnnnnnnnnnnnnnnnnnnnnnnnnnnnnnnnnnnnnnnnnnnnnnnnnnnnnnnnnnnnnnnnnnnnnnnnnnnnnnnnnnnnnnnnnnnnnnnnnnnnnnnnnnnnnnnnnnnnnnnnnnnnnnnnnnnnnnnnnnnnnnnnnnnnnnnnnnnnnnnnnnnnnnnnnnnnnnnnnnnnnnnnnnnnnnnnnnnnnnnnnnnnnnnnnnnnnnnnnnnnnnnnnnnnnnnnnnnnnnnnnnnnnnnnnnnnnnnnnnnnnnnnnnnnnnnnnnnnnnnnnnnnnnnnnnnnnnnnnnnnnnnnnnnnnnnnnnnnnnnnnnnnnnnnnnnnnnnnnnnnnnnnnnnnnnnnnnnnnnnnnnnnnnnnnnnnnnnnnnnnnnnnnnnnnnnnnnnnnnnnnnnnnnnnnnnnnnnnnnnnnnnnnnnnnnnnnnnnnnnnnnnnnnnnnnnnnnnnnnnnnnnnnnnnnnnnnnnnnnnnnnnnnnnnnnnnnnnnnnnnnnnnnnnnnnnnnnnnnnnnnnnnnnnnnnnnnnnnnnnnnnnnnnnnnnnnnnnnnnnnnnnnnnnnnnnnnnnnnnnnnnnnnnnnnnnnnnnnnnnnnnnnnnnnnnnnnnnnnnnnnnnnnnnnnnnnnnnnnnnnnnnnnnnnnnnnnnnnnnnnnnnnnnnnnnnnnnnnnnnnnnnnnnnnnnnnnnnnnnnnnnnnnnnnnnnnnnnnnnnnnnnnnnnnnnnnnnnnnnnnnnnnnnnnnnnnnnnnnnnnnnnnnnnnnnnnnnnnnnnnnnnnnnnnnnnnnnnnnnnnnnnnnnnnnnnnnnnnnnnnnnnnnnnnnnnnnnnnnnnnnnnnnnnnnnnnnnnnnnnnnnnnnnnnnnnnnnnnnnnnnnnnnnnnnnnnnnnnnnnnnnnnnnnnnnnnnnnnnnnnnnnnnnnnnnnnnnnnnnnnnnnnnnnnnnnnnnnnnnnnnnnnnnnnnnnnnnnnnnnnnnnnnnnnnnnnnnnnnnnnnnnnnnnnnnnnnnnnnnnnnnnnnnnnnnnnnnnnnnnnnnnnnnnnnnnnnnnnnnnnnnnnnnnnnnnnnnnnnnnnnnnnnnnnnnnnnnnnnnnnnnnnnnnnnnnnnnnnnnnnnnnnnnnnnnnnnnnnnnnnnnnnnnnnnnnnnnnnnnnnnnnnnnnnnnnnnnnnnnnnnnnnnnnnnnnnnnnnnnnnnnnnnnnnnnnnnnnnnnnnnnnnnnnnnnnnnnnnnnnnnnnnnnnnnnnnnnnnnnnnnnnnnnnnnnnnnnnnnnnnnnnnnnnnnnnnnnnnnnnnnnnnnnnnnnnnnnnnnnnnnnnnnnnnnnnnnnnnnnnnnnnnnnnnnnnnnnnnnnnnnnnnnnnnnnnnnnnnnnnnnnnnnnnnnnnnnnnnnnnnnnnnnnnnnnnnnnnnnnnnnnnnnnnnnnnnnnnnnnnnnnnnnnnnnnnnnnnnnnnnnnnnnnnnnnnnnnnnnnnnnnnnnnnnnnnnnnnnnnnnnnnnnnnnnnnnnnnnnnnnnnnnnnnnnnnnnnnnnnnnnnnnnnnnnnnnnnnnnnnnnnnnnnnnnnnnnnnnnnnnnnnnnnnnnnnnnnnnnnnnnnnnnnnnnnnnnnnnnnnnnnnnnnnnnnnnnnnnnnnnnnnnnnnnnnnnnnnnnnnnnnnnnnnnnnnnnnnnnnnnnnnnnnnnnnnnnnnnnnnnnnnnnnnnnnnnnnnnnnnnnnnnnnnnnnnnnnnnnnnnnnnnnnnnnnnnnnnnnnnnnnnnnnnnnnnnnnnnnnnnnnnnnnnnnnnnnnnnnnnnnnnnnnnnnnnnnnnnnnnnnnnnnnnnnnnnnnnnnnnnnnnnnnnnnnnnnnnnnnnnnnnnnnnnnnnnnnnnnnnnnnnnnnnnnnnnnnnnnnnnnnnnnnnnnnnnnnnnnnnnnnnnnnnnnnnnnnnnnnnnnnnnnnnnnnnnnnnnnnnnnnnnnnnnnnnnnnnnnnnnnnnnnnnnnnnnnnnnnnnnnnnnnnnnnnnnnnnnnnnnnnnnnnnnnnnnnnnnnnnnnnnnnnnnnnnnnnnnnnnnnnnnnnnnnnnnnnnnnnnnnnnnnnnnnnnnnnnnnnnnnnnnnnnnnnnnnnnnnnnnnnnnnnnnnnnnnnnnnnnnnnnnnnnnnnnnnnnnnnnnnnnnnnnnnnnnnnnnnnnnnnnnnnnnnnnnnnnnnnnnnnnnnnnnnnnnnnnnnnnnnnnnnnnnnnnnnnnnnnnnnnnnnnnnnnnnnnnnnnnnnnnnnnnnnnnnnnnnnnnnnnnnnnnnnnnnnnnnnnnnnnnnnnnnnnnnnnnnnnnnnnnnnnnnnnnnnnnnnnnnnnnnnnnnnnnnnnnnnnnnnnnnnnnnnnnnnnnnnnnnnnnnnnnnnnnnnnnnnnnnnnnnnnnnnnnnnnnnnnnnnnnnnnnnnnnnnnnnnnnnnnnnnnnnnnnnnnnnnnnnnnnnnnnnnnnnnnnnnnnnnnnnnnnnnnnnnnnnnnnnnnnnnnnnnnnnnnnnnnnnnnnnnnnnnnnnnnnnnnnnnnnnnnnnnnnnnnnnnnnnnnnnnnnnnnnnnnnnnnnnnnnnnnnnnnnnnnnnnnnnnnnnnnnnnnnnnnnnnnnnnnnnnnnnnnnnnnnnnnnnnnnnnnnnnnnnnnnnnnnnnnnnnnnnnnnnnnnnnnnnnnnnnnnnnnnnnnnnnnnnnnnnnnnnnnnnnnnnnnnnnnnnnnnnnnnnnnnnnnnnnnnnnnnnnnnnnnnnnnnnnnnnnnnnnnnnnnnnnnnnnnnnnnnnnnnnnnnnnnnnnnnnnnnnnnnnnnnnnnnnnnnnnnnnnnnnnnnnnnnnnnnnnnnnnnnnnnnnnnnnnnnnnnnnnnnnnnnnnnnnnnnnnnnnnnnnnnnnnnnnnnnnnnnnnnnnnnnnnnnnnnnnnnnnnnnnnnnnnnnnnnnnnnnnnnnnnnnnnnnnnnnnnnnnnnnnnnnnnnnnnnnnnnnnnnnnnnnnnnnnnnnnnnnnnnnnnnnnnnnnnnnnnnnnnnnnnnnnnnnnnnnnnnnnnnnnnnnnnnnnnnnnnnnnnnnnnnnnnnnnnnnnnnnnnnnnnnnnnnnnnnnnnnnnnnnnnnnnnnnnnnnnnnnnnnnnnnnnnnnnnnnnnnnnnnnnnnnnnnnnnnnnnnnnnnnnnnnnnnnnnnnnnnnnnnnnnnnnnnnnnnnnnnnnnnnnnnnnnnnnnnnnnnnnnnnnnnnnnnnnnnnnnnnnnnnnnnnnnnnnnnnnnnnnnnnnnnnnnnnnnnnnnnnnnnnnnnnnnnnnnnnnnnnnnnnnnnnnnnnnnnnnnnnnnnnnnnnnnnnnnnnnnnnnnnnnnnnnnnnnnnnnnnnnnnnnnnnnnnnnnnnnnnnnnnnnnnnnnnnnnnnnnnnnnnnnnnnnnnnnnnnnnnnnnnnnnnnnnnnnnnnnnnnnnnnnnnnnnnnnnnnnnnnnnnnnnnnnnnnnnnnnnnnnnnnnnnnnnnnnnnnnnnnnnnnnnnnnnnnnnnnnnnnnnnnnnnnnnnnnnnnnnnnnnnnnnnnnnnnnnnnnnnnnnnnnnnnnnnnnnnnnnnnnnnnnnnnnnnnnnnnnnnnnnnnnnnnnnnnnnnnnnnnnnnnnnnnnnnnnnnnnnnnnnnnnnnnnnnnnnnnnnnnnnnnnnnnnnnnnnnnnnnnnnnnnnnnnnnnnnnnnnnnnnnnnnnnnnnnnnnnnnnnnnnnnnnnnnnnnnnnnnnnnnnnnnnnnnnnnnnnnnnnnnnnnnnnnnnnnnnnnnnnnnnnnnnnnnnnnnnnnnnnnnnnnnnnnnnnnnnnnnnnnnnnnnnnnnnnnnnnnnnnnnnnnnnnnnnnnnnnnnnnnnnnnnnnnnnnnnnnnnnnnnnnnnnnnnnnnnnnnnnnnnnnnnnnnnnnnnnnnnnnnnnnnnnnnnnnnnnnnnnnnnnnnnnnnnnnnnnnnnnnnnnnnnnnnnnnnnnnnnnnnnnnnnnnnnnnnnnnnnnnnnnnnnnnnnnnnnnnnnnnnnnnnnnnnnnnnnnnnnnnnnnnnnnnnnnnnnnnnnnnnnnnnnnnnnnnnnnnnnnnnnnnnnnnnnnnnnnnnnnnnnnnnnnnnnnnnnnnnnnnnnnnnnnnnnnnnnnnnnnnnnnnnnnnnnnnnnnnnnnnnnnnnnnnnnnnnnnnnnnnnnnnnnnnnnnnnnnnnnnnnnnnnnnnnnnnnnnnnnnnnnnnnnnnnnnnnnnnnnnnnnnnnnnnnnnnnnnnnnnnnnnnnnnnnnnnnnnnnnnnnnnnnnnnnnnnnnnnnnnnnnnnnnnnnnnnnnnnnnnnnnnnnnnnnnnnnnnnnnnnnnnnnnnnnnnnnnnnnnnnnnnnnnnnnnnnnnnnnnnnnnnnnnnnnnnnnnnnnnnnnnnnnnnnnnnnnnnnnnnnnnnnnnnnnnnnnnnnnnnnnnnnnnnnnnnnnnnnnnnnnnnnnnnnnnnnnnnnnnnnnnnnnnnnnnnnnnnnnnnnnnnnnnnnnnnnnnnnnnnnnnnnnnnnnnnnnnnnnnnnnnnnnnnnnnnnnnnnnnnnnnnnnnnnnnnnnnnnnnnnnnnnnnnnnnnnnnnnnnnnnnnnnnnnnnnnnnnnnnnnnnnnnnnnnnnnnnnnnnnnnnnnnnnnnnnnnnnnnnnnnnnnnnnnnnnnnnnnnnnnnnnnnnnnnnnnnnnnnnnnnnnnnnnnnnnnnnnnnnnnnnnnnnnnnnnnnnnnnnnnnnnnnnnnnnnnnnnnnnnnnnnnnnnnnnnnnnnnnnnnnnnnnnnnnnnnnnnnnnnnnnnnnnnnnnnnnnnnnnnnnnnnnnnnnnnnnnnnnnnnnnnnnnnnnnnnnnnnnnnnnnnnnnnnnnnnnnnnnnnnnnnnnnnnnnnnnnnnnnnnnnnnnnnnnnnnnnnnnnnnnnnnnnnnnnnnnnnnnnnnnnnnnnnnnnnnnnnnnnnnnnnnnnnnnnnnnnnnnnnnnnnnnnnnnnnnnnnnnnnnnnnnnnnnnnnnnnnnnnnnnnnnnnnnnnnnnnnnnnnnnnnnnnnnnnnnnnnnnnnnnnnnnnnnnnnnnnnnnnnnnnnnnnnnnnnnnnnnnnnnnnnnnnnnnnnnnnnnnnnnnnnnnnnnnnnnnnnnnnnnnnnnnnnnnnnnnnnnnnnnnnnnnnnnnnnnnnnnnnnnnnnnnnnnnnnnnnnnnnnnnnnnnnnnnnnnnnnnnnnnnnnnnnnnnnnnnnnnnnnnnnnnnnnnnnnnnnnnnnnnnnnnnnnnnnnnnnnnnnnnnnnnnnnnnnnnnnnnnnnnnnnnnnnnnnnnnnnnnnnnnnnnnnnnnnnnnnnnnnnnnnnnnnnnnnnnnnnnnnnnnnnnnnnnnnnnnnnnnnnnnnnnnnnnnnnnnnnnnnnnnnnnnnnnnnnnnnnnnnnnnnnnnnnnnnnnnnnnnnnnnnnnnnnnnnnnnnnnnnnnnnnnnnnnnnnnnnnnnnnnnnnnnnnnnnnnnnnnnnnnnnnnnnnnnnnnnnnnnnnnnnnnnnnnnnnnnnnnnnnnnnnnnnnnnnnnnnnnnnnnnnnnnnnnnnnnnnnnnnnnnnnnnnnnnnnnnnnnnnnnnnnnnnnnnnnnnnnnnnnnnnnnnnnnnnnnnnnnnnnnnnnnnnnnnnnnnnnnnnnnnnnnnnnnnnnnnnnnnnnnnnnnnnnnnnnnnnnnnnnnnnnnnnnnnnnnnnnnnnnnnnnnnnnnnnnnnnnnnnnnnnnnnnnnnnnnnnnnnnnnnnnnnnnnnnnnnnnnnnnnnnnnnnnnnnnnnnnnnnnnnnnnnnnnnnnnnnnnnnnnnnnnnnnnnnnnnnnnnnnnnnnnnnnnnnnnnnnnnnnnnnnnnnnnnnnnnnnnnnnnnnnnnnnnnnnnnnnnnnnnnnnnnnnnnnnnnnnnnnnnnnnnnnnnnnnnnnnnnnnnnnnnnnnnnnnnnnnnnnnnnnnnnnnnnnnnnnnnnnnnnnnnnnnnnnnnnnnnnnnnnnnnnnnnnnnnnnnnnnnnnnnnnnnnnnnnnnnnnnnnnnnnnnnnnnnnnnnnnnnnnnnnnnnnnnnnnnnnnnnnnnnnnnnnnnnnnnnnnnnnnnnnnnnnnnnnnnnnnnnnnnnnnnnnnnnnnnnnnnnnnnnnnnnnnnnnnnnnnnnnnnnnnnnnnnnnnnnnnnnnnnnnnnnnnnnnnnnnnnnnnnnnnnnnnnnnnnnnnnnnnnnnnnnnnnnnnnnnnnnnnnnnnnnnnnnnnnnnnnnnnnnnnnnnnnnnnnnnnnnnnnnnnnnnnnnnnnnnnnnnnnnnnnnnnnnnnnnnnnnnnnnnnnnnnnnnnnnnnnnnnnnnnnnnnnnnnnnnnnnnnnnnnnnnnnnnnnnnnnnnnnnnnnnnnnnnnnnnnnnnnnnnnnnnnnnnnnnnnnnnnnnnnnnnnnnnnnnnnnnnnnnnnnnnnnnnnnnnnnnnnnnnnnnnnnnnnnnnnnnnnnnnnnnnnnnnnnnnnnnnnnnnnnnnnnnnnnnnnnnnnnnnnnnnnnnnnnnnnnnnnnnnnnnnnnnnnnnnnnnnnnnnnnnnnnnnnnnnnnnnnnnnnnnnnnnnnnnnnnnnnnnnnnnnnnnnnnnnnnnnnnnnnnnnnnnnnnnnnnnnnnnnnnnnnnnnnnnnnnnnnnnnnnnnnnnnnnnnnnnnnnnnnnnnnnnnnnnnnnnnnnnnnnnnnnnnnnnnnnnnnnnnnnnnnnnnnnnnnnnnnnnnnnnnnnnnnnnnnnnnnnnnnnnnnnnnnnnnnnnnnnnnnnnnnnnnnnnnnnnnnnnnnnnnnnnnnnnnnnnnnnnnnnnnnnnnnnnnnnnnnnnnnnnnnnnnnnnnnnnnnnnnnnnnnnnnnnnnnnnnnnnnnnnnnnnnnnnnnnnnnnnnnnnnnnnnnnnnnnnnnnnnnnnnnnnnnnnnnnnnnnnnnnnnnnnnnnnnnnnnnnnnnnnnnnnnnnnnnnnnnnnnnnnnnnnnnnnnnnnnnnnnnnnnnnnnnnnnnnnnnnnnnnnnnnnnnnnnnnnnnnnnnnnnnnnnnnnnnnnnnnnnnnnnnnnnnnnnnnnnnnnnnnnnnnnnnnnnnnnnnnnnnnnnnnnnnnnnnnnnnnnnnnnnnnnnnnnnnnnnnnnnnnnnnnnnnnnnnnnnnnnnnnnnnnnnnnnnnnnnnnnnnnnnnnnnnnnnnnnnnnnnnnnnnnnnnnnnnnnnnnnnnnnnnnnnnnnnnnnnnnnnnnnnnnnnnnnnnnnnnnnnnnnnnnnnnnnnnnnnnnnnnnnnnnnnnnnnnnnnnnnnnnnnnnnnnnnnnnnnnnnnnnnnnnnnnnnnnnnnnnnnnnnnnnnnnnnnnnnnnnnnnnnnnnnnnnnnnnnnnnnnnnnnnnnnnnnnnnnnnnnnnnnnnnnnnnnnnnnnnnnnnnnnnnnnnnnnnnnnnnnnnnnnnnnnnnnnnnnnnnnnnnnnnnnnnnnnnnnnnnnnnnnnnnnnnnnnnnnnnnnnnnnnnnnnnnnnnnnnnnnnnnnnnnnnnnnnnnnnnnnnnnnnnnnnnnnnnnnnnnnnnnnnnnnnnnnnnnnnnnnnnnnnnnnnnnnnnnnnnnnnnnnnnnnnnnnnnnnnnnnnnnnnnnnnnnnnnnnnnnnnnnnnnnnnnnnnnnnnnnnnnnnnnnnnnnnnnnnnnnnnnnnnnnnnnnnnnnnnnnnnnnnnnnnnnnnnnnnnnnnnnnnnnnnnnnnnnnnnnnnnnnnnnnnnnnnnnnnnnnnnnnnnnnnnnnnnnnnnnnnnnnnnnnnnnnnnnnnnnnnnnnnnnnnnnnnnnnnnnnnnnnnnnnnnnnnnnnnnnnnnnnnnnnnnnnnnnnnnnnnnnnnnnnnnnnnnnnnnnnnnnnnnnnnnnnnnnnnnnnnnnnnnnnnnnnnnnnnnnnnnnnnnnnnnnnnnnnnnnnnnnnnnnnnnnnnnnnnnnnnnnnnnnnnnnnnnnnnnnnnnnnnnnnnnnnnnnnnnnnnnnnnnnnnnnnnnnnnnnnnnnnnnnnnnnnnnnnnnnnnnnnnnnnnnnnnnnnnnnnnnnnnnnnnnnnnnnnnnnnnnnnnnnnnnnnnnnnnnnnnnnnnnnnnnnnnnnnnnnnnnnnnnnnnnnnnnnnnnnnnnnnnnnnnnnnnnnnnnnnnnnnnnnnnnnnnnnnnnnnnnnnnnnnnnnnnnnnnnnnnnnnnnnnnnnnnnnnnnnnnnnnnnnnnnnnnnnnnnnnnnnnnnnnnnnnnnnnnnnnnnnnnnnnnnnnnnnnnnnnnnnnnnnnnnnnnnnnnnnnnnnnnnnnnnnnnnnnnnnnnnnnnnnnnnnnnnnnnnnnnnnnnnnnnnnnnnnnnnnnnnnnnnnnnnnnnnnnnnnnnnnnnnnnnnnnnnnnnnnnnnnnnnnnnnnnnnnnnnnnnnnnnnnnnnnnnnnnnnnnnnnnnnnnnnnnnnnnnnnnnnnnnnnnnnnnnnnnnnnnnnnnnnnnnnnnnnnnnnnnnnnnnnnnnnnnnnnnnnnnnnnnnnnnnnnnnnnnnnnnnnnnnnnnnnnnnnnnnnnnnnnnnnnnnnnnnnnnnnnnnnnnnnnnnnnnnnnnnnnnnnnnnnnnnnnnnnnnnnnnnnnnnnnnnnnnnnnnnnnnnnnnnnnnnnnnnnnnnnnnnnnnnnnnnnnnnnnnnnnnnnnnnnnnnnnnnnnnnnnnnnnnnnnnnnnnnnnnnnnnnnnnnnnnnnnnnnnnnnnnnnnnnnnnnnnnnnnnnnnnnnnnnnnnnnnnnnnnnnnnnnnnnnnnnnnnnnnnnnnnnnnnnnnnnnnnnnnnnnnnnnnnnnnnnnnnnnnnnnnnnnnnnnnnnnnnnnnnnnnnnnnnnnnnnnnnnnnnnnnnnnnnnnnnnnnnnnnnnnnnnnnnnnnnnnnnnnnnnnnnnnnnnnnnnnnnnnnnnnnnnnnnnnnnnnnnnnnnnnnnnnnnnnnnnnnnnnnnnnnnnnnnnnnnnnnnnnnnnnnnnnnnnnnnnnnnnnnnnnnnnnnnnnnnnnnnnnnnnnnnnnnnnnnnnnnnnnnnnnnnnnnnnnnnnnnnnnnnnnnnnnnnnnnnnnnnnnnnnnnnnnnnnnnnnnnnnnnnnnnnnnnnnnnnnnnnnnnnnnnnnnnnnnnnnnnnnnnnnnnnnnnnnnnnnnnnnnnnnnnnnnnnnnnnnnnnnnnnnnnnnnnnnnnnnnnnnnnnnnnnnnnnnnnnnnnnnnnnnnnnnnnnnnnnnnnnnnnnnnnnnnnnnnnnnnnnnnnnnnnnnnnnnnnnnnnnnnnnnnnnnnnnnnnnnnnnnnnnnnnnnnnnnnnnnnnnnnnnnnnnnnnnnnnnnnnnnnnnnnnnnnnnnnnnnnnnnnnnnnnnnnnnnnnnnnnnnnnnnnnnnnnnnnnnnnnnnnnnnnnnnnnnnnnnnnnnnnnnnnnnnnnnnnnnnnnnnnnnnnnnnnnnnnnnnnnnnnnnnnnnnnnnnnnnnnnnnnnnnnnnnnnnnnnnnnnnnnnnnnnnnnnnnnnnnnnnnnnnnnnnnnnnnnnnnnnnnnnnnnnnnnnnnnnnnnnnnnnnnnnnnnnnnnnnnnnnnnnnnnnnnnnnnnnnnnnnnnnnnnnnnnnnnnnnnnnnnnnnnnnnnnnnnnnnnnnnnnnnnnnnnnnnnnnnnnnnnnnnnnnnnnnnnnnnnnnnnnnnnnnnnnnnnnnnnnnnnnnnnnnnnnnnnnnnnnnnnnnnnnnnnnnnnnnnnnnnnnnnnnnnnnnnnnnnnnnnnnnnnnnnnnnnnnnnnnnnnnnnnnnnnnnnnnnnnnnnnnnnnnnnnnnnnnnnnnnnnnnnnnnnnnnnnnnnnnnnnnnnnnnnnnnnnnnnnnnnnnnnnnnnnnnnnnnnnnnnnnnnnnnnnnnnnnnnnnnnnnnnnnnnnnnnnnnnnnnnnnnnnnnnnnnnnnnnnnnnnnnnnnnnnnnnnnnnnnnnnnnnnnnnnnnnnnnnnnnnnnnnnnnnnnnnnnnnnnnnnnnnnnnnnnnnnnnnnnnnnnnnnnnnnnnnnnnnnnnnnnnnnnnnnnnnnnnnnnnnnnnnnnnnnnnnnnnnnnnnnnnnnnnnnnnnnnnnnnnnnnnnnnnnnnnnnnnnnnnnnnnnnnnnnnnnnnnnnnnnnnnnnnnnnnnnnnnnnnnnnnnnnnnnnnnnnnnnnnnnnnnnnnnnnnnnnnnnnnnnnnnnnnnnnnnnnnnnnnnnnnnnnnnnnnnnnnnnnnnnnnnnnnnnnnnnnnnnnnnnnnnnnnnnnnnnnnnnnnnnnnnnnnnnnnnnnnnnnnnnnnnnnnnnnnnnnnnnnnnnnnnnnnnnnnnnnnnnnnnnnnnnnnnnnnnnnnnnnnnnnnnnnnnnnnnnnnnnnnnnnnnnnnnnnnnnnnnnnnnnnnnnnnnnnnnnnnnnnnnnnnnnnnnnnnnnnnnnnnnnnnnnnnnnnnnnnnnnnnnnnnnnnnnnnnnnnnnnnnnnnnnnnnnnnnnnnnnnnnnnnnnnnnnnnnnnnnnnnnnnnnnnnnnnnnnnnnnnnnnnnnnnnnnnnnnnnnnnnnnnnnnnnnnnnnnnnnnnnnnnnnnnnnnnnnnnnnnnnnnnnnnnnnnnnnnnnnnnnnnnnnnnnnnnnnnnnnnnnnnnnnnnnnnnnnnnnnnnnnnnnnnnnnnnnnnnnnnnnnnnnnnnnnnnnnnnnnnnnnnnnnnnnnnnnnnnnnnnnnnnnnnnnnnnnnnnnnnnnnnnnnnnnnnnnnnnnnnnnnnnnnnnnnnnnnnnnnnnnnnnnnnnnnnnnnnnnnnnnnnnnnnnnnnnnnnnnnnnnnnnnnnnnnnnnnnnnnnnnnnnnnnnnnnnnnnnnnnnnnnnnnnnnnnnnnnnnnnnnnnnnnnnnnnnnnnnnnnnnnnnnnnnnnnnnnnnnnnnnnnnnnnnnnnnnnnnnnnnnnnnnnnnnnnnnnnnnnnnnnnnnnnnnnnnnnnnnnnnnnnnnnnnnnnnnnnnnnnnnnnnnnnnnnnnnnnnnnnnnnnnnnnnnnnnnnnnnnnnnnnnnnnnnnnnnnnnnnnnnnnnnnnnnnnnnnnnnnnnnnnnnnnnnnnnnnnnnnnnnnnnnnnnnnnnnnnnnnnnnnnnnnnnnnnnnnnnnnnnnnnnnnnnnnnnnnnnnnnnnnnnnnnnnnnnnnnnnnnnnnnnnnnnnnnnnnnnnnnnnnnnnnnnnnnnnnnnnnnnnnnnnnnnnnnnnnnnnnnnnnnnnnnnnnnnnnnnnnnnnnnnnnnnnnnnnnnnnnnnnnnnnnnnnnnnnnnnnnnnnnnnnnnnnnnnnnnnnnnnnnnnnnnnnnnnnnnnnnnnnnnnnnnnnnnnnnnnnnnnnnnnnnnnnnnnnnnnnnnnnnnnnnnnnnnnnnnnnnnnnnnnnnnnnnnnnnnnnnnnnnnnnnnnnnnnnnnnnnnnnnnnnnnnnnnnnnnnnnnnnnnnnnnnnnnnnnnnnnnnnnnnnnnnnnnnnnnnnnnnnnnnnnnnnnnnnnnnnnnnnnnnnnnnnnnnnnnnnnnnnnnnnnnnnnnnnnnnnnnnnnnnnnnnnnnnnnnnnnnnnnnnnnnnnnnnnnnnnnnnnnnnnnnnnnnnnnnnnnnnnnnnnnnnnnnnnnnnnnnnnnnnnnnnnnnnnnnnnnnnnnnnnnnnnnnnnnnnnnnnnnnnnnnnnnnnnnnnnnnnnnnnnnnnnnnnnnnnnnnnnnnnnnnnnnnnnnnnnnnnnnnnnnnnnnnnnnnnnnnnnnnnnnnnnnnnnnnnnnnnnnnnnnnnnnnnnnnnnnnnnnnnnnnnnnnnnnnnnnnnnnnnnnnnnnnnnnnnnnnnnnnnnnnnnnnnnnnnnnnnnnnnnnnnnnnnnnnnnnnnnnnnnnnnnnnnnnnnnnnnnnnnnnnnnnnnnnnnnnnnnnnnnnnnnnnnnnnnnnnnnnnnnnnnnnnnnnnnnnnnnnnnnnnnnnnnnnnnnnnnnnnnnnnnnnnnnnnnnnnnnnnnnnnnnnnnnnnnnnnnnnnnnnnnnnnnnnnnnnnnnnnnnnnnnnnnnnnnnnnnnnnnnnnnnnnnnnnnnnnnnnnnnnnnnnnnnnnnnnnnnnnnnnnnnnnnnnnnnnnnnnnnnnnnnnnnnnnnnnnnnnnnnnnnnnnnnnnnnnnnnnnnnnnnnnnnnnnnnnnnnnnnnnnnnnnnnnnnnnnnnnnnnnnnnnnnnnnnnnnnnnnnnnnnnnnnnnnnnnnnnnnnnnnnnnnnnnnnnnnnnnnnnnnnnnnnnnnnnnnnnnnnnnnnnnnnnnnnnnnnnnnnnnnnnnnnnnnnnnnnnnnnnnnnnnnnnnnnnnnnnnnnnnnnnnnnnnnnnnnnnnnnnnnnnnnnnnnnnnnnnnnnnnnnnnnnnnnnnnnnnnnnnnnnnnnnnnnnnnnnnnnnnnnnnnnnnnnnnnnnnnnnnnnnnnnnnnnnnnnnnnnnnnnnnnnnnnnnnnnnnnnnnnnnnnnnnnnnnnnnnnnnnnnnnnnnnnnnnnnnnnnnnnnnnnnnnnnnnnnnnnnnnnnnnnnnnnnnnnnnnnnnnnnnnnnnnnnnnnnnnnnnnnnnnnnnnnnnnnnnnnnnnnnnnnnnnnnnnnnnnnnnnnnnnnnnnnnnnnnnnnnnnnnnnnnnnnnnnnnnnnnnnnnnnnnnnnnnnnnnnnnnnnnnnnnnnnnnnnnnnnnnnnnnnnnnnnnnnnnnnnnnnnnnnnnnnnnnnnnnnnnnnnnnnnnnnnnnnnnnnnnnnnnnnnnnnnnnnnnnnnnnnnnnnnnnnnnnnnnnnnnnnnnnnnnnnnnnnnnnnnnnnnnnnnnnnnnnnnnnnnnnnnnnnnnnnnnnnnnnnnnnnnnnnnnnnnnnnnnnnnnnnnnnnnnnnnnnnnnnnnnnnnnnnnnnnnnnnnnnnnnnnnnnnnnnnnnnnnnnnnnnnnnnnnnnnnnnnnnnnnnnnnnnnnnnnnnnnnnnnnnnnnnnnnnnnnnnnnnnnnnnnnnnnnnnnnnnnnnnnnnnnnnnnnnnnnnnnnnnnnnnnnnnnnnnnnnnnnnnnnnnnnnnnnnnnnnnnnnnnnnnnnnnnnnnnnnnnnnnnnnnnnnnnnnnnnnnnnnnnnnnnnnnnnnnnnnnnnnnnnnnnnnnnnnnnnnnnnnnnnnnnnnnnnnnnnnnnnnnnnnnnnnnnnnnnnnnnnnnnnnnnnnnnnnnnnnnnnnnnnnnnnnnnnnnnnnnnnnnnnnnnnnnnnnnnnnnnnnnnnnnnnnnnnnnnnnnnnnnnnnnnnnnnnnnnnnnnnnnnnnnnnnnnnnnnnnnnnnnnnnnnnnnnnnnnnnnnnnnnnnnnnnnnnnnnnnnnnnnnnnnnnnnnnnnnnnnnnnnnnnnnnnnnnnnnnnnnnnnnnnnnnnnnnnnnnnnnnnnnnnnnnnnnnnnnnnnnnnnnnnnnnnnnnnnnnnnnnnnnnnnnnnnnnnnnnnnnnnnnnnnnnnnnnnnnnnnnnnnnnnnnnnnnnnnnnnnnnnnnnnnnnnnnnnnnnnnnnnnnnnnnnnnnnnnnnnnnnnnnnnnnnnnnnnnnnnnnnnnnnnnnnnnnnnnnnnnnnnnnnnnnnnnnnnnnnnnnnnnnnnnnnnnnnnnnnnnnnnnnnnnnnnnnnnnnnnnnnnnnnnnnnnnnnnnnnnnnnnnnnnnnnnnnnnnnnnnnnnnnnnnnnnnnnnnnnnnnnnnnnnnnnnnnnnnnnnnnnnnnnnnnnnnnnnnnnnnnnnnnnnnnnnnnnnnnnnnnnnnnnnnnnnnnnnnnnnnnnnnnnnnnnnnnnnnnnnnnnnnnnnnnnnnnnnnnnnnnnnnnnnnnnnnnnnnnnnnnnnnnnnnnnnnnnnnnnnnnnnnnnnnnnnnnnnnnnnnnnnnnnnnnnnnnnnnnnnnnnnnnnnnnnnnnnnnnnnnnnnnnnnnnnnnnnnnnnnnnnnnnnnnnnnnnnnnnnnnnnnnnnnnnnnnnnnnnnnnnnnnnnnnnnnnnnnnnnnnnnnnnnnnnnnnnnnnnnnnnnnnnnnnnnnnnnnnnnnnnnnnnnnnnnnnnnnnnnnnnnnnnnnnnnnnnnnnnnnnnnnnnnnnnnnnnnnnnnnnnnnnnnnnnnnnnnnnnnnnnnnnnnnnnnnnnnnnnnnnnnnnnnnnnnnnnnnnnnnnnnnnnnnnnnnnnnnnnnnnnnnnnnnnnnnnnnnnnnnnnnnnnnnnnnnnnnnnnnnnnnnnnnnnnnnnnnnnnnnnnnnnnnnnnnnnnnnnnnnnnnnnnnnnnnnnnnnnnnnnnnnnnnnnnnnnnnnnnnnnnnnnnnnnnnnnnnnnnnnnnnnnnnnnnnnnnnnnnnnnnnnnnnnnnnnnnnnnnnnnnnnnnnnnnnnnnnnnnnnnnnnnnnnnnnnnnnnnnnnnnnnnnnnnnnnnnnnnnnnnnnnnnnnnnnnnnnnnnnnnnnnnnnnnnnnnnnnnnnnnnnnnnnnnnnnnnnnnnnnnnnnnnnnnnnnnnnnnnnnnnnnnnnnnnnnnnnnnnnnnnnnnnnnnnnnnnnnnnnnnnnnnnnnnnnnnnnnnnnnnnnnnnnnnnnnnnnnnnnnnnnnnnnnnnnnnnnnnnnnnnnnnnnnnnnnnnnnnnnnnnnnnnnnnnnnnnnnnnnnnnnnnnnnnnnnnnnnnnnnnnnnnnnnnnnnnnnnnnnnnnnnnnnnnnnnnnnnnnnnnnnnnnnnnnnnnnnnnnnnnnnnnnnnnnnnnnnnnnnnnnnnnnnnnnnnnnnnnnnnnnnnnnnnnnnnnnnnnnnnnnnnnnnnnnnnnnnnnnnnnnnnnnnnnnnnnnnnnnnnnnnnnnnnnnnnnnnnnnnnnnnnnnnnnnnnnnnnnnnnnnnnnnnnnnnnnnnnnnnnnnnnnnnnnnnnnnnnnnnnnnnnnnnnnnnnnnnnnnnnnnnnnnnnnnnnnnnnnnnnnnnnnnnnnnnnnnnnnnnnnnnnnnnnnnnnnnnnnnnnnnnnnnnnnnnnnnnnnnnnnnnnnnnnnnnnnnnnnnnnnnnnnnnnnnnnnnnnnnnnnnnnnnnnnnnnnnnnnnnnnnnnnnnnnnnnnnnnnnnnnnnnnnnnnnnnnnnnnnnnnnnnnnnnnnnnnnnnnnnnnnnnnnnnnnnnnnnnnnnnnnnnnnnnnnnnnnnnnnnnnnnnnnnnnnnnnnnnnnnnnnnnnnnnnnnnnnnnnnnnnnnnnnnnnnnnnnnnnnnnnnnnnnnnnnnnnnnnnnnnnnnnnnnnnnnnnnnnnnnnnnnnnnnnnnnnnnnnnnnnnnnnnnnnnnnnnnnnnnnnnnnnnnnnnnnnnnnnnnnnnnnnnnnnnnnnnnnnnnnnnnnnnnnnnnnnnnnnnnnnnnnnnnnnnnnnnnnnnnnnnnnnnnnnnnnnnnnnnnnnnnnnnnnnnnnnnnnnnnnnnnnnnnnnnnnnnnnnnnnnnnnnnnnnnnnnnnnnnnnnnnnnnnnnnnnnnnnnnnnnnnnnnnnnnnnnnnnnnnnnnnnnnnnnnnnnnnnnnnnnnnnnnnnnnnnnnnnnnnnnnnnnnnnnnnnnnnnnnnnnnnnnnnnnnnnnnnnnnnnnnnnnnnnnnnnnnnnnnnnnnnnnnnnnnnnnnnnnnnnnnnnnnnnnnnnnnnnnnnnnnnnnnnnnnnnnnnnnnnnnnnnnnnnnnnnnnnnnnnnnnnnnnnnnnnnnnnnnnnnnnnnnnnnnnnnnnnnnnnnnnnnnnnnnnnnnnnnnnnnnnnnnnnnnnnnnnnnnnnnnnnnnnnnnnnnnnnnnnnnnnnnnnnnnnnnnnnnnnnnnnnnnnnnnnnnnnnnnnnnnnnnnnnnnnnnnnnnnnnnnnnnnnnnnnnnnnnnnnnnnnnnnnnnnnnnnnnnnnnnnnnnnnnnnnnnnnnnnnnnnnnnnnnnnnnnnnnnnnnnnnnnnnnnnnnnnnnnnnnnnnnnnnnnnnnnnnnnnnnnnnnnnnnnnnnnnnnnnnnnnnnnnnnnnnnnnnnnnnnnnnnnnnnnnnnnnnnnnnnnnnnnnnnnnnnnnnnnnnnnnnnnnnnnnnnnnnnnnnnnnnnnnnnnnnnnnnnnnnnnnnnnnnnnnnnnnnnnnnnnnnnnnnnnnnnnnnnnnnnnnnnnnnnnnnnnnnnnnnnnnnnnnnnnnnnnnnnnnnnnnnnnnnnnnnnnnnnnnnnnnnnnnnnnnnnnnnnnnnnnnnnnnnnnnnnnnnnnnnnnnnnnnnnnnnnnnnnnnnnnnnnnnnnnnnnnnnnnnnnnnnnnnnnnnnnnnnnnnnnnnnnnnnnnnnnnnnnnnnnnnnnnnnnnnnnnnnnnnnnnnnnnnnnnnnnnnnnnnnnnnnnnnnnnnnnnnnnnnnnnnnnnnnnnnnnnnnnnnnnnnnnnnnnnnnnnnnnnnnnnnnnnnnnnnnnnnnnnnnnnnnnnnnnnnnnnnnnnnnnnnnnnnnnnnnnnnnnnnnnnnnnnnnnnnnnnnnnnnnnnnnnnnnnnnnnnnnnnnnnnnnnnnnnnnnnnnnnnnnnnnnnnnnnnnnnnnnnnnnnnnnnnnnnnnnnnnnnnnnnnnnnnnnnnnnnnnnnnnnnnnnnnnnnnnnnnnnnnnnnnnnnnnnnnnnnnnnnnnnnnnnnnnnnnnnnnnnnnnnnnnnnnnnnnnnnnnnnnnnnnnnnnnnnnnnnnnnnnnnnnnnnnnnnnnnnnnnnnnnnnnnnnnnnnnnnnnnnnnnnnnnnnnnnnnnnnnnnnnnnnnnnnnnnnnnnnnnnnnnnnnnnnnnnnnnnnnnnnnnnnnnnnnnnnnnnnnnnnnnnnnnnnnnnnnnnnnnnnnnnnnnnnnnnnnnnnnnnnnnnnnnnnnnnnnnnnnnnnnnnnnnnnnnnnnnnnnnnnnnnnnnnnnnnnnnnnnnnnnnnnnnnnnnnnnnnnnnnnnnnnnnnnnnnnnnnnnnnnnnnnnnnnnnnnnnnnnnnnnnnnnnnnnnnnnnnnnnnnnnnnnnnnnnnnnnnnnnnnnnnnnnnnnnnnnnnnnnnnnnnnnnnnnnnnnnnnnnnnnnnnnnnnnnnnnnnnnnnnnnnnnnnnnnnnnnnnnnnnnnnnnnnnnnnnnnnnnnnnnnnnnnnnnnnnnnnnnnnnnnnnnnnnnnnnnnnnnnnnnnnnnnnnnnnnnnnnnnnnnnnnnnnnnnnnnnnnnnnnnnnnnnnnnnnnnnnnnnnnnnnnnnnnnnnnnnnnnnnnnnnnnnnnnnnnnnnnnnnnnnnnnnnnnnnnnnnnnnnnnnnnnnnnnnnnnnnnnnnnnnnnnnnnnnnnnnnnnnnnnnnnnnnnnnnnnnnnnnnnnnnnnnnnnnnnnnnnnnnnnnnnnnnnnnnnnnnnnnnnnnnnnnnnnnnnnnnnnnnnnnnnnnnnnnnnnnnnnnnnnnnnnnnnnnnnnnnnnnnnnnnnnnnnnnnnnnnnnnnnnnnnnnnnnnnnnnnnnnnnnnnnnnnnnnnnnnnnnnnnnnnnnnnnnnnnnnnnnnnnnnnnnnnnnnnnnnnnnnnnnnnnnnnnnnnnnnnnnnnnnnnnnnnnnnnnnnnnnnnnnnnnnnnnnnnnnnnnnnnnnnnnnnnnnnnnnnnnnnnnnnnnnnnnnnnnnnnnnnnnnnnnnnnnnnnnnnnnnnnnnnnnnnnnnnnnnnnnnnnnnnnnnnnnnnnnnnnnnnnnnnnnnnnnnnnnnnnnnnnnnnnnnnnnnnnnnnnnnnnnnnnnnnnnnnnnnnnnnnnnnnnnnnnnnnnnnnnnnnnnnnnnnnnnnnnnnnnnnnnnnnnnnnnnnnnnnnnnnnnnnnnnnnnnnnnnnnnnnnnnnnnnnnnnnnnnnnnnnnnnnnnnnnnnnnnnnnnnnnnnnnnnnnnnnnnnnnnnnnnnnnnnnnnnnnnnnnnnnnnnnnnnnnnnnnnnnnnnnnnnnnnnnnnnnnnnnnnnnnnnnnnnnnnnnnnnnnnnnnnnnnnnnnnnnnnnnnnnnnnnnnnnnnnnnnnnnnnnnnnnnnnnnnnnnnnnnnnnnnnnnnnnnnnnnnnnnnnnnnnnnnnnnnnnnnnnnnnnnnnnnnnnnnnnnnnnnnnnnnnnnnnnnnnnnnnnnnnnnnnnnnnnnnnnnnnnnnnnnnnnnnnnnnnnnnnnnnnnnnnnnnnnnnnnnnnnnnnnnnnnnnnnnnnnnnnnnnnnnnnnnnnnnnnnnnnnnnnnnnnnnnnnnnnnnnnnnnnnnnnnnnnnnnnnnnnnnnnnnnnnnnnnnnnnnnnnnnnnnnnnnnnnnnnnnnnnnnnnnnnnnnnnnnnnnnnnnnnnnnnnnnnnnnnnnnnnnnnnnnnnnnnnnnnnnnnnnnnnnnnnnnnnnnnnnnnnnnnnnnnnnnnnnnnnnnnnnnnnnnnnnnnnnnnnnnnnnnnnnnnnnnnnnnnnnnnnnnnnnnnnnnnnnnnnnnnnnnnnnnnnnnnnnnnnnnnnnnnnnnnnnnnnnnnnnnnnnnnnnnnnnnnnnnnnnnnnnnnnnnnnnnnnnnnnnnnnnnnnnnnnnnnnnnnnnnnnnnnnnnnnnnnnnnnnnnnnnnnnnnnnnnnnnnnnnnnnnnnnnnnnnnnnnnnnnnnnnnnnnnnnnnnnnnnnnnnnnnnnnnnnnnnnnnnnnnnnnnnnnnnnnnnnnnnnnnnnnnnnnnnnnnnnnnnnnnnnnnnnnnnnnnnnnnnnnnnnnnnnnnnnnnnnnnnnnnnnnnnnnnnnnnnnnnnnnnnnnnnnnnnnnnnnnnnnnnnnnnnnnnnnnnnnnnnnnnnnnnnnnnnnnnnnnnnnnnnnnnnnnnnnnnnnnnnnnnnnnnnnnnnnnnnnnnnnnnnnnnnnnnnnnnnnnnnnnnnnnnnnnnnnnnnnnnnnnnnnnnnnnnnnnnnnnnnnnnnnnnnnnnnnnnnnnnnnnnnnnnnnnnnnnnnnnnnnnnnnnnnnnnnnnnnnnnnnnnnnnnnnnnnnnnnnnnnnnnnnnnnnnnnnnnnnnnnnnnnnnnnnnnnnnnnnnnnnnnnnnnnnnnnnnnnnnnnnnnnnnnnnnnnnnnnnnnnnnnnnnnnnnnnnnnnnnnnnnnnnnnnnnnnnnnnnnnnnnnnnnnnnnnnnnnnnnnnnnnnnnnnnnnnnnnnnnnnnnnnnnnnnnnnnnnnnnnnnnnnnnnnnnnnnnnnnnnnnnnnnnnnnnnnnnnnnnnnnnnnnnnnnnnnnnnnnnnnnnnnnnnnnnnnnnnnnnnnnnnnnnnnnnnnnnnnnnnnnnnnnnnnnnnnnnnnnnnnnnnnnnnnnnnnnnnnnnnnnnnnnnnnnnnnnnnnnnnnnnnnnnnnnnnnnnnnnnnnnnnnnnnnnnnnnnnnnnnnnnnnnnnnnnnnnnnnnnnnnnnnnnnnnnnnnnnnnnnnnnnnnnnnnnnnnnnnnnnnnnnnnnnnnnnnnnnnnnnnnnnnnnnnnnnnnnnnnnnnnnnnnnnnnnnnnnnnnnnnnnnnnnnnnnnnnnnnnnnnnnnnnnnnnnnnnnnnnnnnnnnnnnnnnnnnnnnnnnnnnnnnnnnnnnnnnnnnnnnnnnnnnnnnnnnnnnnnnnnnnnnnnnnnnnnnnnnnnnnnnnnnnnnnnnnnnnnnnnnnnnnnnnnnnnnnnnnnnnnnnnnnnnnnnnnnnnnnnnnnnnnnnnnnnnnnnnnnnnnnnnnnnnnnnnnnnnnnnnnnnnnnnnnnnnnnnnnnnnnnnnnnnnnnnnnnnnnnnnnnnnnnnnnnnnnnnnnnnnnnnnnnnnnnnnnnnnnnnnnnnnnnnnnnnnnnnnnnnnnnnnnnnnnnnnnnnnnnnnnnnnnnnnnnnnnnnnnnnnnnnnnnnnnnnnnnnnnnnnnnnnnnnnnnnnnnnnnnnnnnnnnnnnnnnnnnnnnnnnnnnnnnnnnnnnnnnnnnnnnnnnnnnnnnnnnnnnnnnnnnnnnnnnnnnnnnnnnnnnnnnnnnnnnnnnnnnnnnnnnnnnnnnnnnnnnnnnnnnnnnnnnnnnnnnnnnnnnnnnnnnnnnnnnnnnnnnnnnnnnnnnnnnnnnnnnnnnnnnnnnnnnnnnnnnnnnnnnnnnnnnnnnnnnnnnnnnnnnnnnnnnnnnnnnnnnnnnnnnnnnnnnnnnnnnnnnnnnnnnnnnnnnnnnnnnnnnnnnnnnnnnnnnnnnnnnnnnnnnnnnnnnnnnnnnnnnnnnnnnnnnnnnnnnnnnnnnnnnnnnnnnnnnnnnnnnnnnnnnnnnnnnnnnnnnnnnnnnnnnnnnnnnnnnnnnnnnnnnnnnnnnnnnnnnnnnnnnnnnnnnnnnnnnnnnnnnnnnnnnnnnnnnnnnnnnnnnnnnnnnnnnnnnnnnnnnnnnnnnnnnnnnnnnnnnnnnnnnnnnnnnnnnnnnnnnnnnnnnnnnnnnnnnnnnnnnnnnnnnnnnnnnnnnnnnnnnnnnnnnnnnnnnnnnnnnnnnnnnnnnnnnnnnnnnnnnnnnnnnnnnnnnnnnnnnnnnnnnnnnnnnnnnnnnnnnnnnnnnnnnnnnnnnnnnnnnnnnnnnnnnnnnnnnnnnnnnnnnnnnnnnnnnnnnnnnnnnnnnnnnnnnnnnnnnnnnnnnnnnnnnnnnnnnnnnnnnnnnnnnnnnnnnnnnnnnnnnnnnnnnnnnnnnnnnnnnnnnnnnnnnnnnnnnnnnnnnnnnnnnnnnnnnnnnnnnnnnnnnnnnnnnnnnnnnnnnnnnnnnnnnnnnnnnnnnnnnnnnnnnnnnnnnnnnnnnnnnnnnnnnnnnnnnnnnnnnnnnnnnnnnnnnnnnnnnnnnnnnnnnnnnnnnnnnnnnnnnnnnnnnnnnnnnnnnnnnnnnnnnnnnnnnnnnnnnnnnnnnnnnnnnnnnnnnnnnnnnnnnnnnnnnnnnnnnnnnnnnnnnnnnnnnnnnnnnnnnnnnnnnnnnnnnnnnnnnnnnnnnnnnnnnnnnnnnnnnnnnnnnnnnnnnnnnnnnnnnnnnnnnnnnnnnnnnnnnnnnnnnnnnnnnnnnnnnnnnnnnnnnnnnnnnnnnnnnnnnnnnnnnnnnnnnnnnnnnnnnnnnnnnnnnnnnnnnnnnnnnnnnnnnnnnnnnnnnnnnnnnnnnnnnnnnnnnnnnnnnnnnnnnnnnnnnnnnnnnnnnnnnnnnnnnnnnnnnnnnnnnnnnnnnnnnnnnnnnnnnnnnnnnnnnnnnnnnnnnnnnnnnnnnnnnnnnnnnnnnnnnnnnnnnnnnnnnnnnnnnnnnnnnnnnnnnnnnnnnnnnnnnnnnnnnnnnnnnnnnnnnnnnnnnnnnnnnnnnnnnnnnnnnnnnnnnnnnnnnnnnnnnnnnnnnnnnnnnnnnnnnnnnnnnnnnnnnnnnnnnnnnnnnnnnnnnnnnnnnnnnnnnnnnnnnnnnnnnnnnnnnnnnnnnnnnnnnnnnnnnnnnnnnnnnnnnnnnnnnnnnnnnnnnnnnnnnnnnnnnnnnnnnnnnnnnnnnnnnnnnnnnnnnnnnnnnnnnnnnnnnnnnnnnnnnnnnnnnnnnnnnnnnnnnnnnnnnnnnnnnnnnnnnnnnnnnnnnnnnnnnnnnnnnnnnnnnnnnnnnnnnnnnnnnnnnnnnnnnnnnnnnnnnnnnnnnnnnnnnnnnnnnnnnnnnnnnnnnnnnnnnnnnnnnnnnnnnnnnnnnnnnnnnnnnnnnnnnnnnnnnnnnnnnnnnnnnnnnnnnnnnnnnnnnnnnnnnnnnnnnnnnnnnnnnnnnnnnnnnnnnnnnnnnnnnnnnnnnnnnnnnnnnnnnnnnnnnnnnnnnnnnnnnnnnnnnnnnnnnnnnnnnnnnnnnnnnnnnnnnnnnnnnnnnnnnnnnnnnnnnnnnnnnnnnnnnnnnnnnnnnnnnnnnnnnnnnnnnnnnnnnnnnnnnnnnnnnnnnnnnnnnnnnnnnnnnnnnnnnnnnnnnnnnnnnnnnnnnnnnnnnnnnnnnnnnnnnnnnnnnnnnnnnnnnnnnnnnnnnnnnnnnnnnnnnnnnnnnnnnnnnnnnnnnnnnnnnnnnnnnnnnnnnnnnnnnnnnnnnnnnnnnnnnnnnnnnnnnnnnnnnnnnnnnnnnnnnnnnnnnnnnnnnnnnnnnnnnnnnnnnnnnnnnnnnnnnnnnnnnnnnnnnnnnnnnnnnnnnnnnnnnnnnnnnnnnnnnnnnnnnnnnnnnnnnnnnnnnnnnnnnnnnnnnnnnnnnnnnnnnnnnnnnnnnnnnnnnnnnnnnnnnnnnnnnnnnnnnnnnnnnnnnnnnnnnnnnnnnnnnnnnnnnnnnnnnnnnnnnnnnnnnnnnnnnnnnnnnnnnnnnnnnnnnnnnnnnnnnnnnnnnnnnnnnnnnnnnnnnnnnnnnnnnnnnnnnnnnnnnnnnnnnnnnnnnnnnnnnnnnnnnnnnnnnnnnnnnnnnnnnnnnnnnnnnnnnnnnnnnnnnnnnnnnnnnnnnnnnnnnnnnnnnnnnnnnnnnnnnnnnnnnnnnnnnnnnnnnnnnnnnnnnnnnnnnnnnnnnnnnnnnnnnnnnnnnnnnnnnnnnnnnnnnnnnnnnnnnnnnnnnnnnnnnnnnnnnnnnnnnnnnnnnnnnnnnnnnnnnnnnnnnnnnnnnnnnnnnnnnnnnnnnnnnnnnnnnnnnnnnnnnnnnnnnnnnnnnnnnnnnnnnnnnnnnnnnnnnnnnnnnnnnnnnnnnnnnnnnnnnnnnnnnnnnnnnnnnnnnnnnnnnnnnnnnnnnnnnnnnnnnnnnnnnnnnnnnnnnnnnnnnnnnnnnnnnnnnnnnnnnnnnnnnnnnnnnnnnnnnnnnnnnnnnnnnnnnnnnnnnnnnnnnnnnnnnnnnnnnnnnnnnnnnnnnnnnnnnnnnnnnnnnnnnnnnnnnnnnnnnnnnnnnnnnnnnnnnnnnnnnnnnnnnnnnnnnnnnnnnnnnnnnnnnnnnnnnnnnnnnnnnnnnnnnnnnnnnnnnnnnnnnnnnnnnnnnnnnnnnnnnnnnnnnnnnnnnnnnnnnnnnnnnnnnnnnnnnnnnnnnnnnnnnnnnnnnnnnnnnnnnnnnnnnnnnnnnnnnnnnnnnnnnnnnnnnnnnnnnnnnnnnnnnnnnnnnnnnnnnnnnnnnnnnnnnnnnnnnnnnnnnnnnnnnnnnnnnnnnnnnnnnnnnnnnnnnnnnnnnnnnnnnnnnnnnnnnnnnnnnnnnnnnnnnnnnnnnnnnnnnnnnnnnnnnnnnnnnnnnnnnnnnnnnnnnnnnnnnnnnnnnnnnnnnnnnnnnnnnnnnnnnnnnnnnnnnnnnnnnnnnnnnnnnnnnnnnnnnnnnnnnnnnnnnnnnnnnnnnnnnnnnnnnnnnnnnnnnnnnnnnnnnnnnnnnnnnnnnnnnnnnnnnnnnnnnnnnnnnnnnnnnnnnnnnnnnnnnnnnnnnnnnnnnnnnnnnnnnnnnnnnnnnnnnnnnnnnnnnnnnnnnnnnnnnnnnnnnnnnnnnnnnnnnnnnnnnnnnnnnnnnnnnnnnnnnnnnnnnnnnnnnnnnnnnnnnnnnnnnnnnnnnnnnnnnnnnnnnnnnnnnnnnnnnnnnnnnnnnnnnnnnnnnnnnnnnnnnnnnnnnnnnnnnnnnnnnnnnnnnnnnnnnnnnnnnnnnnnnnnnnnnnnnnnnnnnnnnnnnnnnnnnnnnnnnnnnnnnnnnnnnnnnnnnnnnnnnnnnnnnnnnnnnnnnnnnnnnnnnnnnnnnnnnnnnnnnnnnnnnnnnnnnnnnnnnnnnnnnnnnnnnnnnnnnnnnnnnnnnnnnnnnnnnnnnnnnnnnnnnnnnnnnnnnnnnnnnnnnnnnnnnnnnnnnnnnnnnnnnnnnnnnnnnnnnnnnnnnnnnnnnnnnnnnnnnnnnnnnnnnnnnnnnnnnnnnnnnnnnnnnnnnnnnnnnnnnnnnnnnnnnnnnnnnnnnnnnnnnnnnnnnnnnnnnnnnnnnnnnnnnnnnnnnnnnnnnnnnnnnnnnnnnnnnnnnnnnnnnnnnnnnnnnnnnnnnnnnnnnnnnnnnnnnnnnnnnnnnnnnnnnnnnnnnnnnnnnnnnnnnnnnnnnnnnnnnnnnnnnnnnnnnnnnnnnnnnnnnnnnnnnnnnnnnnnnnnnnnnnnnnnnnnnnnnnnnnnnnnnnnnnnnnnnnnnnnnnnnnnnnnnnnnnnnnnnnnnnnnnnnnnnnnnnnnnnnnnnnnnnnnnnnnnnnnnnnnnnnnnnnnnnnnnnnnnnnnnnnnnnnnnnnnnnnnnnnnnnnnnnnnnnnnnnnnnnnnnnnnnnnnnnnnnnnnnnnnnnnnnnnnnnnnnnnnnnnnnnnnnnnnnnnnnnnnnnnnnnnnnnnnnnnnnnnnnnnnnnnnnnnnnnnnnnnnnnnnnnnnnnnnnnnnnnnnnnnnnnnnnnnnnnnnnnnnnnnnnnnnnnnnnnnnnnnnnnnnnnnnnnnnnnnnnnnnnnnnnnnnnnnnnnnnnnnnnnnnnnnnnnnnnnnnnnnnnnnnnnnnnnnnnnnnnnnnnnnnnnnnnnnnnnnnnnnnnnnnnnnnnnnnnnnnnnnnnnnnnnnnnnnnnnnnnnnnnnnnnnnnnnnnnnnnnnnnnnnnnnnnnnnnnnnnnnnnnnnnnnnnnnnnnnnnnnnnnnnnnnnnnnnnnnnnnnnnnnnnnnnnnnnnnnnnnnnnnnnnnnnnnnnnnnnnnnnnnnnnnnnnnnnnnnnnnnnnnnnnnnnnnnnnnnnnnnnnnnnnnnnnnnnnnnnnnnnnnnnnnnnnnnnnnnnnnnnnnnnnnnnnnnnnnnnnnnnnnnnnnnnnnnnnnnnnnnnnnnnnnnnnnnnnnnnnnnnnnnnnnnnnnnnnnnnnnnnnnnnnnnnnnnnnnnnnnnnnnnnnnnnnnnnnnnnnnnnnnnnnnnnnnnnnnnnnnnnnnnnnnnnnnnnnnnnnnnnnnnnnnnnnnnnnnnnnnnnnnnnnnnnnnnnnnnnnnnnnnnnnnnnnnnnnnnnnnnnnnnnnnnnnnnnnnnnnnnnnnnnnnnnnnnnnnnnnnnnnnnnnnnnnnnnnnnnnnnnnnnnnnnnnnnnnnnnnnnnnnnnnnnnnnnnnnnnnnnnnnnnnnnnnnnnnnnnnnnnnnnnnnnnnnnnnnnnnnnnnnnnnnnnnnnnnnnnnnnnnnnnnnnnnnnnnnnnnnnnnnnnnnnnnnnnnnnnnnnnnnnnnnnnnnnnnnnnnnnnnnnnnnnnnnnnnnnnnnnnnnnnnnnnnnnnnnnnnnnnnnnnnnnnnnnnnnnnnnnnnnnnnnnnnnnnnnnnnnnnnnnnnnnnnnnnnnnnnnnnnnnnnnnnnnnnnnnnnnnnnnnnnnnnnnnnnnnnnnnnnnnnnnnnnnnnnnnnnnnnnnnnnnnnnnnnnnnnnnnnnnnnnnnnnnnnnnnnnnnnnnnnnnnnnnnnnnnnnnnnnnnnnnnnnnnnnnnnnnnnnnnnnnnnnnnnnnnnnnnnnnnnnnnnnnnnnnnnnnnnnnnnnnnnnnnnnnnnnnnnnnnnnnnnnnnnnnnnnnnnnnnnnnnnnnnnnnnnnnnnnnnnnnnnnnnnnnnnnnnnnnnnnnnnnnnnnnnnnnnnnnnnnnnnnnnnnnnnnnnnnnnnnnnnnnnnnnnnnnnnnnnnnnnnnnnnnnnnnnnnnnnnnnnnnnnnnnnnnnnnnnnnnnnnnnnnnnnnnnnnnnnnnnnnnnnnnnnnnnnnnnnnnnnnnnnnnnnnnnnnnnnnnnnnnnnnnnnnnnnnnnnnnnnnnnnnnnnnnnnnnnnnnnnnnnnnnnnnnnnnnnnnnnnnnnnnnnnnnnnnnnnnnnnnnnnnnnnnnnnnnnnnnnnnnnnnnnnnnnnnnnnnnnnnnnnnnnnnnnnnnnnnnnnnnnnnnnnnnnnnnnnnnnnnnnnnnnnnnnnnnnnnnnnnnnnnnnnnnnnnnnnnnnnnnnnnnnnnnnnnnnnnnnnnnnnnnnnnnnnnnnnnnnnnnnnnnnnnnnnnnnnnnnnnnnnnnnnnnnnnnnnnnnnnnnnnnnnnnnnnnnnnnnnnnnnnnnnnnnnnnnnnnnnnnnnnnnnnnnnnnnnnnnnnnnnnnnnnnnnnnnnnnnnnnnnnnnnnnnnnnnnnnnnnnnnnnnnnnnnnnnnnnnnnnnnnnnnnnnnnnnnnnnnnnnnnnnnnnnnnnnnnnnnnnnnnnnnnnnnnnnnnnnnnnnnnnnnnnnnnnnnnnnnnnnnnnnnnnnnnnnnnnnnnnnnnnnnnnnnnnnnnnnnnnnnnnnnnnnnnnnnnnnnnnnnnnnnnnnnnnnnnnnnnnnnnnnnnnnnnnnnnnnnnnnnnnnnnnnnnnnnnnnnnnnnnnnnnnnnnnnnnnnnnnnnnnnnnnnnnnnnnnnnnnnnnnnnnnnnnnnnnnnnnnnnnnnnnnnnnnnnnnnnnnnnnnnnnnnnnnnnnnnnnnnnnnnnnnnnnnnnnnnnnnnnnnnnnnnnnnnnnnnnnnnnnnnnnnnnnnnnnnnnnnnnnnnnnnnnnnnnnnnnnnnnnnnnnnnnnnnnnnnnnnnnnnnnnnnnnnnnnnnnnnnnnnnnnnnnnnnnnnnnnnnnnnnnnnnnnnnnnnnnnnnnnnnnnnnnnnnnnnnnnnnnnnnnnnnnnnnnnnnnnnnnnnnnnnnnnnnnnnnnnnnnnnnnnnnnnnnnnnnnnnnnnnnnnnnnnnnnnnnnnnnnnnnnnnnnnnnnnnnnnnnnnnnnnnnnnnnnnnnnnnnnnnnnnnnnnnnnnnnnnnnnnnnnnnnnnnnnnnnnnnnnnnnnnnnnnnnnnnnnnnnnnnnnnnnnnnnnnnnnnnnnnnnnnnnnnnnnnnnnnnnnnnnnnnnnnnnnnnnnnnnnnnnnnnnnnnnnnnnnnnnnnnnnnnnnnnnnnnnnnnnnnnnnnnnnnnnnnnnnnnnnnnnnnnnnnnnnnnnnnnnnnnnnnnnnnnnnnnnnnnnnnnnnnnnnnnnnnnnnnnnnnnnnnnnnnnnnnnnnnnnnnnnnnnnnnnnnnnnnnnnnnnnnnnnnnnnnnnnnnnnnnnnnnnnnnnnnnnnnnnnnnnnnnnnnnnnnnnnnnnnnnnnnnnnnnnnnnnnnnnnnnnnnnnnnnnnnnnnnnnnnnnnnnnnnnnnnnnnnnnnnnnnnnnnnnnnnnnnnnnnnnnnnnnnnnnnnnnnnnnnnnnnnnnnnnnnnnnnnnnnnnnnnnnnnnnnnnnnnnnnnnnnnnnnnnnnnnnnnnnnnnnnnnnnnnnnnnnnnnnnnnnnnnnnnnnnnnnnnnnnnnnnnnnnnnnnnnnnnnnnnnnnnnnnnnnnnnnnnnnnnnnnnnnnnnnnnnnnnnnnnnnnnnnnnnnnnnnnnnnnnnnnnnnnnnnnnnnnnnnnnnnnnnnnnnnnnnnnnnnnnnnnnnnnnnnnnnnnnnnnnnnnnnnnnnnnnnnnnnnnnnnnnnnnnnnnnnnnnnnnnnnnnnnnnnnnnnnnnnnnnnnnnnnnnnnnnnnnnnnnnnnnnnnnnnnnnnnnnnnnnnnnnnnnnnnnnnnnnnnnnnnnnnnnnnnnnnnnnnnnnnnnnnnnnnnnnnnnnnnnnnnnnnnnnnnnnnnnnnnnnnnnnnnnnnnnnnnnnnnnnnnnnnnnnnnnnnnnnnnnnnnnnnnnnnnnnnnnnnnnnnnnnnnnnnnnnnnnnnnnnnnnnnnnnnnnnnnnnnnnnnnnnnnnnnnnnnnnnnnnnnnnnnnnnnnnnnnnnnnnnnnnnnnnnnnnnnnnnnnnnnnnnnnnnnnnnnnnnnnnnnnnnnnnnnnnnnnnnnnnnnnnnnnnnnnnnnnnnnnnnnnnnnnnnnnnnnnnnnnnnnnnnnnnnnnnnnnnnnnnnnnnnnnnnnnnnnnnnnnnnnnnnnnnnnnnnnnnnnnnnnnnnnnnnnnnnnnnnnnnnnnnnnnnnnnnnnnnnnnnnnnnnnnnnnnnnnnnnnnnnnnnnnnnnnnnnnnnnnnnnnnnnnnnnnnnnnnnnnnnnnnnnnnnnnnnnnnnnnnnnnnnnnnnnnnnnnnnnnnnnnnnnnnnnnnnnnnnnnnnnnnnnnnnnnnnnnnnnnnnnnnnnnnnnnnnnnnnnnnnnnnnnnnnnnnnnnnnnnnnnnnnnnnnnnnnnnnnnnnnnnnnnnnnnnnnnnnnnnnnnnnnnnnnnnnnnnnnnnnnnnnnnnnnnnnnnnnnnnnnnnnnnnnnnnnnnnnnnnnnnnnnnnnnnnnnnnnnnnnnnnnnnnnnnnnnnnnnnnnnnnnnnnnnnnnnnnnnnnnnnnnnnnnnnnnnnnnnnnnnnnnnnnnnnnnnnnnnnnnnnnnnnnnnnnnnnnnnnnnnnnnnnnnnnnnnnnnnnnnnnnnnnnnnnnnnnnnnnnnnnnnnnnnnnnnnnnnnnnnnnnnnnnnnnnnnnnnnnnnnnnnnnnnnnnnnnnnnnnnnnnnnnnnnnnnnnnnnnnnnnnnnnnnnnnnnnnnnnnnnnnnnnnnnnnnnnnnnnnnnnnnnnnnnnnnnnnnnnnnnnnnnnnnnnnnnnnnnnnnnnnnnnnnnnnnnnnnnnnnnnnnnnnnnnnnnnnnnnnnnnnnnnnnnnnnnnnnnnnnnnnnnnnnnnnnnnnnnnnnnnnnnnnnnnnnnnnnnnnnnnnnnnnnnnnnnnnnnnnnnnnnnnnnnnnnnnnnnnnnnnnnnnnnnnnnnnnnnnnnnnnnnnnnnnnnnnnnnnnnnnnnnnnnnnnnnnnnnnnnnnnnnnnnnnnnnnnnnnnnnnnnnnnnnnnnnnnnnnnnnnnnnnnnnnnnnnnnnnnnnnnnnnnnnnnnnnnnnnnnnnnnnnnnnnnnnnnnnnnnnnnnnnnnnnnnnnnnnnnnnnnnnnnnnnnnnnnnnnnnnnnnnnnnnnnnnnnnnnnnnnnnnnnnnnnnnnnnnnnnnnnnnnnnnnnnnnnnnnnnnnnnnnnnnnnnnnnnnnnnnnnnnnnnnnnnnnnnnnnnnnnnnnnnnnnnnnnnnnnnnnnnnnnnnnnnnnnnnnnnnnnnnnnnnnnnnnnnnnnnnnnnnnnnnnnnnnnnnnnnnnnnnnnnnnnnnnnnnnnnnnnnnnnnnnnnnnnnnnnnnnnnnnnnnnnnnnnnnnnnnnnnnnnnnnnnnnnnnnnnnnnnnnnnnnnnnnnnnnnnnnnnnnnnnnnnnnnnnnnnnnnnnnnnnnnnnnnnnnnnnnnnnnnnnnnnnnnnnnnnnnnnnnnnnnnnnnnnnnnnnnnnnnnnnnnnnnnnnnnnnnnnnnnnnnnnnnnnnnnnnnnnnnnnnnnnnnnnnnnnnnnnnnnnnnnnnnnnnnnnnnnnnnnnnnnnnnnnnnnnnnnnnnnnnnnnnnnnnnnnnnnnnnnnnnnnnnnnnnnnnnnnnnnnnnnnnnnnnnnnnnnnnnnnnnnnnnnnnnnnnnnnnnnnnnnnnnnnnnnnnnnnnnnnnnnnnnnnnnnnnnnnnnnnnnnnnnnnnnnnnnnnnnnnnnnnnnnnnnnnnnnnnnnnnnnnnnnnnnnnnnnnnnnnnnnnnnnnnnnnnnnnnnnnnnnnnnnnnnnnnnnnnnnnnnnnnnnnnnnnnnnnnnnnnnnnnnnnnnnnnnnnnnnnnnnnnnnnnnnnnnnnnnnnnnnnnnnnnnnnnnnnnnnnnnnnnnnnnnnnnnnnnnnnnnnnnnnnnnnnnnnnnnnnnnnnnnnnnnnnnnnnnnnnnnnnnnnnnnnnnnnnnnnnnnnnnnnnnnnnnnnnnnnnnnnnnnnnnnnnnnnnnnnnnnnnnnnnnnnnnnnnnnnnnnnnnnnnnnnnnnnnnnnnnnnnnnnnnnnnnnnnnnnnnnnnnnnnnnnnnnnnnnnnnnnnnnnnnnnnnnnnnnnnnnnnnnnnnnnnnnnnnnnnnnnnnnnnnnnnnnnnnnnnnnnnnnnnnnnnnnnnnnnnnnnnnnnnnnnnnnnnnnnnnnnnnnnnnnnnnnnnnnnnnnnnnnnnnnnnnnnnnnnnnnnnnnnnnnnnnnnnnnnnnnnnnnnnnnnnnnnnnnnnnnnnnnnnnnnnnnnnnnnnnnnnnnnnnnnnnnnnnnnnnnnnnnnnnnnnnnnnnnnnnnnnnnnnnnnnnnnnnnnnnnnnnnnnnnnnnnnnnnnnnnnnnnnnnnnnnnnnnnnnnnnnnnnnnnnnnnnnnnnnnnnnnnnnnnnnnnnnnnnnnnnnnnnnnnnnnnnnnnnnnnnnnnnnnnnnnnnnnnnnnnnnnnnnnnnnnnnnnnnnnnnnnnnnnnnnnnnnnnnnnnnnnnnnnnnnnnnnnnnnnnnnnnnnnnnnnnnnnnnnnnnnnnnnnnnnnnnnnnnnnnnnnnnnnnnnnnnnnnnnnnnnnnnnnnnnnnnnnnnnnnnnnnnnnnnnnnnnnnnnnnnnnnnnnnnnnnnnnnnnnnnnnnnnnnnnnnnnnnnnnnnnnnnnnnnnnnnnnnnnnnnnnnnnnnnnnnnnnnnnnnnnnnnnnnnnnnnnnnnnnnnnnnnnnnnnnnnnnnnnnnnnnnnnnnnnnnnnnnnnnnnnnnnnnnnnnnnnnnnnnnnnnnnnnnnnnnnnnnnnnnnnnnnnnnnnnnnnnnnnnnnnnnnnnnnnnnnnnnnnnnnnnnnnnnnnnnnnnnnnnnnnnnnnnnnnnnnnnnnnnnnnnnnnnnnnnnnnnnnnnnnnnnnnnnnnnnnnnnnnnnnnnnnnnnnnnnnnnnnnnnnnnnnnnnnnnnnnnnnnnnnnnnnnnnnnnnnnnnnnnnnnnnnnnnnnnnnnnnnnnnnnnnnnnnnnnnnnnnnnnnnnnnnnnnnnnnnnnnnnnnnnnnnnnnnnnnnnnnnnnnnnnnnnnnnnnnnnnnnnnnnnnnnnnnnnnnnnnnnnnnnnnnnnnnnnnnnnnnnnnnnnnnnnnnnnnnnnnnnnnnnnnnnnnnnnnnnnnnnnnnnnnnnnnnnnnnnnnnnnnnnnnnnnnnnnnnnnnnnnnnnnnnnnnnnnnnnnnnnnnnnnnnnnnnnnnnnnnnnnnnnnnnnnnnnnnnnnnnnnnnnnnnnnnnnnnnnnnnnnnnnnnnnnnnnnnnnnnnnnnnnnnnnnnnnnnnnnnnnnnnnnnnnnnnnnnnnnnnnnnnnnnnnnnnnnnnnnnnnnnnnnnnnnnnnnnnnnnnnnnnnnnnnnnnnnnnnnnnnnnnnnnnnnnnnnnnnnnnnnnnnnnnnnnnnnnnnnnnnnnnnnnnnnnnnnnnnnnnnnnnnnnnnnnnnnnnnnnnnnnnnnnnnnnnnnnnnnnnnnnnnnnnnnnnnnnnnnnnnnnnnnnnnnnnnnnnnnnnnnnnnnnnnnnnnnnnnnnnnnnnnnnnnnnnnnnnnnnnnnnnnnnnnnnnnnnnnnnnnnnnnnnnnnnnnnnnnnnnnnnnnnnnnnnnnnnnnnnnnnnnnnnnnnnnnnnnnnnnnnnnnnnnnnnnnnnnnnnnnnnnnnnnnnnnnnnnnnnnnnnnnnnnnnnnnnnnnnnnnnnnnnnnnnnnnnnnnnnnnnnnnnnnnnnnnnnnnnnnnnnnnnnnnnnnnnnnnnnnnnnnnnnnnnnnnnnnnnnnnnnnnnnnnnnnnnnnnnnnnnnnnnnnnnnnnnnnnnnnnnnnnnnnnnnnnnnnnnnnnnnnnnnnnnnnnnnnnnnnnnnnnnnnnnnnnnnnnnnnnnnnnnnnnnnnnnnnnnnnnnnnnnnnnnnnnnnnnnnnnnnnnnnnnnnnnnnnnnnnnnnnnnnnnnnnnnnnnnnnnnnnnnnnnnnnnnnnnnnnnnnnnnnnnnnnnnnnnnnnnnnnnnnnnnnnnnnnnnnnnnnnnnnnnnnnnnnnnnnnnnnnnnnnnnnnnnnnnnnnnnnnnnnnnnnnnnnnnnnnnnnnnnnnnnnnnnnnnnnnnnnnnnnnnnnnnnnnnnnnnnnnnnnnnnnnnnnnnnnnnnnnnnnnnnnnnnnnnnnnnnnnnnnnnnnnnnnnnnnnnnnnnnnnnnnnnnnnnnnnnnnnnnnnnnnnnnnnnnnnnnnnnnnnnnnnnnnnnnnnnnnnnnnnnnnnnnnnnnnnnnnnnnnnnnnnnnnnnnnnnnnnnnnnnnnnnnnnnnnnnnnnnnnnnnnnnnnnnnnnnnnnnnnnnnnnnnnnnnnnnnnnnnnnnnnnnnnnnnnnnnnnnnnnnnnnnnnnnnnnnnnnnnnnnnnnnnnnnnnnnnnnnnnnnnnnnnnnnnnnnnnnnnnnnnnnnnnnnnnnnnnnnnnnnnnnnnnnnnnnnnnnnnnnnnnnnnnnnnnnnnnnnnnnnnnnnnnnnnnnnnnnnnnnnnnnnnnnnnnnnnnnnnnnnnnnnnnnnnnnnnnnnnnnnnnnnnnnnnnnnnnnnnnnnnnnnnnnnnnnnnnnnnnnnnnnnnnnnnnnnnnnnnnnnnnnnnnnnnnnnnnnnnnnnnnnnnnnnnnnnnnnnnnnnnnnnnnnnnnnnnnnnnnnnnnnnnnnnnnnnnnnnnnnnnnnnnnnnnnnnnnnnnnnnnnnnnnnnnnnnnnnnnnnnnnnnnnnnnnnnnnnnnnnnnnnnnnnnnnnnnnnnnnnnnnnnnnnnnnnnnnnnnnnnnnnnnnnnnnnnnnnnnnnnnnnnnnnnnnnnnnnnnnnnnnnnnnnnnnnnnnnnnnnnnnnnnnnnnnnnnnnnnnnnnnnnnnnnnnnnnnnnnnnnnnnnnnnnnnnnnnnnnnnnnnnnnnnnnnnnnnnnnnnnnnnnnnnnnnnnnnnnnnnnnnnnnnnnnnnnnnnnnnnnnnnnnnnnnnnnnnnnnnnnnnnnnnnnnnnnnnnnnnnnnnnnnnnnnnnnnnnnnnnnnnnnnnnnnnnnnnnnnnnnnnnnnnnnnnnnnnnnnnnnnnnnnnnnnnnnnnnnnnnnnnnnnnnnnnnnnnnnnnnnnnnnnnnnnnnnnnnnnnnnnnnnnnnnnnnnnnnnnnnnnnnnnnnnnnnnnnnnnnnnnnnnnnnnnnnnnnnnnnnnnnnnnnnnnnnnnnnnnnnnnnnnnnnnnnnnnnnnnnnnnnnnnnnnnnnnnnnnnnnnnnnnnnnnnnnnnnnnnnnnnnnnnnnnnnnnnnnnnnnnnnnnnnnnnnnnnnnnnnnnnnnnnnnnnnnnnnnnnnnnnnnnnnnnnnnnnnnnnnnnnnnnnnnnnnnnnnnnnnnnnnnnnnnnnnnnnnnnnnnnnnnnnnnnnnnnnnnnnnnnnnnnnnnnnnnnnnnnnnnnnnnnnnnnnnnnnnnnnnnnnnnnnnnnnnnnnnnnnnnnnnnnnnnnnnnnnnnnnnnnnnnnnnnnnnnnnnnnnnnnnnnnnnnnnnnnnnnnnnnnnnnnnnnnnnnnnnnnnnnnnnnnnnnnnnnnnnnnnnnnnnnnnnnnnnnnnnnnnnnnnnnnnnnnnnnnnnnnnnnnnnnnnnnnnnnnnnnnnnnnnnnnnnnnnnnnnnnnnnnnnnnnnnnnnnnnnnnnnnnnnnnnnnnnnnnnnnnnnnnnnnnnnnnnnnnnnnnnnnnnnnnnnnnnnnnnnnnnnnnnnnnnnnnnnnnnnnnnnnnnnnnnnnnnnnnnnnnnnnnnnnnnnnnnnnnnnnnnnnnnnnnnnnnnnnnnnnnnnnnnnnnnnnnnnnnnnnnnnnnnnnnnnnnnnnnnnnnnnnnnnnnnnnnnnnnnnnnnnnnnnnnnnnnnnnnnnnnnnnnnnnnnnnnnnnnnnnnnnnnnnnnnnnnnnnnnnnnnnnnnnnnnnnnnnnnnnnnnnnnnnnnnnnnnnnnnnnnnnnnnnnnnnnnnnnnnnnnnnnnnnnnnnnnnnnnnnnnnnnnnnnnnnnnnnnnnnnnnnnnnnnnnnnnnnnnnnnnnnnnnnnnnnnnnnnnnnnnnnnnnnnnnnnnnnnnnnnnnnnnnnnnnnnnnnnnnnnnnnnnnnnnnnnnnnnnnnnnnnnnnnnnnnnnnnnnnnnnnnnnnnnnnnnnnnnnnnnnnnnnnnnnnnnnnnnnnnnnnnnnnnnnnnnnnnnnnnnnnnnnnnnnnnnnnnnnnnnnnnnnnnnnnnnnnnnnnnnnnnnnnnnnnnnnnnnnnnnnnnnnnnnnnnnnnnnnnnnnnnnnnnnnnnnnnnnnnnnnnnnnnnnnnnnnnnnnnnnnnnnnnnnnnnnnnnnnnnnnnnnnnnnnnnnnnnnnnnnnnnnnnnnnnnnnnnnnnnnnnnnnnnnnnnnnnnnnnnnnnnnnnnnnnnnnnnnnnnnnnnnnnnnnnnnnnnnnnnnnnnnnnnnnnnnnnnnnnnnnnnnnnnnnnnnnnnnnnnnnnnnnnnnnnnnnnnnnnnnnnnnnnnnnnnnnnnnnnnnnnnnnnnnnnnnnnnnnnnnnnnnnnnnnnnnnnnnnnnnnnnnnnnnnnnnnnnnnnnnnnnnnnnnnnnnnnnnnnnnnnnnnnnnnnnnnnnnnnnnnnnnnnnnnnnnnnnnnnnnnnnnnnnnnnnnnnnnnnnnnnnnnnnnnnnnnnnnnnnnnnnnnnnnnnnnnnnnnnnnnnnnnnnnnnnnnnnnnnnnnnnnnnnnnnnnnnnnnnnnnnnnnnnnnnnnnnnnnnnnnnnnnnnnnnnnnnnnnnnnnnnnnnnnnnnnnnnnnnnnnnnnnnnnnnnnnnnnnnnnnnnnnnnnnnnnnnnnnnnnnnnnnnnnnnnnnnnnnnnnnnnnnnnnnnnnnnnnnnnnnnnnnnnnnnnnnnnnnnnnnnnnnnnnnnnnnnnnnnnnnnnnnnnnnnnnnnnnnnnnnnnnnnnnnnnnnnnnnnnnnnnnnnnnnnnnnnnnnnnnnnnnnnnnnnnnnnnnnnnnnnnnnnnnnnnnnnnnnnnnnnnnnnnnnnnnnnnnnnnnnnnnnnnnnnnnnnnnnnnnnnnnnnnnnnnnnnnnnnnnnnnnnnnnnnnnnnnnnnnnnnnnnnnnnnnnnnnnnnnnnnnnnnnnnnnnnnnnnnnnnnnnnnnnnnnnnnnnnnnnnnnnnnnnnnnnnnnnnnnnnnnnnnnnnnnnnnnnnnnnnnnnnnnnnnnnnnnnnnnnnnnnnnnnnnnnnnnnnnnnnnnnnnnnnnnnnnnnnnnnnnnnnnnnnnnnnnnnnnnnnnnnnnnnnnnnnnnnnnnnnnnnnnnnnnnnnnnnnnnnnnnnnnnnnnnnnnnnnnnnnnnnnnnnnnnnnnnnnnnnnnnnnnnnnnnnnnnnnnnnnnnnnnnnnnnnnnnnnnnnnnnnnnnnnnnnnnnnnnnnnnnnnnnnnnnnnnnnnnnnnnnnnnnnnnnnnnnnnnnnnnnnnnnnnnnnnnnnnnnnnnnnnnnnnnnnnnnnnnnnnnnnnnnnnnnnnnnnnnnnnnnnnnnnnnnnnnnnnnnnnnnnnnnnnnnnnnnnnnnnnnnnnnnnnnnnnnnnnnnnnnnnnnnnnnnnnnnnnnnnnnnnnnnnnnnnnnnnnnnnnnnnnnnnnnnnnnnnnnnnnnnnnnnnnnnnnnnnnnnnnnnnnnnnnnnnnnnnnnnnnnnnnnnnnnnnnnnnnnnnnnnnnnnnnnnnnnnnnnnnnnnnnnnnnnnnnnnnnnnnnnnnnnnnnnnnnnnnnnnnnnnnnnnnnnnnnnnnnnnnnnnnnnnnnnnnnnnnnnnnnnnnnnnnnnnnnnnnnnnnnnnnnnnnnnnnnnnnnnnnnnnnnnnnnnnnnnnnnnnnnnnnnnnnnnnnnnnnnnnnnnnnnnnnnnnnnnnnnnnnnnnnnnnnnnnnnnnnnnnnnnnnnnnnnnnnnnnnnnnnnnnnnnnnnnnnnnnnnnnnnnnnnnnnnnnnnnnnnnnnnnnnnnnnnnnnnnnnnnnnnnnnnnnnnnnnnnnnnnnnnnnnnnnnnnnnnnnnnnnnnnnnnnnnnnnnnnnnnnnnnnnnnnnnnnnnnnnnnnnnnnnnnnnnnnnnnnnnnnnnnnnnnnnnnnnnnnnnnnnnnnnnnnnnnnnnnnnnnnnnnnnnnnnnnnnnnnnnnnnnnnnnnnnnnnnnnnnnnnnnnnnnnnnnnnnnnnnnnnnnnnnnnnnnnnnnnnnnnnnnnnnnnnnnnnnnnnnnnnnnnnnnnnnnnnnnnnnnnnnnnnnnnnnnnnnnnnnnnnnnnnnnnnnnnnnnnnnnnnnnnnnnnnnnnnnnnnnnnnnnnnnnnnnnnnnnnnnnnnnnnnnnnnnnnnnnnnnnnnnnnnnnnnnnnnnnnnnnnnnnnnnnnnnnnnnnnnnnnnnnnnnnnnnnnnnnnnnnnnnnnnnnnnnnnnnnnnnnnnnnnnnnnnnnnnnnnnnnnnnnnnnnnnnnnnnnnnnnnnnnnnnnnnnnnnnnnnnnnnnnnnnnnnnnnnnnnnnnnnnnnnnnnnnnnnnnnnnnnnnnnnnnnnnnnnnnnnnnnnnnnnnnnnnnnnnnnnnnnnnnnnnnnnnnnnnnnnnnnnnnnnnnnnnnnnnnnnnnnnnnnnnnnnnnnnnnnnnnnnnnnnnnnnnnnnnnnnnnnnnnnnnnnnnnnnnnnnnnnnnnnnnnnnnnnnnnnnnnnnnnnnnnnnnnnnnnnnnnnnnnnnnnnnnnnnnnnnnnnnnnnnnnnnnnnnnnnnnnnnnnnnnnnnnnnnnnnnnnnnnnnnnnnnnnnnnnnnnnnnnnnnnnnnnnnnnnnnnnnnnnnnnnnnnnnnnnnnnnnnnnnnnnnnnnnnnnnnnnnnnnnnnnnnnnnnnnnnnnnnnnnnnnnnnnnnnnnnnnnnnnnnnnnnnnnnnnnnnnnnnnnnnnnnnnnnnnnnnnnnnnnnnnnnnnnnnnnnnnnnnnnnnnnnnnnnnnnnnnnnnnnnnnnnnnnnnnnnnnnnnnnnnnnnnnnnnnnnnnnnnnnnnnnnnnnnnnnnnnnnnnnnnnnnnnnnnnnnnnnnnnnnnnnnnnnnnnnnnnnnnnnnnnnnnnnnnnnnnnnnnnnnnnnnnnnnnnnnnnnnnnnnnnnnnnnnnnnnnnnnnnnnnnnnnnnnnnnnnnnnnnnnnnnnnnnnnnnnnnnnnnnnnnnnnnnnnnnnnnnnnnnnnnnnnnnnnnnnnnnnnnnnnnnnnnnnnnnnnnnnnnnnnnnnnnnnnnnnnnnnnnnnnnnnnnnnnnnnnnnnnnnnnnnnnnnnnnnnnnnnnnnnnnnnnnnnnnnnnnnnnnnnnnnnnnnnnnnnnnnnnnnnnnnnnnnnnnnnnnnnnnnnnnnnnnnnnnnnnnnnnnnnnnnnnnnnnnnnnnnnnnnnnnnnnnnnnnnnnnnnnnnnnnnnnnnnnnnnnnnnnnnnnnnnnnnnnnnnnnnnnnnnnnnnnnnnnnnnnnnnnnnnnnnnnnnnnnnnnnnnnnnnnnnnnnnnnnnnnnnnnnnnnnnnnnnnnnnnnnnnnnnnnnnnnnnnnnnnnnnnnnnnnnnnnnnnnnnnnnnnnnnnnnnnnnnnnnnnnnnnnnnnnnnnnnnnnnnnnnnnnnnnnnnnnnnnnnnnnnnnnnnnnnnnnnnnnnnnnnnnnnnnnnnnnnnnnnnnnnnnnnnnnnnnnnnnnnnnnnnnnnnnnnnnnnnnnnnnnnnnnnnnnnnnnnnnnnnnnnnnnnnnnnnnnnnnnnnnnnnnnnnnnnnnnnnnnnnnnnnnnnnnnnnnnnnnnnnnnnnnnnnnnnnnnnnnnnnnnnnnnnnnnnnnnnnnnnnnnnnnnnnnnnnnnnnnnnnnnnnnnnnnnnnnnnnnnnnnnnnnnnnnnnnnnnnnnnnnnnnnnnnnnnnnnnnnnnnnnnnnnnnnnnnnnnnnnnnnnnnnnnnnnnnnnnnnnnnnnnnnnnnnnnnnnnnnnnnnnnnnnnnnnnnnnnnnnnnnnnnnnnnnnnnnnnnnnnnnnnnnnnnnnnnnnnnnnnnnnnnnnnnnnnnnnnnnnnnnnnnnnnnnnnnnnnnnnnnnnnnnnnnnnnnnnnnnnnnnnnnnnnnnnnnnnnnnnnnnnnnnnnnnnnnnnnnnnnnnnnnnnnnnnnnnnnnnnnnnnnnnnnnnnnnnnnnnnnnnnnnnnnnnnnnnnnnnnnnnnnnnnnnnnnnnnnnnnnnnnnnnnnnnnnnnnnnnnnnnnnnnnnnnnnnnnnnnnnnnnnnnnnnnnnnnnnnnnnnnnnnnnnnnnnnnnnnnnnnnnnnnnnnnnnnnnnnnnnnnnnnnnnnnnnnnnnnnnnnnnnnnnnnnnnnnnnnnnnnnnnnnnnnnnnnnnnnnnnnnnnnnnnnnnnnnnnnnnnnnnnnnnnnnnnnnnnnnnnnnnnnnnnnnnnnnnnnnnnnnnnnnnnnnnnnnnnnnnnnnnnnnnnnnnnnnnnnnnnnnnnnnnnnnnnnnnnnnnnnnnnnnnnnnnnnnnnnnnnnnnnnnnnnnnnnnnnnnnnnnnnnnnnnnnnnnnnnnnnnnnnnnnnnnnnnnnnnnnnnnnnnnnnnnnnnnnnnnnnnnnnnnnnnnnnnnnnnnnnnnnnnnnnnnnnnnnnnnnnnnnnnnnnnnnnnnnnnnnnnnnnnnnnnnnnnnnnnnnnnnnnnnnnnnnnnnnnnnnnnnnnnnnnnnnnnnnnnnnnnnnnnnnnnnnnnnnnnnnnnnnnnnnnnnnnnnnnnnnnnnnnnnnnnnnnnnnnnnnnnnnnnnnnnnnnnnnnnnnnnnnnnnnnnnnnnnnnnnnnnnnnnnnnnnnnnnnnnnnnnnnnnnnnnnnnnnnnnnnnnnnnnnnnnnnnnnnnnnnnnnnnnnnnnnnnnnnnnnnnnnnnnnnnnnnnnnnnnnnnnnnnnnnnnnnnnnnnnnnnnnnnnnnnnnnnnnnnnnnnnnnnnnnnnnnnnnnnnnnnnnnnnnnnnnnnnnnnnnnnnnnnnnnnnnnnnnnnnnnnnnnnnnnnnnnnnnnnnnnnnnnnnnnnnnnnnnnnnnnnnnnnnnnnnnnnnnnnnnnnnnnnnnnnnnnnnnnnnnnnnnnnnnnnnnnnnnnnnnnnnnnnnnnnnnnnnnnnnnnnnnnnnnnnnnnnnnnnnnnnnnnnnnnnnnnnnnnnnnnnnnnnnnnnnnnnnnnnnnnnnnnnnnnnnnnnnnnnnnnnnnnnnnnnnnnnnnnnnnnnnnnnnnnnnnnnnnnnnnnnnnnnnnnnnnnnnnnnnnnnnnnnnnnnnnnnnnnnnnnnnnnnnnnnnnnnnnnnnnnnnnnnnnnnnnnnnnnnnnnnnnnnnnnnnnnnnnnnnnnnnnnnnnnnnnnnnnnnnnnnnnnnnnnnnnnnnnnnnnnnnnnnnnnnnnnnnnnnnnnnnnnnnnnnnnnnnnnnnnnnnnnnnnnnnnnnnnnnnnnnnnnnnnnnnnnnnnnnnnnnnnnnnnnnnnnnnnnnnnnnnnnnnnnnnnnnnnnnnnnnnnnnnnnnnnnnnnnnnnnnnnnnnnnnnnnnnnnnnnnnnnnnnnnnnnnnnnnnnnnnnnnnnnnnnnnnnnnnnnnnnnnnnnnnnnnnnnnnnnnnnnnnnnnnnnnnnnnnnnnnnnnnnnnnnnnnnnnnnnnnnnnnnnnnnnnnnnnnnnnnnnnnnnnnnnnnnnnnnnnnnnnnnnnnnnnnnnnnnnnnnnnnnnnnnnnnnnnnnnnnnnnnnnnnnnnnnnnnnnnnnnnnnnnnnnnnnnnnnnnnnnnnnnnnnnnnnnnnnnnnnnnnnnnnnnnnnnnnnnnnnnnnnnnnnnnnnnnnnnnnnnnnnnnnnnnnnnnnnnnnnnnnnnnnnnnnnnnnnnnnnnnnnnnnnnnnnnnnnnnnnnnnnnnnnnnnnnnnnnnnnnnnnnnnnnnnnnnnnnnnnnnnnnnnnnnnnnnnnnnnnnnnnnnnnnnnnnnnnnnnnnnnnnnnnnnnnnnnnnnnnnnnnnnnnnnnnnnnnnnnnnnnnnnnnnnnnnnnnnnnnnnnnnnnnnnnnnnnnnnnnnnnnnnnnnnnnnnnnnnnnnnnnnnnnnnnnnnnnnnnnnnnnnnnnnnnnnnnnnnnnnnnnnnnnnnnnnnnnnnnnnnnnnnnnnnnnnnnnnnnnnnnnnnnnnnnnnnnnnnnnnnnnnnnnnnnnnnnnnnnnnnnnnnnnnnnnnnnnnnnnnnnnnnnnnnnnnnnnnnnnnnnnnnnnnnnnnnnnnnnnnnnnnnnnnnnnnnnnnnnnnnnnnnnnnnnnnnnnnnnnnnnnnnnnnnnnnnnnnnnnnnnnnnnnnnnnnnnnnnnnnnnnnnnnnnnnnnnnnnnnnnnnnnnnnnnnnnnnnnnnnnnnnnnnnnnnnnnnnnnnnnnnnnnnnnnnnnnnnnnnnnnnnnnnnnnnnnnnnnnnnnnnnnnnnnnnnnnnnnnnnnnnnnnnnnnnnnnnnnnnnnnnnnnnnnnnnnnnnnnnnnnnnnnnnnnnnnnnnnnnnnnnnnnnnnnnnnnnnnnnnnnnnnnnnnnnnnnnnnnnnnnnnnnnnnnnnnnnnnnnnnnnnnnnnnnnnnnnnnnnnnnnnnnnnnnnnnnnnnnnnnnnnnnnnnnnnnnnnnnnnnnnnnnnnnnnnnnnnnnnnnnnnnnnnnnnnnnnnnnnnnnnnnnnnnnnnnnnnnnnnnnnnnnnnnnnnnnnnnnnnnnnnnnnnnnnnnnnnnnnnnnnnnnnnnnnnnnnnnnnnnnnnnnnnnnnnnnnnnnnnnnnnnnnnnnnnnnnnnnnnnnnnnnnnnnnnnnnnnnnnnnnnnnnnnnnnnnnnnnnnnnnnnnnnnnnnnnnnnnnnnnnnnnnnnnnnnnnnnnnnnnnnnnnnnnnnnnnnnnnnnnnnnnnnnnnnnnnnnnnnnnnnnnnnnnnnnnnnnnnnnnnnnnnnnnnnnnnnnnnnnnnnnnnnnnnnnnnnnnnnnnnnnnnnnnnnnnnnnnnnnnnnnnnnnnnnnnnnnnnnnnnnnnnnnnnnnnnnnnnnnnnnnnnnnnnnnnnnnnnnnnnnnnnnnnnnnnnnnnnnnnnnnnnnnnnnnnnnnnnnnnnnnnnnnnnnnnnnnnnnnnnnnnnnnnnnnnnnnnnnnnnnnnnnnnnnnnnnnnnnnnnnnnnnnnnnnnnnnnnnnnnnnnnnnnnnnnnnnnnnnnnnnnnnnnnnnnnnnnnnnnnnnnnnnnnnnnnnnnnnnnnnnnnnnnnnnnnnnnnnnnnnnnnnnnnnnnnnnnnnnnnnnnnnnnnnnnnnnnnnnnnnnnnnnnnnnnnnnnnnnnnnnnnnnnnnnnnnnnnnnnnnnnnnnnnnnnnnnnnnnnnnnnnnnnnnnnnnnnnnnnnnnnnnnnnnnnnnnnnnnnnnnnnnnnnnnnnnnnnnnnnnnnnnnnnnnnnnnnnnnnnnnnnnnnnnnnnnnnnnnnnnnnnnnnnnnnnnnnnnnnnnnnnnnnnnnnnnnnnnnnnnnnnnnnnnnnnnnnnnnnnnnnnnnnnnnnnnnnnnnnnnnnnnnnnnnnnnnnnnnnnnnnnnnnnnnnnnnnnnnnnnnnnnnnnnnnnnnnnnnnnnnnnnnnnnnnnnnnnnnnnnnnnnnnnnnnnnnnnnnnnnnnnnnnnnnnnnnnnnnnnnnnnnnnnnnnnnnnnnnnnnnnnnnnnnnnnnnnnnnnnnnnnnnnnnnnnnnnnnnnnnnnnnnnnnnnnnnnnnnnnnnnnnnnnnnnnnnnnnnnnnnnnnnnnnnnnnnnnnnnnnnnnnnnnnnnnnnnnnnnnnnnnnnnnnnnnnnnnnnnnnnnnnnnnnnnnnnnnnnnnnnnnnnnnnnnnnnnnnnnnnnnnnnnnnnnnnnnnnnnnnnnnnnnnnnnnnnnnnnnnnnnnnnnnnnnnnnnnnnnnnnnnnnnnnnnnnnnnnnnnnnnnnnnnnnnnnnnnnnnnnnnnnnnnnnnnnnnnnnnnnnnnnnnnnnnnnnnnnnnnnnnnnnnnnnnnnnnnnnnnnnnnnnnnnnnnnnnnnnnnnnnnnnnnnnnnnnnnnnnnnnnnnnnnnnnnnnnnnnnnnnnnnnnnnnnnnnnnnnnnnnnnnnnnnnnnnnnnnnnnnnnnnnnnnnnnnnnnnnnnnnnnnnnnnnnnnnnnnnnnnnnnnnnnnnnnnnnnnnnnnnnnnnnnnnnnnnnnnnnnnnnnnnnnnnnnnnnnnnnnnnnnnnnnnnnnnnnnnnnnnnnnnnnnnnnnnnnnnnnnnnnnnnnnnnnnnnnnnnnnnnnnnnnnnnnnnnnnnnnnnnnnnnnnnnnnnnnnnnnnnnnnnnnnnnnnnnnnnnnnnnnnnnnnnnnnnnnnnnnnnnnnnnnnnnnnnnnnnnnnnnnnnnnnnnnnnnnnnnnnnnnnnnnnnnnnnnnnnnnnnnnnnnnnnnnnnnnnnnnnnnnnnnnnnnnnnnnnnnnnnnnnnnnnnnnnnnnnnnnnnnnnnnnnnnnnnnnnnnnnnnnnnnnnnnnnnnnnnnnnnnnnnnnnnnnnnnnnnnnnnnnnnnnnnnnnnnnnnnnnnnnnnnnnnnnnnnnnnnnnnnnnnnnnnnnnnnnnnnnnnnnnnnnnnnnnnnnnnnnnnnnnnnnnnnnnnnnnnnnnnnnnnnnnnnnnnnnnnnnnnnnnnnnnnnnnnnnnnnnnnnnnnnnnnnnnnnnnnnnnnnnnnnnnnnnnnnnnnnnnnnnnnnnnnnnnnnnnnnnnnnnnnnnnnnnnnnnnnnnnnnnnnnnnnnnnnnnnnnnnnnnnnnnnnnnnnnnnnnnnnnnnnnnnnnnnnnnnnnnnnnnnnnnnnnnnnnnnnnnnnnnnnnnnnnnnnnnnnnnnnnnnnnnnnnnnnnnnnnnnnnnnnnnnnnnnnnnnnnnnnnnnnnnnnnnnnnnnnnnnnnnnnnnnnnnnnnnnnnnnnnnnnnnnnnnnnnnnnnnnnnnnnnnnnnnnnnnnnnnnnnnnnnnnnnnnnnnnnnnnnnnnnnnnnnnnnnnnnnnnnnnnnnnnnnnnnnnnnnnnnnnnnnnnnnnnnnnnnnnnnnnnnnnnnnnnnnnnnnnnnnnnnnnnnnnnnnnnnnnnnnnnnnnnnnnnnnnnnnnnnnnnnnnnnnnnnnnnnnnnnnnnnnnnnnnnnnnnnnnnnnnnnnnnnnnnnnnnnnnnnnnnnnnnnnnnnnnnnnnnnnnnnnnnnnnnnnnnnnnnnnnnnnnnnnnnnnnnnnnnnnnnnnnnnnnnnnnnnnnnnnnnnnnnnnnnnnnnnnnnnnnnnnnnnnnnnnnnnnnnnnnnnnnnnnnnnnnnnnnnnnnnnnnnnnnnnnnnnnnnnnnnnnnnnnnnnnnnnnnnnnnnnnnnnnnnnnnnnnnnnnnnnnnnnnnnnnnnnnnnnnnnnnnnnnnnnnnnnnnnnnnnnnnnnnnnnnnnnnnnnnnnnnnnnnnnnnnnnnnnnnnnnnnnnnnnnnnnnnnnnnnnnnnnnnnnnnnnnnnnnnnnnnnnnnnnnnnnnnnnnnnnnnnnnnnnnnnnnnnnnnnnnnnnnnnnnnnnnnnnnnnnnnnnnnnnnnnnnnnnnnnnnnnnnnnnnnnnnnnnnnnnnnnnnnnnnnnnnnnnnnnnnnnnnnnnnnnnnnnnnnnnnnnnnnnnnnnnnnnnnnnnnnnnnnnnnnnnnnnnnnnnnnnnnnnnnnnnnnnnnnnnnnnnnnnnnnnnnnnnnnnnnnnnnnnnnnnnnnnnnnnnnnnnnnnnnnnnnnnnnnnnnnnnnnnnnnnnnnnnnnnnnnnnnnnnnnnnnnnnnnnnnnnnnnnnnnnnnnnnnnnnnnnnnnnnnnnnnnnnnnnnnnnnnnnnnnnnnnnnnnnnnnnnnnnnnnnnnnnnnnnnnnnnnnnnnnnnnnnnnnnnnnnnnnnnnnnnnnnnnnnnnnnnnnnnnnnnnnnnnnnnnnnnnnnnnnnnnnnnnnnnnnnnnnnnnnnnnnnnnnnnnnnnnnnnnnnnnnnnnnnnnnnnnnnnnnnnnnnnnnnnnnnnnnnnnnnnnnnnnnnnnnnnnnnnnnnnnnnnnnnnnnnnnnnnnnnnnnnnnnnnnnnnnnnnnnnnnnnnnnnnnnnnnnnnnnnnnnnnnnnnnnnnnnnnnnnnnnnnnnnnnnnnnnnnnnnnnnnnnnnnnnnnnnnnnnnnnnnnnnnnnnnnnnnnnnnnnnnnnnnnnnnnnnnnnnnnnnnnnnnnnnnnnnnnnnnnnnnnnnnnnnnnnnnnnnnnnnnnnnnnnnnnnnnnnnnnnnnnnnnnnnnnnnnnnnnnnnnnnnnnnnnnnnnnnnnnnnnnnnnnnnnnnnnnnnnnnnnnnnnnnnnnnnnnnnnnnnnnnnnnnnnnnnnnnnnnnnnnnnnnnnnnnnnnnnnnnnnnnnnnnnnnnnnnnnnnnnnnnnnnnnnnnnnnnnnnnnnnnnnnnnnnnnnnnnnnnnnnnnnnnnnnnnnnnnnnnnnnnnnnnnnnnnnnnnnnnnnnnnnnnnnnnnnnnnnnnnnnnnnnnnnnnnnnnnnnnnnnnnnnnnnnnnnnnnnnnnnnnnnnnnnnnnnnnnnnnnnnnnnnnnnnnnnnnnnnnnnnnnnnnnnnnnnnnnnnnnnnnnnnnnnnnnnnnnnnnnnnnnnnnnnnnnnnnnnnnnnnnnnnnnnnnnnnnnnnnnnnnnnnnnnnnnnnnnnnnnnnnnnnnnnnnnnnnnnnnnnnnnnnnnnnnnnnnnnnnnnnnnnnnnnnnnnnnnnnnnnnnnnnnnnnnnnnnnnnnnnnnnnnnnnnnnnnnnnnnnnnnnnnnnnnnnnnnnnnnnnnnnnnnnnnnnnnnnnnnnnnnnnnnnnnnnnnnnnnnnnnnnnnnnnnnnnnnnnnnnnnnnnnnnnnnnnnnnnnnnnnnnnnnnnnnnnnnnnnnnnnnnnnnnnnnnnnnnnnnnnnnnnnnnnnnnnnnnnnnnnnnnnnnnnnnnnnnnnnnnnnnnnnnnnnnnnnnnnnnnnnnnnnnnnnnnnnnnnnnnnnnnnnnnnnnnnnnnnnnnnnnnnnnnnnnnnnnnnnnnnnnnnnnnnnnnnnnnnnnnnnnnnnnnnnnnnnnnnnnnnnnnnnnnnnnnnnnnnnnnnnnnnnnnnnnnnnnnnnnnnnnnnnnnnnnnnnnnnnnnnnnnnnnnnnnnnnnnnnnnnnnnnnnnnnnnnnnnnnnnnnnnnnnnnnnnnnnnnnnnnnnnnnnnnnnnnnnnnnnnnnnnnnnnnnnnnnnnnnnnnnnnnnnnnnnnnnnnnnnnnnnnnnnnnnnnnnnnnnnnnnnnnnnnnnnnnnnnnnnnnnnnnnnnnnnnnnnnnnnnnnnnnnnnnnnnnnnnnnnnnnnnnnnnnnnnnnnnnnnnnnnnnnnnnnnnnnnnnnnnnnnnnnnnnnnnnnnnnnnnnnnnnnnnnnnnnnnnnnnnnnnnnnnnnnnnnnnnnnnnnnnnnnnnnnnnnnnnnnnnnnnnnnnnnnnnnnnnnnnnnnnnnnnnnnnnnnnnnnnnnnnnnnnnnnnnnnnnnnnnnnnnnnnnnnnnnnnnnnnnnnnnnnnnnnnnnnnnnnnnnnnnnnnnnnnnnnnnnnnnnnnnnnnnnnnnnnnnnnnnnnnnnnnnnnnnnnnnnnnnnnnnnnnnnnnnnnnnnnnnnnnnnnnnnnnnnnnnnnnnnnnnnnnnnnnnnnnnnnnnnnnnnnnnnnnnnnnnnnnnnnnnnnnnnnnnnnnnnnnnnnnnnnnnnnnnnnnnnnnnnnnnnnnnnnnnnnnnnnnnnnnnnnnnnnnnnnnnnnnnnnnnnnnnnnnnnnnnnnnnnnnnnnnnnnnnnnnnnnnnnnnnnnnnnnnnnnnnnnnnnnnnnnnnnnnnnnnnnnnnnnnnnnnnnnnnnnnnnnnnnnnnnnnnnnnnnnnnnnnnnnnnnnnnnnnnnnnnnnnnnnnnnnnnnnnnnnnnnnnnnnnnnnnnnnnnnnnnnnnnnnnnnnnnnnnnnnnnnnnnnnnnnnnnnnnnnnnnnnnnnnnnnnnnnnnnnnnnnnnnnnnnnnnnnnnnnnnnnnnnnnnnnnnnnnnnnnnnnnnnnnnnnnnnnnnnnnnnnnnnnnnnnnnnnnnnnnnnnnnnnnnnnnnnnnnnnnnnnnnnnnnnnnnnnnnnnnnnnnnnnnnnnnnnnnnnnnnnnnnnnnnnnnnnnnnnnnnnnnnnnnnnnnnnnnnnnnnnnnnnnnnnnnnnnnnnnnnnnnnnnnnnnnnnnnnnnnnnnnnnnnnnnnnnnnnnnnnnnnnnnnnnnnnnnnnnnnnnnnnnnnnnnnnnnnnnnnnnnnnnnnnnnnnnnnnnnnnnnnnnnnnnnnnnnnnnnnnnnnnnnnnnnnnnnnnnnnnnnnnnnnnnnnnnnnnnnnnnnnnnnnnnnnnnnnnnnnnnnnnnnnnnnnnnnnnnnnnnnnnnnnnnnnnnnnnnnnnnnnnnnnnnnnnnnnnnnnnnnnnnnnnnnnnnnnnnnnnnnnnnnnnnnnnnnnnnnnnnnnnnnnnnnnnnnnnnnnnnnnnnnnnnnnnnnnnnnnnnnnnnnnnnnnnnnnnnnnnnnnnnnnnnnnnnnnnnnnnnnnnnnnnnnnnnnnnnnnnnnnnnnnnnnnnnnnnnnnnnnnnnnnnnnnnnnnnnnnnnnnnnnnnnnnnnnnnnnnnnnnnnnnnnnnnnnnnnnnnnnnnnnnnnnnnnnnnnnnnnnnnnnnnnnnnnnnnnnnnnnnnnnnnnnnnnnnnnnnnnnnnnnnnnnnnnnnnnnnnnnnnnnnnnnnnnnnnnnnnnnnnnnnnnnnnnnnnnnnnnnnnnnnnnnnnnnnnnnnnnnnnnnnnnnnnnnnnnnnnnnnnnnnnnnnnnnnnnnnnnnnnnnnnnnnnnnnnnnnnnnnnnnnnnnnnnnnnnnnnnnnnnnnnnnnnnnnnnnnnnnnnnnnnnnnnnnnnnnnnnnnnnnnnnnnnnnnnnnnnnnnnnnnnnnnnnnnnnnnnnnnnnnnnnnnnnnnnnnnnnnnnnnnnnnnnnnnnnnnnnnnnnnnnnnnnnnnnnnnnnnnnnnnnnnnnnnnnnnnnnnnnnnnnnnnnnnnnnnnnnnnnnnnnnnnnnnnnnnnnnnnnnnnnnnnnnnnnnnnnnnnnnnnnnnnnnnnnnnnnnnnnnnnnnnnnnnnnnnnnnnnnnnnnnnnnnnnnnnnnnnnnnnnnnnnnnnnnnnnnnnnnnnnnnnnnnnnnnnnnnnnnnnnnnnnnnnnnnnnnnnnnnnnnnnnnnnnnnnnnnnnnnnnnnnnnnnnnnnnnnnnnnnnnnnnnnnnnnnnnnnnnnnnnnnnnnnnnnnnnnnnnnnnnnnnnnnnnnnnnnnnnnnnnnnnnnnnnnnnnnnnnnnnnnnnnnnnnnnnnnnnnnnnnnnnnnnnnnnnnnnnnnnnnnnnnnnnnnnnnnnnnnnnnnnnnnnnnnnnnnnnnnnnnnnnnnnnnnnnnnnnnnnnnnnnnnnnnnnnnnnnnnnnnnnnnnnnnnnnnnnnnnnnnnnnnnnnnnnnnnnnnnnnnnnnnnnnnnnnnnnnnnnnnnnnnnnnnnnnnnnnnnnnnnnnnnnnnnnnnnnnnnnnnnnnnnnnnnnnnnnnnnnnnnnnnnnnnnnnnnnnnnnnnnnnnnnnnnnnnnnnnnnnnnnnnnnnnnnnnnnnnnnnnnnnnnnnnnnnnnnnnnnnnnnnnnnnnnnnnnnnnnnnnnnnnnnnnnnnnnnnnnnnnnnnnnnnnnnnnnnnnnnnnnnnnnnnnnnnnnnnnnnnnnnnnnnnnnnnnnnnnnnnnnnnnnnnnnnnnnnnnnnnnnnnnnnnnnnnnnnnnnnnnnnnnnnnnnnnnnnnnnnnnnnnnnnnnnnnnnnnnnnnnnnnnnnnnnnnnnnnnnnnnnnnnnnnnnnnnnnnnnnnnnnnnnnnnnnnnnnnnnnnnnnnnnnnnnnnnnnnnnnnnnnnnnnnnnnnnnnnnnnnnnnnnnnnnnnnnnnnnnnnnnnnnnnnnnnnnnnnnnnnnnnnnnnnnnnnnnnnnnnnnnnnnnnnnnnnnnnnnnnnnnnnnnnnnnnnnnnnnnnnnnnnnnnnnnnnnnnnnnnnnnnnnnnnnnnnnnnnnnnnnnnnnnnnnnnnnnnnnnnnnnnnnnnnnnnnnnnnnnnnnnnnnnnnnnnnnnnnnnnnnnnnnnnnnnnnnnnnnnnnnnnnnnnnnnnnnnnnnnnnnnnnnnnnnnnnnnnnnnnnnnnnnnnnnnnnnnnnnnnnnnnnnnnnnnnnnnnnnnnnnnnnnnnnnnnnnnnnnnnnnnnnnnnnnnnnnnnnnnnnnnnnnnnnnnnnnnnnnnnnnnnnnnnnnnnnnnnnnnnnnnnnnnnnnnnnnnnnnnnnnnnnnnnnnnnnnnnnnnnnnnnnnnnnnnnnnnnnnnnnnnnnnnnnnnnnnnnnnnnnnnnnnnnnnnnnnnnnnnnnnnnnnnnnnnnnnnnnnnnnnnnnnnnnnnnnnnnnnnnnnnnnnnnnnnnnnnnnnnnnnnnnnnnnnnnnnnnnnnnnnnnnnnnnnnnnnnnnnnnnnnnnnnnnnnnnnnnnnnnnnnnnnnnnnnnnnnnnnnnnnnnnnnnnnnnnnnnnnnnnnnnnnnnnnnnnnnnnnnnnnnnnnnnnnnnnnnnnnnnnnnnnnnnnnnnnnnnnnnnnnnnnnnnnnnnnnnnnnnnnnnnnnnnnnnnnnnnnnnnnnnnnnnnnnnnnnnnnnnnnnnnnnnnnnnnnnnnnnnnnnnnnnnnnnnnnnnnnnnnnnnnnnnnnnnnnnnnnnnnnnnnnnnnnnnnnnnnnnnnnnnnnnnnnnnnnnnnnnnnnnnnnnnnnnnnnnnnnnnnnnnnnnnnnnnnnnnnnnnnnnnnnnnnnnnnnnnnnnnnnnnnnnnnnnnnnnnnnnnnnnnnnnnnnnnnnnnnnnnnnnnnnnnnnnnnnnnnnnnnnnnnnnnnnnnnnnnnnnnnnnnnnnnnnnnnnnnnnnnnnnnnnnnnnnnnnnnnnnnnnnnnnnnnnnnnnnnnnnnnnnnnnnnnnnnnnnnnnnnnnnnnnnnnnnnnnnnnnnnnnnnnnnnnnnnnnnnnnnnnnnnnnnnnnnnnnnnnnnnnnnnnnnnnnnnnnnnnnnnnnnnnnnnnnnnnnnnnnnnnnnnnnnnnnnnnnnnnnnnnnnnnnnnnnnnnnnnnnnnnnnnnnnnnnnnnnnnnnnnnnnnnnnnnnnnnnnnnnnnnnnnnnnnnnnnnnnnnnnnnnnnnnnnnnnnnnnnnnnnnnnnnnnnnnnnnnnnnnnnnnnnnnnnnnnnnnnnnnnnnnnnnnnnnnnnnnnnnnnnnnnnnnnnnnnnnnnnnnnnnnnnnnnnnnnnnnnnnnnnnnnnnnnnnnnnnnnnnnnnnnnnnnnnnnnnnnnnnnnnnnnnnnnnnnnnnnnnnnnnnnnnnnnnnnnnnnnnnnnnnnnnnnnnnnnnnnnnnnnnnnnnnnnnnnnnnnnnnnnnnnnnnnnnnnnnnnnnnnnnnnnnnnnnnnnnnnnnnnnnnnnnnnnnnnnnnnnnnnnnnnnnnnnnnnnnnnnnnnnnnnnnnnnnnnnnnnnnnnnnnnnnnnnnnnnnnnnnnnnnnnnnnnnnnnnnnnnnnnnnnnnnnnnnnnnnnnnnnnnnnnnnnnnnnnnnnnnnnnnnnnnnnnnnnnnnnnnnnnnnnnnnnnnnnnnnnnnnnnnnnnnnnnnnnnnnnnnnnnnnnnnnnnnnnnnnnnnnnnnnnnnnnnnnnnnnnnnnnnnnnnnnnnnnnnnnnnnnnnnnnnnnnnnnnnnnnnnnnnnnnnnnnnnnnnnnnnnnnnnnnnnnnnnnnnnnnnnnnnnnnnnnnnnnnnnnnnnnnnnnnnnnnnnnnnnnnnnnnnnnnnnnnnnnnnnnnnnnnnnnnnnnnnnnnnnnnnnnnnnnnnnnnnnnnnnnnnnnnnnnnnnnnnnnnnnnnnnnnnnnnnnnnnnnnnnnnnnnnnnnnnnnnnnnnnnnnnnnnnnnnnnnnnnnnnnnnnnnnnnnnnnnnnnnnnnnnnnnnnnnnnnnnnnnnnnnnnnnnnnnnnnnnnnnnnnnnnnnnnnnnnnnnnnnnnnnnnnnnnnnnnnnnnnnnnnnnnnnnnnnnnnnnnnnnnnnnnnnnnnnnnnnnnnnnnnnnnnnnnnnnnnnnnnnnnnnnnnnnnnnnnnnnnnnnnnnnnnnnnnnnnnnnnnnnnnnnnnnnnnnnnnnnnnnnnnnnnnnnnnnnnnnnnnnnnnnnnnnnnnnnnnnnnnnnnnnnnnnnnnnnnnnnnnnnnnnnnnnnnnnnnnnnnnnnnnnnnnnnnnnnnnnnnnnnnnnnnnnnnnnnnnnnnnnnnnnnnnnnnnnnnnnnnnnnnnnnnnnnnnnnnnnnnnnnnnnnnnnnnnnnnnnnnnnnnnnnnnnnnnnnnnnnnnnnnnnnnnnnnnnnnnnnnnnnnnnnnnnnnnnnnnnnnnnnnnnnnnnnnnnnnnnnnnnnnnnnnnnnnnnnnnnnnnnnnnnnnnnnnnnnnnnnnnnnnnnnnnnnnnnnnnnnnnnnnnnnnnnnnnnnnnnnnnnnnnnnnnnnnnnnnnnnnnnnnnnnnnnnnnnnnnnnnnnnnnnnnnnnnnnnnnnnnnnnnnnnnnnnnnnnnnnnnnnnnnnnnnnnnnnnnnnnnnnnnnnnnnnnnnnnnncatatagtagatgcaagaatcgttccgaatctgccacaataactgcggattcctttcccaaagcctttttcgcccacggacaggccgtttgccccttcccactaacatcccgtaaacctccccttaaattcccgcccggccaatgggaactcagcgggaagtattttagatgtgtatgggatggggcaaatggggcttctattgatagtgggtatcaaaatgggaggaagtccacaaattgcgcgaattcatacgaattgcttttccagttacgctaccaactgtggtagataacctaaaataaaggacttacttcccaatcgggcaagtaatccatatgtttggagcccgaaggtcccagaacgattggccgacggggacatcgaccttcctgacgctggcgtcgagcgaggcacgagcatggacgccagcaacatctcctgtagtccatactcgcaagctcgctgcactccaggctcaccaacgttggaaggcaaattcacaaattcacaaccggtaaatatggcttgtgaatttgcaacctgctgatagacgggtaattatgaggctaattcacaaaaaaggggtctcttatacatccgcggaagccgattgtaaacaggatatgatgtatccacgctaccagtctataatacatatagaaatagtatatataatatataatagtattatatattattatatattgatattatatcatctctaccttcccttcatctcttgtttgcggcatgagccactgcaaaccggcattctcccctggtccggctggatataagagataagcgtattttgtgaatttgtcccccaactcactgtgccacaataacacacggattcacaagccatatttaccggttgtgaatttgtgaatctgaccttgccggccttaaggaagtttgaaattagagccctattttggacttgacaaattattccttggtaaatttggtgtataatagctatggggcataatgatgttagcctgtggaacggcctctgtaaaggatcaacaagctatcaaccctccccatgcgacaggagcttcaatgtattataatttgacagacaaaccctggatcagtgtgctacagcttgacgggcattctgccaggctcggcctggctgaggtcctgcgaaaagcacacacactgcgtttggcttacggcaatccgatggaccgcatgtccgttttccgtttcctcctcgccctgggctattggtgttttgccaatacaaaacaagcgccggtatcagataagccactgcctcaggcatggacggactggcttgaacaaaaccaagaatatttcgaattgttcggtgatggccccagattctaccaatccccaggaacatccagaatacgccccagcacggaccttatccacgagcttcccacggcaaacaatttctggcacttccgccatgtgaccgatttcatcgatggcatttgcccagcttgctgcgttaccggtctgctgcgcctgccactctttaccaccgtaggcggcagcggaatcggagccggcatcaacagaactcctcccttctatgccatctggcagggtgatagtctgtcggaatcgatattcctgaattgggaacccacttcccggttgggtgttcctgcctggctgaacccgtttggatcccaaaacgagaaggatgtagccttgctgactggcctcacctggctgccccgcaaggtattcctgcttggcccggtgtcagacggagcaaaatgcagcgcctgcggagaagagcatgagcctctggtctatgcctgcaacaatgaggcggtgaaagtgcctccgaaccttgtctggaacgaccctcacgcgatttaccgggatgacaataatggcctgactgcccaggtggctctgatgtccggggacaaatacactttcgctaacagggattggcataaacccctggtcggcttcttacgggcgaaaggcatgtctcggaccgccacgctgtttttagtgggcttcacaagcgttcaagccaaatgtgtggacgtttgggaaaagaccattgccctatccggaaaaacaagctccgaggaactgctggaccagatatccgaaagagcctactccctgcacaggatgaggaaacaagaccgccggggcgattacaaggaatccgtgggaatcaccgccgtggcggacatcatcccgcacgtagagcatcgggttgacgtccattcgggcgagatggtggaaaacagcggcaatgtctggcaggaagcggatgaagattacggattcttcatgaagcgttttgccgtttctctagtgccggaaattacggttgccgccaagcttgaacgagaacaactggctcggcgcaagccctggcccctaaaaccaaaatcaattaaaaaaccttcatccggaggcgataatgaatgagagcaccgtgaaatttgttcggagcctgggcgaactcaaagagggcgacctgggcttgctcagaaagctcaggggtcgccgtctggatgaatccctgccgggtttcgacctgttttccggcctgtggtggccactccgcagtataagccccaaaacccccaggcggaaggtggtctggctagtcaccaagcttttcgcggaattccgctttgagcaaaagaaaggcgccagcctgccttggctcatgggcagaatatgccgtggacttaaagaagaaaaagagttcccacgtgttttagccaggttcgaccgcttgctcacgctcgagttgaaccaactggaggaaccgctggcgcaagtgctcgcgattttaaaaagacatgacattgccagtctggactgggttgccctcatcgatgacctctccgcttgggaacgggaatcaaacagagcgatatggtcagacacatttatttcagcatttaataatcagcaaggaggaatcaaatgttgattgaaatacacatgatccaaaaccacagcccggccaacctgaaccgggacgacctgggcgcgcccaagacctgttatttcggtggggtgttgcggtcccgcatctccagccagtgcctaaagcggagcatcaggatgagcgatgaattcaaaaacttgctcgggggtatccgtacccgtcggttggccgagttgattacaaaagctacaggacaggactgcaggaatcaggcagaggaagttctgaacaaagccggtttgaaacacgaaaacggacatagtaagatgctggtgttcatgacccggaacaagatcgatgcccttgctcaaattgtcaccagcgaaggcctgagtgttgcagagaaagccaagaaagcggcagatgtaatatcgggggcaatacattcccctgacatcgctctgtgcggaagaatgctcgagcccgataccaaggacaagaacacagacaaggtcaagtgggaaaataccactgttgaagcagccctgcaggtgtcgcacgccatttcaacccacatcgcccgcccagaaatagattactatgtagcagctgatgacgagcctggcgacgacacaggtgctggattcatagacgaggcgatgtttgcttcggcctgtttctacaaatattactcaattgattggaataccttgataatcaacctccagggtaatgaaaagttggcagctcatactgtcggagcctttatccaggccgctgcactcactaatcccagcggaaagcagaacagctttgccgcacataaccttcccgatggaatattggtagaaataaaagagacacctgtcagctatgcaaatgcctttgtgcgaccggtgggaatcgttaaggattctgacttggtagaacaaagcattggccaactggccaactatgtgaaggatataagtgccggtttcttccctggacagatgaaaggcaacgctctgtggttctcgcccaatggacgttatcccctaaagcctcaacagggcacgctggacataaagccagtttgcaacctgctagaacttgttcgcgaagcagttgagatgttgggttttgaatgggatgatgtaaaaaacgagaaagtagagagttgaaatgtcttctccgcctaataccctgttcctgagattggaggctccccttcaggcctggggaagcaatgaggccaaattcgccgtgcgcaggacagccgacgcgcccaccaaatccggagtggcaggcctgctctgcgctgccctgggaatcagccgggccgaagccggacagtattggctgggtgaaattgccaaattgcgcatgggggtgcggatagaccgcccgggcatccgctggtgggattaccatactgtgggagcggagcagaagctgcgcatttctgacctgaaaatgcccaacggcctagttctggttggcactgccctggccaaaaacctgggcgcggacaagatcaaatccaaacccggggctttgctctcccgacgcgagtatttggctgatgccagcttcctggttgcgctccagggtgaaccggatatcgtggcacaactggctgaagcgctgaaaaaaccagtctggacgctttatctggggcgaaaatcctgtcccccctcccgtccggtggatgaacacccgccagggttttatgccagtctgaaagaggctttgcggtcgatcccggcgcaactgagggaaaaaggcgaaccgatacctgacagtgttccctgtgtgctcgactgggttccggcccatgatgacgtgcacgctccgccgaacgccgaagcgcattacgacgtgccggtgtcctttgagcctccccaccacttgccccggctggtgatccgctgtaacctgccattggaccgcaacttcgaggcagagaccgtgctttccggcaaagcctggcaaccgccccgcaaccgggcaaattacgacaatcctgaatacaaaagggtccgcgctgagcgtttggtgatggacaatgccgcctgcatgttctgcaaggcacccgccactactgtgcagcacgtgaattaccgacgcgccggaggcagcgagaagccggaggacttgcgcgccctctgccgcctctgccacgatgcctgcaccatgctggaatatggcagcggcatgaccatggaccgcatagatccctgtgaccccgcctggcgtgagcgcatcttggccaaacgcgaggaaataatcaaattccgctcgctggagcagcgcaggcgcaaactcgatccgaaggaggagaacggatgatgtatctatcccaactgctcatcgacacaggcggcaaccctgaccggccaaggcccgggcgcttgtggctgaacaatatctataatgtccaccggcggctcagcatggctttccccatgcgcaagcgcaaggaaggagacccgaggtttctgcagccctttgaccccgcagattttgaaaagcgccagttcctctttcgggtggacaacaacaccgatggagaaaatcaaagggcgatggttttggtgcagtcgtccctgccgccggattgggactgggctttccagaatgccacgggatttttggcagcccctccccaggttaaggaatacgatccccagttctcagcaggtcagcggctgcgcttccgcatcctcgtgaatgccagtgtcaaacgcaaaatcgacgagttgcgggaaggacccggaggaaaggaaaaaacgggaagggttctgcacaaacgggtcgcccttacctgggacacaaattccaacccaaaggatgcggtggcgcaatggtttgccgccaaggctggcagactgggcttcacgcccggggagaccgaactggtaagcctgggctgggtatacggttccaaaccggagccccggggaaattcgccccggcgtgagaacgaataccgtcccctgagataccgttccgccctgctggaaggttatctgacagtggatgatgcctttctgttccgggaagccttggaaaaaggtatcggcagcgccaaaggaatgggcttcggcctcctttccgtggttccggcaagtgatgcgtaacagagaccttcacctaatgccaaaaatgcgggaccgcttcacctatctctatgtggagcatgccaaaatagacaaagaacaacaggcaatcgcctttcacgatgccatgggctccactcctgttccctgcgctggactggccctgctgatgctggggccaggcgtatccatcacccatgcggccatccttgttttagcagaatgcggctgtttggtggcttgggtgggggaacagggagtccgcttttactcatccgggacagggaccacccgtagttccgccaaccttatgcgtcaggctgccgcctggtcaaatcgagatacgcatctgcggatagttcgcagaatgtatgaattgaggttcaaggaaaaactggacccaaccctctctcttgaacagataaggggaaaagagggagcgagagtacgggatacctatttcagactttcaaaagaattcgatgtgcccatgagtgcgaggaattacgacaggagcaactggaataaaaccgaccccatcaacagagccctgtccgttgccaattcctgtctctatggcatctgccacgccgcgatagtggccgctggctattcacctgccctgggtttcgttcatactggcaaacaactgtcatttgtttatgacattgccgatctttataaaatggaaacctccgtgcccgcggctttcatagccacagccgcaggggtcgataacctggacagaaggacacgcattgcctgccgtgaccagttctatcaatttggtctgctaaagaagatagtggccgacattcacgcccttttcggtattctggaaacttcggacgatgagccagaccttgctgatgtcgatccagccgtgccaggcgggctttggaacccagatgataaagtgagccccggcggcttgtcatggggtctggatgatcctggaggccatgatgatggttctggtgcttgaaaaagttccctctggcctgagaggagaaattacacgctggctcctcgaaatcaaggctggagtatttgtcggtcaggtatcggccatgataagggaaaagctgtgggacaaggccaggtctggttgtgccggtggaacttgtatcatgatttacagcaagcattgcgaacaaggctttggaattgagttttggggtgccgcggaaaggatagtgacagaatgggaaggattgaaattgatgaccaagcatccgtgatccatacttgaagcctgttcaatggcctcaaagcgtctactttcgaagtgtgttccccacctgcgtgggggtgaaccgatcgcagaggtgagcggctatactgtgataatgtgttccccacctgcgtgggggtgaaccgggcgcggtcaacgtggacgaagcgcgtccagcgtgttccccacctgcgtgggggtgaaccgacaaccgaatgg

SEQ ID NO: 1105 - DNA, 103379 bp, Artificial Sequence
  Synthetic Oligonucleotide
  misc_feature (1)..(95923): n is a, c, g, or t
nnnnnnnnnnnnnnnnnnnnnnnnnnnnnnnnnnnnnnnnnnnnnnnnnnnnnnnnnnnnnnnnnnnnnnnnnnnnnnnnnnnnnnnnnnnnnnnnnnnnnnnnnnnnnnnnnnnnnnnnnnnnnnnnnnnnnnnnnnnnnnnnnnnnnnnnnnnnnnnnnnnnnnnnnnnnnnnnnnnnnnnnnnnnnnnnnnnnnnnnnnnnnnnnnnnnnnnnnnnnnnnnnnnnnnnnnnnnnnnnnnnnnnnnnnnnnnnnnnnnnnnnnnnnnnnnnnnnnnnnnnnnnnnnnnnnnnnnnnnnnnnnnnnnnnnnnnnnnnnnnnnnnnnnnnnnnnnnnnnnnnnnnnnnnnnnnnnnnnnnnnnnnnnnnnnnnnnnnnnnnnnnnnnnnnnnnnnnnnnnnnnnnnnnnnnnnnnnnnnnnnnnnnnnnnnnnnnnnnnnnnnnnnnnnnnnnnnnnnnnnnnnnnnnnnnnnnnnnnnnnnnnnnnnnnnnnnnnnnnnnnnnnnnnnnnnnnnnnnnnnnnnnnnnnnnnnnnnnnnnnnnnnnnnnnnnnnnnnnnnnnnnnnnnnnnnnnnnnnnnnnnnnnnnnnnnnnnnnnnnnnnnnnnnnnnnnnnnnnnnnnnnnnnnnnnnnnnnnnnnnnnnnnnnnnnnnnnnnnnnnnnnnnnnnnnnnnnnnnnnnnnnnnnnnnnnnnnnnnnnnnnnnnnnnnnnnnnnnnnnnnnnnnnnnnnnnnnnnnnnnnnnnnnnnnnnnnnnnnnnnnnnnnnnnnnnnnnnnnnnnnnnnnnnnnnnnnnnnnnnnnnnnnnnnnnnnnnnnnnnnnnnnnnnnnnnnnnnnnnnnnnnnnnnnnnnnnnnnnnnnnnnnnnnnnnnnnnnnnnnnnnnnnnnnnnnnnnnnnnnnnnnnnnnnnnnnnnnnnnnnnnnnnnnnnnnnnnnnnnnnnnnnnnnnnnnnnnnnnnnnnnnnnnnnnnnnnnnnnnnnnnnnnnnnnnnnnnnnnnnnnnnnnnnnnnnnnnnnnnnnnnnnnnnnnnnnnnnnnnnnnnnnnnnnnnnnnnnnnnnnnnnnnnnnnnnnnnnnnnnnnnnnnnnnnnnnnnnnnnnnnnnnnnnnnnnnnnnnnnnnnnnnnnnnnnnnnnnnnnnnnnnnnnnnnnnnnnnnnnnnnnnnnnnnnnnnnnnnnnnnnnnnnnnnnnnnnnnnnnnnnnnnnnnnnnnnnnnnnnnnnnnnnnnnnnnnnnnnnnnnnnnnnnnnnnnnnnnnnnnnnnnnnnnnnnnnnnnnnnnnnnnnnnnnnnnnnnnnnnnnnnnnnnnnnnnnnnnnnnnnnnnnnnnnnnnnnnnnnnnnnnnnnnnnnnnnnnnnnnnnnnnnnnnnnnnnnnnnnnnnnnnnnnnnnnnnnnnnnnnnnnnnnnnnnnnnnnnnnnnnnnnnnnnnnnnnnnnnnnnnnnnnnnnnnnnnnnnnnnnnnnnnnnnnnnnnnnnnnnnnnnnnnnnnnnnnnnnnnnnnnnnnnnnnnnnnnnnnnnnnnnnnnnnnnnnnnnnnnnnnnnnnnnnnnnnnnnnnnnnnnnnnnnnnnnnnnnnnnnnnnnnnnnnnnnnnnnnnnnnnnnnnnnnnnnnnnnnnnnnnnnnnnnnnnnnnnnnnnnnnnnnnnnnnnnnnnnnnnnnnnnnnnnnnnnnnnnnnnnnnnnnnnnnnnnnnnnnnnnnnnnnnnnnnnnnnnnnnnnnnnnnnnnnnnnnnnnnnnnnnnnnnnnnnnnnnnnnnnnnnnnnnnnnnnnnnnnnnnnnnnnnnnnnnnnnnnnnnnnnnnnnnnnnnnnnnnnnnnnnnnnnnnnnnnnnnnnnnnnnnnnnnnnnnnnnnnnnnnnnnnnnnnnnnnnnnnnnnnnnnnnnnnnnnnnnnnnnnnnnnnnnnnnnnnnnnnnnnnnnnnnnnnnnnnnnnnnnnnnnnnnnnnnnnnnnnnnnnnnnnnnnnnnnnnnnnnnnnnnnnnnnnnnnnnnnnnnnnnnnnnnnnnnnnnnnnnnnnnnnnnnnnnnnnnnnnnnnnnnnnnnnnnnnnnnnnnnnnnnnnnnnnnnnnnnnnnnnnnnnnnnnnnnnnnnnnnnnnnnnnnnnnnnnnnnnnnnnnnnnnnnnnnnnnnnnnnnnnnnnnnnnnnnnnnnnnnnnnnnnnnnnnnnnnnnnnnnnnnnnnnnnnnnnnnnnnnnnnnnnnnnnnnnnnnnnnnnnnnnnnnnnnnnnnnnnnnnnnnnnnnnnnnnnnnnnnnnnnnnnnnnnnnnnnnnnnnnnnnnnnnnnnnnnnnnnnnnnnnnnnnnnnnnnnnnnnnnnnnnnnnnnnnnnnnnnnnnnnnnnnnnnnnnnnnnnnnnnnnnnnnnnnnnnnnnnnnnnnnnnnnnnnnnnnnnnnnnnnnnnnnnnnnnnnnnnnnnnnnnnnnnnnnnnnnnnnnnnnnnnnnnnnnnnnnnnnnnnnnnnnnnnnnnnnnnnnnnnnnnnnnnnnnnnnnnnnnnnnnnnnnnnnnnnnnnnnnnnnnnnnnnnnnnnnnnnnnnnnnnnnnnnnnnnnnnnnnnnnnnnnnnnnnnnnnnnnnnnnnnnnnnnnnnnnnnnnnnnnnnnnnnnnnnnnnnnnnnnnnnnnnnnnnnnnnnnnnnnnnnnnnnnnnnnnnnnnnnnnnnnnnnnnnnnnnnnnnnnnnnnnnnnnnnnnnnnnnnnnnnnnnnnnnnnnnnnnnnnnnnnnnnnnnnnnnnnnnnnnnnnnnnnnnnnnnnnnnnnnnnnnnnnnnnnnnnnnnnnnnnnnnnnnnnnnnnnnnnnnnnnnnnnnnnnnnnnnnnnnnnnnnnnnnnnnnnnnnnnnnnnnnnnnnnnnnnnnnnnnnnnnnnnnnnnnnnnnnnnnnnnnnnnnnnnnnnnnnnnnnnnnnnnnnnnnnnnnnnnnnnnnnnnnnnnnnnnnnnnnnnnnnnnnnnnnnnnnnnnnnnnnnnnnnnnnnnnnnnnnnnnnnnnnnnnnnnnnnnnnnnnnnnnnnnnnnnnnnnnnnnnnnnnnnnnnnnnnnnnnnnnnnnnnnnnnnnnnnnnnnnnnnnnnnnnnnnnnnnnnnnnnnnnnnnnnnnnnnnnnnnnnnnnnnnnnnnnnnnnnnnnnnnnnnnnnnnnnnnnnnnnnnnnnnnnnnnnnnnnnnnnnnnnnnnnnnnnnnnnnnnnnnnnnnnnnnnnnnnnnnnnnnnnnnnnnnnnnnnnnnnnnnnnnnnnnnnnnnnnnnnnnnnnnnnnnnnnnnnnnnnnnnnnnnnnnnnnnnnnnnnnnnnnnnnnnnnnnnnnnnnnnnnnnnnnnnnnnnnnnnnnnnnnnnnnnnnnnnnnnnnnnnnnnnnnnnnnnnnnnnnnnnnnnnnnnnnnnnnnnnnnnnnnnnnnnnnnnnnnnnnnnnnnnnnnnnnnnnnnnnnnnnnnnnnnnnnnnnnnnnnnnnnnnnnnnnnnnnnnnnnnnnnnnnnnnnnnnnnnnnnnnnnnnnnnnnnnnnnnnnnnnnnnnnnnnnnnnnnnnnnnnnnnnnnnnnnnnnnnnnnnnnnnnnnnnnnnnnnnnnnnnnnnnnnnnnnnnnnnnnnnnnnnnnnnnnnnnnnnnnnnnnnnnnnnnnnnnnnnnnnnnnnnnnnnnnnnnnnnnnnnnnnnnnnnnnnnnnnnnnnnnnnnnnnnnnnnnnnnnnnnnnnnnnnnnnnnnnnnnnnnnnnnnnnnnnnnnnnnnnnnnnnnnnnnnnnnnnnnnnnnnnnnnnnnnnnnnnnnnnnnnnnnnnnnnnnnnnnnnnnnnnnnnnnnnnnnnnnnnnnnnnnnnnnnnnnnnnnnnnnnnnnnnnnnnnnnnnnnnnnnnnnnnnnnnnnnnnnnnnnnnnnnnnnnnnnnnnnnnnnnnnnnnnnnnnnnnnnnnnnnnnnnnnnnnnnnnnnnnnnnnnnnnnnnnnnnnnnnnnnnnnnnnnnnnnnnnnnnnnnnnnnnnnnnnnnnnnnnnnnnnnnnnnnnnnnnnnnnnnnnnnnnnnnnnnnnnnnnnnnnnnnnnnnnnnnnnnnnnnnnnnnnnnnnnnnnnnnnnnnnnnnnnnnnnnnnnnnnnnnnnnnnnnnnnnnnnnnnnnnnnnnnnnnnnnnnnnnnnnnnnnnnnnnnnnnnnnnnnnnnnnnnnnnnnnnnnnnnnnnnnnnnnnnnnnnnnnnnnnnnnnnnnnnnnnnnnnnnnnnnnnnnnnnnnnnnnnnnnnnnnnnnnnnnnnnnnnnnnnnnnnnnnnnnnnnnnnnnnnnnnnnnnnnnnnnnnnnnnnnnnnnnnnnnnnnnnnnnnnnnnnnnnnnnnnnnnnnnnnnnnnnnnnnnnnnnnnnnnnnnnnnnnnnnnnnnnnnnnnnnnnnnnnnnnnnnnnnnnnnnnnnnnnnnnnnnnnnnnnnnnnnnnnnnnnnnnnnnnnnnnnnnnnnnnnnnnnnnnnnnnnnnnnnnnnnnnnnnnnnnnnnnnnnnnnnnnnnnnnnnnnnnnnnnnnnnnnnnnnnnnnnnnnnnnnnnnnnnnnnnnnnnnnnnnnnnnnnnnnnnnnnnnnnnnnnnnnnnnnnnnnnnnnnnnnnnnnnnnnnnnnnnnnnnnnnnnnnnnnnnnnnnnnnnnnnnnnnnnnnnnnnnnnnnnnnnnnnnnnnnnnnnnnnnnnnnnnnnnnnnnnnnnnnnnnnnnnnnnnnnnnnnnnnnnnnnnnnnnnnnnnnnnnnnnnnnnnnnnnnnnnnnnnnnnnnnnnnnnnnnnnnnnnnnnnnnnnnnnnnnnnnnnnnnnnnnnnnnnnnnnnnnnnnnnnnnnnnnnnnnnnnnnnnnnnnnnnnnnnnnnnnnnnnnnnnnnnnnnnnnnnnnnnnnnnnnnnnnnnnnnnnnnnnnnnnnnnnnnnnnnnnnnnnnnnnnnnnnnnnnnnnnnnnnnnnnnnnnnnnnnnnnnnnnnnnnnnnnnnnnnnnnnnnnnnnnnnnnnnnnnnnnnnnnnnnnnnnnnnnnnnnnnnnnnnnnnnnnnnnnnnnnnnnnnnnnnnnnnnnnnnnnnnnnnnnnnnnnnnnnnnnnnnnnnnnnnnnnnnnnnnnnnnnnnnnnnnnnnnnnnnnnnnnnnnnnnnnnnnnnnnnnnnnnnnnnnnnnnnnnnnnnnnnnnnnnnnnnnnnnnnnnnnnnnnnnnnnnnnnnnnnnnnnnnnnnnnnnnnnnnnnnnnnnnnnnnnnnnnnnnnnnnnnnnnnnnnnnnnnnnnnnnnnnnnnnnnnnnnnnnnnnnnnnnnnnnnnnnnnnnnnnnnnnnnnnnnnnnnnnnnnnnnnnnnnnnnnnnnnnnnnnnnnnnnnnnnnnnnnnnnnnnnnnnnnnnnnnnnnnnnnnnnnnnnnnnnnnnnnnnnnnnnnnnnnnnnnnnnnnnnnnnnnnnnnnnnnnnnnnnnnnnnnnnnnnnnnnnnnnnnnnnnnnnnnnnnnnnnnnnnnnnnnnnnnnnnnnnnnnnnnnnnnnnnnnnnnnnnnnnnnnnnnnnnnnnnnnnnnnnnnnnnnnnnnnnnnnnnnnnnnnnnnnnnnnnnnnnnnnnnnnnnnnnnnnnnnnnnnnnnnnnnnnnnnnnnnnnnnnnnnnnnnnnnnnnnnnnnnnnnnnnnnnnnnnnnnnnnnnnnnnnnnnnnnnnnnnnnnnnnnnnnnnnnnnnnnnnnnnnnnnnnnnnnnnnnnnnnnnnnnnnnnnnnnnnnnnnnnnnnnnnnnnnnnnnnnnnnnnnnnnnnnnnnnnnnnnnnnnnnnnnnnnnnnnnnnnnnnnnnnnnnnnnnnnnnnnnnnnnnnnnnnnnnnnnnnnnnnnnnnnnnnnnnnnnnnnnnnnnnnnnnnnnnnnnnnnnnnnnnnnnnnnnnnnnnnnnnnnnnnnnnnnnnnnnnnnnnnnnnnnnnnnnnnnnnnnnnnnnnnnnnnnnnnnnnnnnnnnnnnnnnnnnnnnnnnnnnnnnnnnnnnnnnnnnnnnnnnnnnnnnnnnnnnnnnnnnnnnnnnnnnnnnnnnnnnnnnnnnnnnnnnnnnnnnnnnnnnnnnnnnnnnnnnnnnnnnnnnnnnnnnnnnnnnnnnnnnnnnnnnnnnnnnnnnnnnnnnnnnnnnnnnnnnnnnnnnnnnnnnnnnnnnnnnnnnnnnnnnnnnnnnnnnnnnnnnnnnnnnnnnnnnnnnnnnnnnnnnnnnnnnnnnnnnnnnnnnnnnnnnnnnnnnnnnnnnnnnnnnnnnnnnnnnnnnnnnnnnnnnnnnnnnnnnnnnnnnnnnnnnnnnnnnnnnnnnnnnnnnnnnnnnnnnnnnnnnnnnnnnnnnnnnnnnnnnnnnnnnnnnnnnnnnnnnnnnnnnnnnnnnnnnnnnnnnnnnnnnnnnnnnnnnnnnnnnnnnnnnnnnnnnnnnnnnnnnnnnnnnnnnnnnnnnnnnnnnnnnnnnnnnnnnnnnnnnnnnnnnnnnnnnnnnnnnnnnnnnnnnnnnnnnnnnnnnnnnnnnnnnnnnnnnnnnnnnnnnnnnnnnnnnnnnnnnnnnnnnnnnnnnnnnnnnnnnnnnnnnnnnnnnnnnnnnnnnnnnnnnnnnnnnnnnnnnnnnnnnnnnnnnnnnnnnnnnnnnnnnnnnnnnnnnnnnnnnnnnnnnnnnnnnnnnnnnnnnnnnnnnnnnnnnnnnnnnnnnnnnnnnnnnnnnnnnnnnnnnnnnnnnnnnnnnnnnnnnnnnnnnnnnnnnnnnnnnnnnnnnnnnnnnnnnnnnnnnnnnnnnnnnnnnnnnnnnnnnnnnnnnnnnnnnnnnnnnnnnnnnnnnnnnnnnnnnnnnnnnnnnnnnnnnnnnnnnnnnnnnnnnnnnnnnnnnnnnnnnnnnnnnnnnnnnnnnnnnnnnnnnnnnnnnnnnnnnnnnnnnnnnnnnnnnnnnnnnnnnnnnnnnnnnnnnnnnnnnnnnnnnnnnnnnnnnnnnnnnnnnnnnnnnnnnnnnnnnnnnnnnnnnnnnnnnnnnnnnnnnnnnnnnnnnnnnnnnnnnnnnnnnnnnnnnnnnnnnnnnnnnnnnnnnnnnnnnnnnnnnnnnnnnnnnnnnnnnnnnnnnnnnnnnnnnnnnnnnnnnnnnnnnnnnnnnnnnnnnnnnnnnnnnnnnnnnnnnnnnnnnnnnnnnnnnnnnnnnnnnnnnnnnnnnnnnnnnnnnnnnnnnnnnnnnnnnnnnnnnnnnnnnnnnnnnnnnnnnnnnnnnnnnnnnnnnnnnnnnnnnnnnnnnnnnnnnnnnnnnnnnnnnnnnnnnnnnnnnnnnnnnnnnnnnnnnnnnnnnnnnnnnnnnnnnnnnnnnnnnnnnnnnnnnnnnnnnnnnnnnnnnnnnnnnnnnnnnnnnnnnnnnnnnnnnnnnnnnnnnnnnnnnnnnnnnnnnnnnnnnnnnnnnnnnnnnnnnnnnnnnnnnnnnnnnnnnnnnnnnnnnnnnnnnnnnnnnnnnnnnnnnnnnnnnnnnnnnnnnnnnnnnnnnnnnnnnnnnnnnnnnnnnnnnnnnnnnnnnnnnnnnnnnnnnnnnnnnnnnnnnnnnnnnnnnnnnnnnnnnnnnnnnnnnnnnnnnnnnnnnnnnnnnnnnnnnnnnnnnnnnnnnnnnnnnnnnnnnnnnnnnnnnnnnnnnnnnnnnnnnnnnnnnnnnnnnnnnnnnnnnnnnnnnnnnnnnnnnnnnnnnnnnnnnnnnnnnnnnnnnnnnnnnnnnnnnnnnnnnnnnnnnnnnnnnnnnnnnnnnnnnnnnnnnnnnnnnnnnnnnnnnnnnnnnnnnnnnnnnnnnnnnnnnnnnnnnnnnnnnnnnnnnnnnnnnnnnnnnnnnnnnnnnnnnnnnnnnnnnnnnnnnnnnnnnnnnnnnnnnnnnnnnnnnnnnnnnnnnnnnnnnnnnnnnnnnnnnnnnnnnnnnnnnnnnnnnnnnnnnnnnnnnnnnnnnnnnnnnnnnnnnnnnnnnnnnnnnnnnnnnnnnnnnnnnnnnnnnnnnnnnnnnnnnnnnnnnnnnnnnnnnnnnnnnnnnnnnnnnnnnnnnnnnnnnnnnnnnnnnnnnnnnnnnnnnnnnnnnnnnnnnnnnnnnnnnnnnnnnnnnnnnnnnnnnnnnnnnnnnnnnnnnnnnnnnnnnnnnnnnnnnnnnnnnnnnnnnnnnnnnnnnnnnnnnnnnnnnnnnnnnnnnnnnnnnnnnnnnnnnnnnnnnnnnnnnnnnnnnnnnnnnnnnnnnnnnnnnnnnnnnnnnnnnnnnnnnnnnnnnnnnnnnnnnnnnnnnnnnnnnnnnnnnnnnnnnnnnnnnnnnnnnnnnnnnnnnnnnnnnnnnnnnnnnnnnnnnnnnnnnnnnnnnnnnnnnnnnnnnnnnnnnnnnnnnnnnnnnnnnnnnnnnnnnnnnnnnnnnnnnnnnnnnnnnnnnnnnnnnnnnnnnnnnnnnnnnnnnnnnnnnnnnnnnnnnnnnnnnnnnnnnnnnnnnnnnnnnnnnnnnnnnnnnnnnnnnnnnnnnnnnnnnnnnnnnnnnnnnnnnnnnnnnnnnnnnnnnnnnnnnnnnnnnnnnnnnnnnnnnnnnnnnnnnnnnnnnnnnnnnnnnnnnnnnnnnnnnnnnnnnnnnnnnnnnnnnnnnnnnnnnnnnnnnnnnnnnnnnnnnnnnnnnnnnnnnnnnnnnnnnnnnnnnnnnnnnnnnnnnnnnnnnnnnnnnnnnnnnnnnnnnnnnnnnnnnnnnnnnnnnnnnnnnnnnnnnnnnnnnnnnnnnnnnnnnnnnnnnnnnnnnnnnnnnnnnnnnnnnnnnnnnnnnnnnnnnnnnnnnnnnnnnnnnnnnnnnnnnnnnnnnnnnnnnnnnnnnnnnnnnnnnnnnnnnnnnnnnnnnnnnnnnnnnnnnnnnnnnnnnnnnnnnnnnnnnnnnnnnnnnnnnnnnnnnnnnnnnnnnnnnnnnnnnnnnnnnnnnnnnnnnnnnnnnnnnnnnnnnnnnnnnnnnnnnnnnnnnnnnnnnnnnnnnnnnnnnnnnnnnnnnnnnnnnnnnnnnnnnnnnnnnnnnnnnnnnnnnnnnnnnnnnnnnnnnnnnnnnnnnnnnnnnnnnnnnnnnnnnnnnnnnnnnnnnnnnnnnnnnnnnnnnnnnnnnnnnnnnnnnnnnnnnnnnnnnnnnnnnnnnnnnnnnnnnnnnnnnnnnnnnnnnnnnnnnnnnnnnnnnnnnnnnnnnnnnnnnnnnnnnnnnnnnnnnnnnnnnnnnnnnnnnnnnnnnnnnnnnnnnnnnnnnnnnnnnnnnnnnnnnnnnnnnnnnnnnnnnnnnnnnnnnnnnnnnnnnnnnnnnnnnnnnnnnnnnnnnnnnnnnnnnnnnnnnnnnnnnnnnnnnnnnnnnnnnnnnnnnnnnnnnnnnnnnnnnnnnnnnnnnnnnnnnnnnnnnnnnnnnnnnnnnnnnnnnnnnnnnnnnnnnnnnnnnnnnnnnnnnnnnnnnnnnnnnnnnnnnnnnnnnnnnnnnnnnnnnnnnnnnnnnnnnnnnnnnnnnnnnnnnnnnnnnnnnnnnnnnnnnnnnnnnnnnnnnnnnnnnnnnnnnnnnnnnnnnnnnnnnnnnnnnnnnnnnnnnnnnnnnnnnnnnnnnnnnnnnnnnnnnnnnnnnnnnnnnnnnnnnnnnnnnnnnnnnnnnnnnnnnnnnnnnnnnnnnnnnnnnnnnnnnnnnnnnnnnnnnnnnnnnnnnnnnnnnnnnnnnnnnnnnnnnnnnnnnnnnnnnnnnnnnnnnnnnnnnnnnnnnnnnnnnnnnnnnnnnnnnnnnnnnnnnnnnnnnnnnnnnnnnnnnnnnnnnnnnnnnnnnnnnnnnnnnnnnnnnnnnnnnnnnnnnnnnnnnnnnnnnnnnnnnnnnnnnnnnnnnnnnnnnnnnnnnnnnnnnnnnnnnnnnnnnnnnnnnnnnnnnnnnnnnnnnnnnnnnnnnnnnnnnnnnnnnnnnnnnnnnnnnnnnnnnnnnnnnnnnnnnnnnnnnnnnnnnnnnnnnnnnnnnnnnnnnnnnnnnnnnnnnnnnnnnnnnnnnnnnnnnnnnnnnnnnnnnnnnnnnnnnnnnnnnnnnnnnnnnnnnnnnnnnnnnnnnnnnnnnnnnnnnnnnnnnnnnnnnnnnnnnnnnnnnnnnnnnnnnnnnnnnnnnnnnnnnnnnnnnnnnnnnnnnnnnnnnnnnnnnnnnnnnnnnnnnnnnnnnnnnnnnnnnnnnnnnnnnnnnnnnnnnnnnnnnnnnnnnnnnnnnnnnnnnnnnnnnnnnnnnnnnnnnnnnnnnnnnnnnnnnnnnnnnnnnnnnnnnnnnnnnnnnnnnnnnnnnnnnnnnnnnnnnnnnnnnnnnnnnnnnnnnnnnnnnnnnnnnnnnnnnnnnnnnnnnnnnnnnnnnnnnnnnnnnnnnnnnnnnnnnnnnnnnnnnnnnnnnnnnnnnnnnnnnnnnnnnnnnnnnnnnnnnnnnnnnnnnnnnnnnnnnnnnnnnnnnnnnnnnnnnnnnnnnnnnnnnnnnnnnnnnnnnnnnnnnnnnnnnnnnnnnnnnnnnnnnnnnnnnnnnnnnnnnnnnnnnnnnnnnnnnnnnnnnnnnnnnnnnnnnnnnnnnnnnnnnnnnnnnnnnnnnnnnnnnnnnnnnnnnnnnnnnnnnnnnnnnnnnnnnnnnnnnnnnnnnnnnnnnnnnnnnnnnnnnnnnnnnnnnnnnnnnnnnnnnnnnnnnnnnnnnnnnnnnnnnnnnnnnnnnnnnnnnnnnnnnnnnnnnnnnnnnnnnnnnnnnnnnnnnnnnnnnnnnnnnnnnnnnnnnnnnnnnnnnnnnnnnnnnnnnnnnnnnnnnnnnnnnnnnnnnnnnnnnnnnnnnnnnnnnnnnnnnnnnnnnnnnnnnnnnnnnnnnnnnnnnnnnnnnnnnnnnnnnnnnnnnnnnnnnnnnnnnnnnnnnnnnnnnnnnnnnnnnnnnnnnnnnnnnnnnnnnnnnnnnnnnnnnnnnnnnnnnnnnnnnnnnnnnnnnnnnnnnnnnnnnnnnnnnnnnnnnnnnnnnnnnnnnnnnnnnnnnnnnnnnnnnnnnnnnnnnnnnnnnnnnnnnnnnnnnnnnnnnnnnnnnnnnnnnnnnnnnnnnnnnnnnnnnnnnnnnnnnnnnnnnnnnnnnnnnnnnnnnnnnnnnnnnnnnnnnnnnnnnnnnnnnnnnnnnnnnnnnnnnnnnnnnnnnnnnnnnnnnnnnnnnnnnnnnnnnnnnnnnnnnnnnnnnnnnnnnnnnnnnnnnnnnnnnnnnnnnnnnnnnnnnnnnnnnnnnnnnnnnnnnnnnnnnnnnnnnnnnnnnnnnnnnnnnnnnnnnnnnnnnnnnnnnnnnnnnnnnnnnnnnnnnnnnnnnnnnnnnnnnnnnnnnnnnnnnnnnnnnnnnnnnnnnnnnnnnnnnnnnnnnnnnnnnnnnnnnnnnnnnnnnnnnnnnnnnnnnnnnnnnnnnnnnnnnnnnnnnnnnnnnnnnnnnnnnnnnnnnnnnnnnnnnnnnnnnnnnnnnnnnnnnnnnnnnnnnnnnnnnnnnnnnnnnnnnnnnnnnnnnnnnnnnnnnnnnnnnnnnnnnnnnnnnnnnnnnnnnnnnnnnnnnnnnnnnnnnnnnnnnnnnnnnnnnnnnnnnnnnnnnnnnnnnnnnnnnnnnnnnnnnnnnnnnnnnnnnnnnnnnnnnnnnnnnnnnnnnnnnnnnnnnnnnnnnnnnnnnnnnnnnnnnnnnnnnnnnnnnnnnnnnnnnnnnnnnnnnnnnnnnnnnnnnnnnnnnnnnnnnnnnnnnnnnnnnnnnnnnnnnnnnnnnnnnnnnnnnnnnnnnnnnnnnnnnnnnnnnnnnnnnnnnnnnnnnnnnnnnnnnnnnnnnnnnnnnnnnnnnnnnnnnnnnnnnnnnnnnnnnnnnnnnnnnnnnnnnnnnnnnnnnnnnnnnnnnnnnnnnnnnnnnnnnnnnnnnnnnnnnnnnnnnnnnnnnnnnnnnnnnnnnnnnnnnnnnnnnnnnnnnnnnnnnnnnnnnnnnnnnnnnnnnnnnnnnnnnnnnnnnnnnnnnnnnnnnnnnnnnnnnnnnnnnnnnnnnnnnnnnnnnnnnnnnnnnnnnnnnnnnnnnnnnnnnnnnnnnnnnnnnnnnnnnnnnnnnnnnnnnnnnnnnnnnnnnnnnnnnnnnnnnnnnnnnnnnnnnnnnnnnnnnnnnnnnnnnnnnnnnnnnnnnnnnnnnnnnnnnnnnnnnnnnnnnnnnnnnnnnnnnnnnnnnnnnnnnnnnnnnnnnnnnnnnnnnnnnnnnnnnnnnnnnnnnnnnnnnnnnnnnnnnnnnnnnnnnnnnnnnnnnnnnnnnnnnnnnnnnnnnnnnnnnnnnnnnnnnnnnnnnnnnnnnnnnnnnnnnnnnnnnnnnnnnnnnnnnnnnnnnnnnnnnnnnnnnnnnnnnnnnnnnnnnnnnnnnnnnnnnnnnnnnnnnnnnnnnnnnnnnnnnnnnnnnnnnnnnnnnnnnnnnnnnnnnnnnnnnnnnnnnnnnnnnnnnnnnnnnnnnnnnnnnnnnnnnnnnnnnnnnnnnnnnnnnnnnnnnnnnnnnnnnnnnnnnnnnnnnnnnnnnnnnnnnnnnnnnnnnnnnnnnnnnnnnnnnnnnnnnnnnnnnnnnnnnnnnnnnnnnnnnnnnnnnnnnnnnnnnnnnnnnnnnnnnnnnnnnnnnnnnnnnnnnnnnnnnnnnnnnnnnnnnnnnnnnnnnnnnnnnnnnnnnnnnnnnnnnnnnnnnnnnnnnnnnnnnnnnnnnnnnnnnnnnnnnnnnnnnnnnnnnnnnnnnnnnnnnnnnnnnnnnnnnnnnnnnnnnnnnnnnnnnnnnnnnnnnnnnnnnnnnnnnnnnnnnnnnnnnnnnnnnnnnnnnnnnnnnnnnnnnnnnnnnnnnnnnnnnnnnnnnnnnnnnnnnnnnnnnnnnnnnnnnnnnnnnnnnnnnnnnnnnnnnnnnnnnnnnnnnnnnnnnnnnnnnnnnnnnnnnnnnnnnnnnnnnnnnnnnnnnnnnnnnnnnnnnnnnnnnnnnnnnnnnnnnnnnnnnnnnnnnnnnnnnnnnnnnnnnnnnnnnnnnnnnnnnnnnnnnnnnnnnnnnnnnnnnnnnnnnnnnnnnnnnnnnnnnnnnnnnnnnnnnnnnnnnnnnnnnnnnnnnnnnnnnnnnnnnnnnnnnnnnnnnnnnnnnnnnnnnnnnnnnnnnnnnnnnnnnnnnnnnnnnnnnnnnnnnnnnnnnnnnnnnnnnnnnnnnnnnnnnnnnnnnnnnnnnnnnnnnnnnnnnnnnnnnnnnnnnnnnnnnnnnnnnnnnnnnnnnnnnnnnnnnnnnnnnnnnnnnnnnnnnnnnnnnnnnnnnnnnnnnnnnnnnnnnnnnnnnnnnnnnnnnnnnnnnnnnnnnnnnnnnnnnnnnnnnnnnnnnnnnnnnnnnnnnnnnnnnnnnnnnnnnnnnnnnnnnnnnnnnnnnnnnnnnnnnnnnnnnnnnnnnnnnnnnnnnnnnnnnnnnnnnnnnnnnnnnnnnnnnnnnnnnnnnnnnnnnnnnnnnnnnnnnnnnnnnnnnnnnnnnnnnnnnnnnnnnnnnnnnnnnnnnnnnnnnnnnnnnnnnnnnnnnnnnnnnnnnnnnnnnnnnnnnnnnnnnnnnnnnnnnnnnnnnnnnnnnnnnnnnnnnnnnnnnnnnnnnnnnnnnnnnnnnnnnnnnnnnnnnnnnnnnnnnnnnnnnnnnnnnnnnnnnnnnnnnnnnnnnnnnnnnnnnnnnnnnnnnnnnnnnnnnnnnnnnnnnnnnnnnnnnnnnnnnnnnnnnnnnnnnnnnnnnnnnnnnnnnnnnnnnnnnnnnnnnnnnnnnnnnnnnnnnnnnnnnnnnnnnnnnnnnnnnnnnnnnnnnnnnnnnnnnnnnnnnnnnnnnnnnnnnnnnnnnnnnnnnnnnnnnnnnnnnnnnnnnnnnnnnnnnnnnnnnnnnnnnnnnnnnnnnnnnnnnnnnnnnnnnnnnnnnnnnnnnnnnnnnnnnnnnnnnnnnnnnnnnnnnnnnnnnnnnnnnnnnnnnnnnnnnnnnnnnnnnnnnnnnnnnnnnnnnnnnnnnnnnnnnnnnnnnnnnnnnnnnnnnnnnnnnnnnnnnnnnnnnnnnnnnnnnnnnnnnnnnnnnnnnnnnnnnnnnnnnnnnnnnnnnnnnnnnnnnnnnnnnnnnnnnnnnnnnnnnnnnnnnnnnnnnnnnnnnnnnnnnnnnnnnnnnnnnnnnnnnnnnnnnnnnnnnnnnnnnnnnnnnnnnnnnnnnnnnnnnnnnnnnnnnnnnnnnnnnnnnnnnnnnnnnnnnnnnnnnnnnnnnnnnnnnnnnnnnnnnnnnnnnnnnnnnnnnnnnnnnnnnnnnnnnnnnnnnnnnnnnnnnnnnnnnnnnnnnnnnnnnnnnnnnnnnnnnnnnnnnnnnnnnnnnnnnnnnnnnnnnnnnnnnnnnnnnnnnnnnnnnnnnnnnnnnnnnnnnnnnnnnnnnnnnnnnnnnnnnnnnnnnnnnnnnnnnnnnnnnnnnnnnnnnnnnnnnnnnnnnnnnnnnnnnnnnnnnnnnnnnnnnnnnnnnnnnnnnnnnnnnnnnnnnnnnnnnnnnnnnnnnnnnnnnnnnnnnnnnnnnnnnnnnnnnnnnnnnnnnnnnnnnnnnnnnnnnnnnnnnnnnnnnnnnnnnnnnnnnnnnnnnnnnnnnnnnnnnnnnnnnnnnnnnnnnnnnnnnnnnnnnnnnnnnnnnnnnnnnnnnnnnnnnnnnnnnnnnnnnnnnnnnnnnnnnnnnnnnnnnnnnnnnnnnnnnnnnnnnnnnnnnnnnnnnnnnnnnnnnnnnnnnnnnnnnnnnnnnnnnnnnnnnnnnnnnnnnnnnnnnnnnnnnnnnnnnnnnnnnnnnnnnnnnnnnnnnnnnnnnnnnnnnnnnnnnnnnnnnnnnnnnnnnnnnnnnnnnnnnnnnnnnnnnnnnnnnnnnnnnnnnnnnnnnnnnnnnnnnnnnnnnnnnnnnnnnnnnnnnnnnnnnnnnnnnnnnnnnnnnnnnnnnnnnnnnnnnnnnnnnnnnnnnnnnnnnnnnnnnnnnnnnnnnnnnnnnnnnnnnnnnnnnnnnnnnnnnnnnnnnnnnnnnnnnnnnnnnnnnnnnnnnnnnnnnnnnnnnnnnnnnnnnnnnnnnnnnnnnnnnnnnnnnnnnnnnnnnnnnnnnnnnnnnnnnnnnnnnnnnnnnnnnnnnnnnnnnnnnnnnnnnnnnnnnnnnnnnnnnnnnnnnnnnnnnnnnnnnnnnnnnnnnnnnnnnnnnnnnnnnnnnnnnnnnnnnnnnnnnnnnnnnnnnnnnnnnnnnnnnnnnnnnnnnnnnnnnnnnnnnnnnnnnnnnnnnnnnnnnnnnnnnnnnnnnnnnnnnnnnnnnnnnnnnnnnnnnnnnnnnnnnnnnnnnnnnnnnnnnnnnnnnnnnnnnnnnnnnnnnnnnnnnnnnnnnnnnnnnnnnnnnnnnnnnnnnnnnnnnnnnnnnnnnnnnnnnnnnnnnnnnnnnnnnnnnnnnnnnnnnnnnnnnnnnnnnnnnnnnnnnnnnnnnnnnnnnnnnnnnnnnnnnnnnnnnnnnnnnnnnnnnnnnnnnnnnnnnnnnnnnnnnnnnnnnnnnnnnnnnnnnnnnnnnnnnnnnnnnnnnnnnnnnnnnnnnnnnnnnnnnnnnnnnnnnnnnnnnnnnnnnnnnnnnnnnnnnnnnnnnnnnnnnnnnnnnnnnnnnnnnnnnnnnnnnnnnnnnnnnnnnnnnnnnnnnnnnnnnnnnnnnnnnnnnnnnnnnnnnnnnnnnnnnnnnnnnnnnnnnnnnnnnnnnnnnnnnnnnnnnnnnnnnnnnnnnnnnnnnnnnnnnnnnnnnnnnnnnnnnnnnnnnnnnnnnnnnnnnnnnnnnnnnnnnnnnnnnnnnnnnnnnnnnnnnnnnnnnnnnnnnnnnnnnnnnnnnnnnnnnnnnnnnnnnnnnnnnnnnnnnnnnnnnnnnnnnnnnnnnnnnnnnnnnnnnnnnnnnnnnnnnnnnnnnnnnnnnnnnnnnnnnnnnnnnnnnnnnnnnnnnnnnnnnnnnnnnnnnnnnnnnnnnnnnnnnnnnnnnnnnnnnnnnnnnnnnnnnnnnnnnnnnnnnnnnnnnnnnnnnnnnnnnnnnnnnnnnnnnnnnnnnnnnnnnnnnnnnnnnnnnnnnnnnnnnnnnnnnnnnnnnnnnnnnnnnnnnnnnnnnnnnnnnnnnnnnnnnnnnnnnnnnnnnnnnnnnnnnnnnnnnnnnnnnnnnnnnnnnnnnnnnnnnnnnnnnnnnnnnnnnnnnnnnnnnnnnnnnnnnnnnnnnnnnnnnnnnnnnnnnnnnnnnnnnnnnnnnnnnnnnnnnnnnnnnnnnnnnnnnnnnnnnnnnnnnnnnnnnnnnnnnnnnnnnnnnnnnnnnnnnnnnnnnnnnnnnnnnnnnnnnnnnnnnnnnnnnnnnnnnnnnnnnnnnnnnnnnnnnnnnnnnnnnnnnnnnnnnnnnnnnnnnnnnnnnnnnnnnnnnnnnnnnnnnnnnnnnnnnnnnnnnnnnnnnnnnnnnnnnnnnnnnnnnnnnnnnnnnnnnnnnnnnnnnnnnnnnnnnnnnnnnnnnnnnnnnnnnnnnnnnnnnnnnnnnnnnnnnnnnnnnnnnnnnnnnnnnnnnnnnnnnnnnnnnnnnnnnnnnnnnnnnnnnnnnnnnnnnnnnnnnnnnnnnnnnnnnnnnnnnnnnnnnnnnnnnnnnnnnnnnnnnnnnnnnnnnnnnnnnnnnnnnnnnnnnnnnnnnnnnnnnnnnnnnnnnnnnnnnnnnnnnnnnnnnnnnnnnnnnnnnnnnnnnnnnnnnnnnnnnnnnnnnnnnnnnnnnnnnnnnnnnnnnnnnnnnnnnnnnnnnnnnnnnnnnnnnnnnnnnnnnnnnnnnnnnnnnnnnnnnnnnnnnnnnnnnnnnnnnnnnnnnnnnnnnnnnnnnnnnnnnnnnnnnnnnnnnnnnnnnnnnnnnnnnnnnnnnnnnnnnnnnnnnnnnnnnnnnnnnnnnnnnnnnnnnnnnnnnnnnnnnnnnnnnnnnnnnnnnnnnnnnnnnnnnnnnnnnnnnnnnnnnnnnnnnnnnnnnnnnnnnnnnnnnnnnnnnnnnnnnnnnnnnnnnnnnnnnnnnnnnnnnnnnnnnnnnnnnnnnnnnnnnnnnnnnnnnnnnnnnnnnnnnnnnnnnnnnnnnnnnnnnnnnnnnnnnnnnnnnnnnnnnnnnnnnnnnnnnnnnnnnnnnnnnnnnnnnnnnnnnnnnnnnnnnnnnnnnnnnnnnnnnnnnnnnnnnnnnnnnnnnnnnnnnnnnnnnnnnnnnnnnnnnnnnnnnnnnnnnnnnnnnnnnnnnnnnnnnnnnnnnnnnnnnnnnnnnnnnnnnnnnnnnnnnnnnnnnnnnnnnnnnnnnnnnnnnnnnnnnnnnnnnnnnnnnnnnnnnnnnnnnnnnnnnnnnnnnnnnnnnnnnnnnnnnnnnnnnnnnnnnnnnnnnnnnnnnnnnnnnnnnnnnnnnnnnnnnnnnnnnnnnnnnnnnnnnnnnnnnnnnnnnnnnnnnnnnnnnnnnnnnnnnnnnnnnnnnnnnnnnnnnnnnnnnnnnnnnnnnnnnnnnnnnnnnnnnnnnnnnnnnnnnnnnnnnnnnnnnnnnnnnnnnnnnnnnnnnnnnnnnnnnnnnnnnnnnnnnnnnnnnnnnnnnnnnnnnnnnnnnnnnnnnnnnnnnnnnnnnnnnnnnnnnnnnnnnnnnnnnnnnnnnnnnnnnnnnnnnnnnnnnnnnnnnnnnnnnnnnnnnnnnnnnnnnnnnnnnnnnnnnnnnnnnnnnnnnnnnnnnnnnnnnnnnnnnnnnnnnnnnnnnnnnnnnnnnnnnnnnnnnnnnnnnnnnnnnnnnnnnnnnnnnnnnnnnnnnnnnnnnnnnnnnnnnnnnnnnnnnnnnnnnnnnnnnnnnnnnnnnnnnnnnnnnnnnnnnnnnnnnnnnnnnnnnnnnnnnnnnnnnnnnnnnnnnnnnnnnnnnnnnnnnnnnnnnnnnnnnnnnnnnnnnnnnnnnnnnnnnnnnnnnnnnnnnnnnnnnnnnnnnnnnnnnnnnnnnnnnnnnnnnnnnnnnnnnnnnnnnnnnnnnnnnnnnnnnnnnnnnnnnnnnnnnnnnnnnnnnnnnnnnnnnnnnnnnnnnnnnnnnnnnnnnnnnnnnnnnnnnnnnnnnnnnnnnnnnnnnnnnnnnnnnnnnnnnnnnnnnnnnnnnnnnnnnnnnnnnnnnnnnnnnnnnnnnnnnnnnnnnnnnnnnnnnnnnnnnnnnnnnnnnnnnnnnnnnnnnnnnnnnnnnnnnnnnnnnnnnnnnnnnnnnnnnnnnnnnnnnnnnnnnnnnnnnnnnnnnnnnnnnnnnnnnnnnnnnnnnnnnnnnnnnnnnnnnnnnnnnnnnnnnnnnnnnnnnnnnnnnnnnnnnnnnnnnnnnnnnnnnnnnnnnnnnnnnnnnnnnnnnnnnnnnnnnnnnnnnnnnnnnnnnnnnnnnnnnnnnnnnnnnnnnnnnnnnnnnnnnnnnnnnnnnnnnnnnnnnnnnnnnnnnnnnnnnnnnnnnnnnnnnnnnnnnnnnnnnnnnnnnnnnnnnnnnnnnnnnnnnnnnnnnnnnnnnnnnnnnnnnnnnnnnnnnnnnnnnnnnnnnnnnnnnnnnnnnnnnnnnnnnnnnnnnnnnnnnnnnnnnnnnnnnnnnnnnnnnnnnnnnnnnnnnnnnnnnnnnnnnnnnnnnnnnnnnnnnnnnnnnnnnnnnnnnnnnnnnnnnnnnnnnnnnnnnnnnnnnnnnnnnnnnnnnnnnnnnnnnnnnnnnnnnnnnnnnnnnnnnnnnnnnnnnnnnnnnnnnnnnnnnnnnnnnnnnnnnnnnnnnnnnnnnnnnnnnnnnnnnnnnnnnnnnnnnnnnnnnnnnnnnnnnnnnnnnnnnnnnnnnnnnnnnnnnnnnnnnnnnnnnnnnnnnnnnnnnnnnnnnnnnnnnnnnnnnnnnnnnnnnnnnnnnnnnnnnnnnnnnnnnnnnnnnnnnnnnnnnnnnnnnnnnnnnnnnnnnnnnnnnnnnnnnnnnnnnnnnnnnnnnnnnnnnnnnnnnnnnnnnnnnnnnnnnnnnnnnnnnnnnnnnnnnnnnnnnnnnnnnnnnnnnnnnnnnnnnnnnnnnnnnnnnnnnnnnnnnnnnnnnnnnnnnnnnnnnnnnnnnnnnnnnnnnnnnnnnnnnnnnnnnnnnnnnnnnnnnnnnnnnnnnnnnnnnnnnnnnnnnnnnnnnnnnnnnnnnnnnnnnnnnnnnnnnnnnnnnnnnnnnnnnnnnnnnnnnnnnnnnnnnnnnnnnnnnnnnnnnnnnnnnnnnnnnnnnnnnnnnnnnnnnnnnnnnnnnnnnnnnnnnnnnnnnnnnnnnnnnnnnnnnnnnnnnnnnnnnnnnnnnnnnnnnnnnnnnnnnnnnnnnnnnnnnnnnnnnnnnnnnnnnnnnnnnnnnnnnnnnnnnnnnnnnnnnnnnnnnnnnnnnnnnnnnnnnnnnnnnnnnnnnnnnnnnnnnnnnnnnnnnnnnnnnnnnnnnnnnnnnnnnnnnnnnnnnnnnnnnnnnnnnnnnnnnnnnnnnnnnnnnnnnnnnnnnnnnnnnnnnnnnnnnnnnnnnnnnnnnnnnnnnnnnnnnnnnnnnnnnnnnnnnnnnnnnnnnnnnnnnnnnnnnnnnnnnnnnnnnnnnnnnnnnnnnnnnnnnnnnnnnnnnnnnnnnnnnnnnnnnnnnnnnnnnnnnnnnnnnnnnnnnnnnnnnnnnnnnnnnnnnnnnnnnnnnnnnnnnnnnnnnnnnnnnnnnnnnnnnnnnnnnnnnnnnnnnnnnnnnnnnnnnnnnnnnnnnnnnnnnnnnnnnnnnnnnnnnnnnnnnnnnnnnnnnnnnnnnnnnnnnnnnnnnnnnnnnnnnnnnnnnnnnnnnnnnnnnnnnnnnnnnnnnnnnnnnnnnnnnnnnnnnnnnnnnnnnnnnnnnnnnnnnnnnnnnnnnnnnnnnnnnnnnnnnnnnnnnnnnnnnnnnnnnnnnnnnnnnnnnnnnnnnnnnnnnnnnnnnnnnnnnnnnnnnnnnnnnnnnnnnnnnnnnnnnnnnnnnnnnnnnnnnnnnnnnnnnnnnnnnnnnnnnnnnnnnnnnnnnnnnnnnnnnnnnnnnnnnnnnnnnnnnnnnnnnnnnnnnnnnnnnnnnnnnnnnnnnnnnnnnnnnnnnnnnnnnnnnnnnnnnnnnnnnnnnnnnnnnnnnnnnnnnnnnnnnnnnnnnnnnnnnnnnnnnnnnnnnnnnnnnnnnnnnnnnnnnnnnnnnnnnnnnnnnnnnnnnnnnnnnnnnnnnnnnnnnnnnnnnnnnnnnnnnnnnnnnnnnnnnnnnnnnnnnnnnnnnnnnnnnnnnnnnnnnnnnnnnnnnnnnnnnnnnnnnnnnnnnnnnnnnnnnnnnnnnnnnnnnnnnnnnnnnnnnnnnnnnnnnnnnnnnnnnnnnnnnnnnnnnnnnnnnnnnnnnnnnnnnnnnnnnnnnnnnnnnnnnnnnnnnnnnnnnnnnnnnnnnnnnnnnnnnnnnnnnnnnnnnnnnnnnnnnnnnnnnnnnnnnnnnnnnnnnnnnnnnnnnnnnnnnnnnnnnnnnnnnnnnnnnnnnnnnnnnnnnnnnnnnnnnnnnnnnnnnnnnnnnnnnnnnnnnnnnnnnnnnnnnnnnnnnnnnnnnnnnnnnnnnnnnnnnnnnnnnnnnnnnnnnnnnnnnnnnnnnnnnnnnnnnnnnnnnnnnnnnnnnnnnnnnnnnnnnnnnnnnnnnnnnnnnnnnnnnnnnnnnnnnnnnnnnnnnnnnnnnnnnnnnnnnnnnnnnnnnnnnnnnnnnnnnnnnnnnnnnnnnnnnnnnnnnnnnnnnnnnnnnnnnnnnnnnnnnnnnnnnnnnnnnnnnnnnnnnnnnnnnnnnnnnnnnnnnnnnnnnnnnnnnnnnnnnnnnnnnnnnnnnnnnnnnnnnnnnnnnnnnnnnnnnnnnnnnnnnnnnnnnnnnnnnnnnnnnnnnnnnnnnnnnnnnnnnnnnnnnnnnnnnnnnnnnnnnnnnnnnnnnnnnnnnnnnnnnnnnnnnnnnnnnnnnnnnnnnnnnnnnnnnnnnnnnnnnnnnnnnnnnnnnnnnnnnnnnnnnnnnnnnnnnnnnnnnnnnnnnnnnnnnnnnnnnnnnnnnnnnnnnnnnnnnnnnnnnnnnnnnnnnnnnnnnnnnnnnnnnnnnnnnnnnnnnnnnnnnnnnnnnnnnnnnnnnnnnnnnnnnnnnnnnnnnnnnnnnnnnnnnnnnnnnnnnnnnnnnnnnnnnnnnnnnnnnnnnnnnnnnnnnnnnnnnnnnnnnnnnnnnnnnnnnnnnnnnnnnnnnnnnnnnnnnnnnnnnnnnnnnnnnnnnnnnnnnnnnnnnnnnnnnnnnnnnnnnnnnnnnnnnnnnnnnnnnnnnnnnnnnnnnnnnnnnnnnnnnnnnnnnnnnnnnnnnnnnnnnnnnnnnnnnnnnnnnnnnnnnnnnnnnnnnnnnnnnnnnnnnnnnnnnnnnnnnnnnnnnnnnnnnnnnnnnnnnnnnnnnnnnnnnnnnnnnnnnnnnnnnnnnnnnnnnnnnnnnnnnnnnnnnnnnnnnnnnnnnnnnnnnnnnnnnnnnnnnnnnnnnnnnnnnnnnnnnnnnnnnnnnnnnnnnnnnnnnnnnnnnnnnnnnnnnnnnnnnnnnnnnnnnnnnnnnnnnnnnnnnnnnnnnnnnnnnnnnnnnnnnnnnnnnnnnnnnnnnnnnnnnnnnnnnnnnnnnnnnnnnnnnnnnnnnnnnnnnnnnnnnnnnnnnnnnnnnnnnnnnnnnnnnnnnnnnnnnnnnnnnnnnnnnnnnnnnnnnnnnnnnnnnnnnnnnnnnnnnnnnnnnnnnnnnnnnnnnnnnnnnnnnnnnnnnnnnnnnnnnnnnnnnnnnnnnnnnnnnnnnnnnnnnnnnnnnnnnnnnnnnnnnnnnnnnnnnnnnnnnnnnnnnnnnnnnnnnnnnnnnnnnnnnnnnnnnnnnnnnnnnnnnnnnnnnnnnnnnnnnnnnnnnnnnnnnnnnnnnnnnnnnnnnnnnnnnnnnnnnnnnnnnnnnnnnnnnnnnnnnnnnnnnnnnnnnnnnnnnnnnnnnnnnnnnnnnnnnnnnnnnnnnnnnnnnnnnnnnnnnnnnnnnnnnnnnnnnnnnnnnnnnnnnnnnnnnnnnnnnnnnnnnnnnnnnnnnnnnnnnnnnnnnnnnnnnnnnnnnnnnnnnnnnnnnnnnnnnnnnnnnnnnnnnnnnnnnnnnnnnnnnnnnnnnnnnnnnnnnnnnnnnnnnnnnnnnnnnnnnnnnnnnnnnnnnnnnnnnnnnnnnnnnnnnnnnnnnnnnnnnnnnnnnnnnnnnnnnnnnnnnnnnnnnnnnnnnnnnnnnnnnnnnnnnnnnnnnnnnnnnnnnnnnnnnnnnnnnnnnnnnnnnnnnnnnnnnnnnnnnnnnnnnnnnnnnnnnnnnnnnnnnnnnnnnnnnnnnnnnnnnnnnnnnnnnnnnnnnnnnnnnnnnnnnnnnnnnnnnnnnnnnnnnnnnnnnnnnnnnnnnnnnnnnnnnnnnnnnnnnnnnnnnnnnnnnnnnnnnnnnnnnnnnnnnnnnnnnnnnnnnnnnnnnnnnnnnnnnnnnnnnnnnnnnnnnnnnnnnnnnnnnnnnnnnnnnnnnnnnnnnnnnnnnnnnnnnnnnnnnnnnnnnnnnnnnnnnnnnnnnnnnnnnnnnnnnnnnnnnnnnnnnnnnnnnnnnnnnnnnnnnnnnnnnnnnnnnnnnnnnnnnnnnnnnnnnnnnnnnnnnnnnnnnnnnnnnnnnnnnnnnnnnnnnnnnnnnnnnnnnnnnnnnnnnnnnnnnnnnnnnnnnnnnnnnnnnnnnnnnnnnnnnnnnnnnnnnnnnnnnnnnnnnnnnnnnnnnnnnnnnnnnnnnnnnnnnnnnnnnnnnnnnnnnnnnnnnnnnnnnnnnnnnnnnnnnnnnnnnnnnnnnnnnnnnnnnnnnnnnnnnnnnnnnnnnnnnnnnnnnnnnnnnnnnnnnnnnnnnnnnnnnnnnnnnnnnnnnnnnnnnnnnnnnnnnnnnnnnnnnnnnnnnnnnnnnnnnnnnnnnnnnnnnnnnnnnnnnnnnnnnnnnnnnnnnnnnnnnnnnnnnnnnnnnnnnnnnnnnnnnnnnnnnnnnnnnnnnnnnnnnnnnnnnnnnnnnnnnnnnnnnnnnnnnnnnnnnnnnnnnnnnnnnnnnnnnnnnnnnnnnnnnnnnnnnnnnnnnnnnnnnnnnnnnnnnnnnnnnnnnnnnnnnnnnnnnnnnnnnnnnnnnnnnnnnnnnnnnnnnnnnnnnnnnnnnnnnnnnnnnnnnnnnnnnnnnnnnnnnnnnnnnnnnnnnnnnnnnnnnnnnnnnnnnnnnnnnnnnnnnnnnnnnnnnnnnnnnnnnnnnnnnnnnnnnnnnnnnnnnnnnnnnnnnnnnnnnnnnnnnnnnnnnnnnnnnnnnnnnnnnnnnnnnnnnnnnnnnnnnnnnnnnnnnnnnnnnnnnnnnnnnnnnnnnnnnnnnnnnnnnnnnnnnnnnnnnnnnnnnnnnnnnnnnnnnnnnnnnnnnnnnnnnnnnnnnnnnnnnnnnnnnnnnnnnnnnnnnnnnnnnnnnnnnnnnnnnnnnnnnnnnnnnnnnnnnnnnnnnnnnnnnnnnnnnnnnnnnnnnnnnnnnnnnnnnnnnnnnnnnnnnnnnnnnnnnnnnnnnnnnnnnnnnnnnnnnnnnnnnnnnnnnnnnnnnnnnnnnnnnnnnnnnnnnnnnnnnnnnnnnnnnnnnnnnnnnnnnnnnnnnnnnnnnnnnnnnnnnnnnnnnnnnnnnnnnnnnnnnnnnnnnnnnnnnnnnnnnnnnnnnnnnnnnnnnnnnnnnnnnnnnnnnnnnnnnnnnnnnnnnnnnnnnnnnnnnnnnnnnnnnnnnnnnnnnnnnnnnnnnnnnnnnnnnnnnnnnnnnnnnnnnnnnnnnnnnnnnnnnnnnnnnnnnnnnnnnnnnnnnnnnnnnnnnnnnnnnnnnnnnnnnnnnnnnnnnnnnnnnnnnnnnnnnnnnnnnnnnnnnnnnnnnnnnnnnnnnnnnnnnnnnnnnnnnnnnnnnnnnnnnnnnnnnnnnnnnnnnnnnnnnnnnnnnnnnnnnnnnnnnnnnnnnnnnnnnnnnnnnnnnnnnnnnnnnnnnnnnnnnnnnnnnnnnnnnnnnnnnnnnnnnnnnnnnnnnnnnnnnnnnnnnnnnnnnnnnnnnnnnnnnnnnnnnnnnnnnnnnnnnnnnnnnnnnnnnnnnnnnnnnnnnnnnnnnnnnnnnnnnnnnnnnnnnnnnnnnnnnnnnnnnnnnnnnnnnnnnnnnnnnnnnnnnnnnnnnnnnnnnnnnnnnnnnnnnnnnnnnnnnnnnnnnnnnnnnnnnnnnnnnnnnnnnnnnnnnnnnnnnnnnnnnnnnnnnnnnnnnnnnnnnnnnnnnnnnnnnnnnnnnnnnnnnnnnnnnnnnnnnnnnnnnnnnnnnnnnnnnnnnnnnnnnnnnnnnnnnnnnnnnnnnnnnnnnnnnnnnnnnnnnnnnnnnnnnnnnnnnnnnnnnnnnnnnnnnnnnnnnnnnnnnnnnnnnnnnnnnnnnnnnnnnnnnnnnnnnnnnnnnnnnnnnnnnnnnnnnnnnnnnnnnnnnnnnnnnnnnnnnnnnnnnnnnnnnnnnnnnnnnnnnnnnnnnnnnnnnnnnnnnnnnnnnnnnnnnnnnnnnnnnnnnnnnnnnnnnnnnnnnnnnnnnnnnnnnnnnnnnnnnnnnnnnnnnnnnnnnnnnnnnnnnnnnnnnnnnnnnnnnnnnnnnnnnnnnnnnnnnnnnnnnnnnnnnnnnnnnnnnnnnnnnnnnnnnnnnnnnnnnnnnnnnnnnnnnnnnnnnnnnnnnnnnnnnnnnnnnnnnnnnnnnnnnnnnnnnnnnnnnnnnnnnnnnnnnnnnnnnnnnnnnnnnnnnnnnnnnnnnnnnnnnnnnnnnnnnnnnnnnnnnnnnnnnnnnnnnnnnnnnnnnnnnnnnnnnnnnnnnnnnnnnnnnnnnnnnnnnnnnnnnnnnnnnnnnnnnnnnnnnnnnnnnnnnnnnnnnnnnnnnnnnnnnnnnnnnnnnnnnnnnnnnnnnnnnnnnnnnnnnnnnnnnnnnnnnnnnnnnnnnnnnnnnnnnnnnnnnnnnnnnnnnnnnnnnnnnnnnnnnnnnnnnnnnnnnnnnnnnnnnnnnnnnnnnnnnnnnnnnnnnnnnnnnnnnnnnnnnnnnnnnnnnnnnnnnnnnnnnnnnnnnnnnnnnnnnnnnnnnnnnnnnnnnnnnnnnnnnnnnnnnnnnnnnnnnnnnnnnnnnnnnnnnnnnnnnnnnnnnnnnnnnnnnnnnnnnnnnnnnnnnnnnnnnnnnnnnnnnnnnnnnnnnnnnnnnnnnnnnnnnnnnnnnnnnnnnnnnnnnnnnnnnnnnnnnnnnnnnnnnnnnnnnnnnnnnnnnnnnnnnnnnnnnnnnnnnnnnnnnnnnnnnnnnnnnnnnnnnnnnnnnnnnnnnnnnnnnnnnnnnnnnnnnnnnnnnnnnnnnnnnnnnnnnnnnnnnnnnnnnnnnnnnnnnnnnnnnnnnnnnnnnnnnnnnnnnnnnnnnnnnnnnnnnnnnnnnnnnnnnnnnnnnnnnnnnnnnnnnnnnnnnnnnnnnnnnnnnnnnnnnnnnnnnnnnnnnnnnnnnnnnnnnnnnnnnnnnnnnnnnnnnnnnnnnnnnnnnnnnnnnnnnnnnnnnnnnnnnnnnnnnnnnnnnnnnnnnnnnnnnnnnnnnnnnnnnnnnnnnnnnnnnnnnnnnnnnnnnnnnnnnnnnnnnnnnnnnnnnnnnnnnnnnnnnnnnnnnnnnnnnnnnnnnnnnnnnnnnnnnnnnnnnnnnnnnnnnnnnnnnnnnnnnnnnnnnnnnnnnnnnnnnnnnnnnnnnnnnnnnnnnnnnnnnnnnnnnnnnnnnnnnnnnnnnnnnnnnnnnnnnnnnnnnnnnnnnnnnnnnnnnnnnnnnnnnnnnnnnnnnnnnnnnnnnnnnnnnnnnnnnnnnnnnnnnnnnnnnnnnnnnnnnnnnnnnnnnnnnnnnnnnnnnnnnnnnnnnnnnnnnnnnnnnnnnnnnnnnnnnnnnnnnnnnnnnnnnnnnnnnnnnnnnnnnnnnnnnnnnnnnnnnnnnnnnnnnnnnnnnnnnnnnnnnnnnnnnnnnnnnnnnnnnnnnnnnnnnnnnnnnnnnnnnnnnnnnnnnnnnnnnnnnnnnnnnnnnnnnnnnnnnnnnnnnnnnnnnnnnnnnnnnnnnnnnnnnnnnnnnnnnnnnnnnnnnnnnnnnnnnnnnnnnnnnnnnnnnnnnnnnnnnnnnnnnnnnnnnnnnnnnnnnnnnnnnnnnnnnnnnnnnnnnnnnnnnnnnnnnnnnnnnnnnnnnnnnnnnnnnnnnnnnnnnnnnnnnnnnnnnnnnnnnnnnnnnnnnnnnnnnnnnnnnnnnnnnnnnnnnnnnnnnnnnnnnnnnnnnnnnnnnnnnnnnnnnnnnnnnnnnnnnnnnnnnnnnnnnnnnnnnnnnnnnnnnnnnnnnnnnnnnnnnnnnnnnnnnnnnnnnnnnnnnnnnnnnnnnnnnnnnnnnnnnnnnnnnnnnnnnnnnnnnnnnnnnnnnnnnnnnnnnnnnnnnnnnnnnnnnnnnnnnnnnnnnnnnnnnnnnnnnnnnnnnnnnnnnnnnnnnnnnnnnnnnnnnnnnnnnnnnnnnnnnnnnnnnnnnnnnnnnnnnnnnnnnnnnnnnnnnnnnnnnnnnnnnnnnnnnnnnnnnnnnnnnnnnnnnnnnnnnnnnnnnnnnnnnnnnnnnnnnnnnnnnnnnnnnnnnnnnnnnnnnnnnnnnnnnnnnnnnnnnnnnnnnnnnnnnnnnnnnnnnnnnnnnnnnnnnnnnnnnnnnnnnnnnnnnnnnnnnnnnnnnnnnnnnnnnnnnnnnnnnnnnnnnnnnnnnnnnnnnnnnnnnnnnnnnnnnnnnnnnnnnnnnnnnnnnnnnnnnnnnnnnnnnnnnnnnnnnnnnnnnnnnnnnnnnnnnnnnnnnnnnnnnnnnnnnnnnnnnnnnnnnnnnnnnnnnnnnnnnnnnnnnnnnnnnnnnnnnnnnnnnnnnnnnnnnnnnnnnnnnnnnnnnnnnnnnnnnnnnnnnnnnnnnnnnnnnnnnnnnnnnnnnnnnnnnnnnnnnnnnnnnnnnnnnnnnnnnnnnnnnnnnnnnnnnnnnnnnnnnnnnnnnnnnnnnnnnnnnnnnnnnnnnnnnnnnnnnnnnnnnnnnnnnnnnnnnnnnnnnnnnnnnnnnnnnnnnnnnnnnnnnnnnnnnnnnnnnnnnnnnnnnnnnnnnnnnnnnnnnnnnnnnnnnnnnnnnnnnnnnnnnnnnnnnnnnnnnnnnnnnnnnnnnnnnnnnnnnnnnnnnnnnnnnnnnnnnnnnnnnnnnnnnnnnnnnnnnnnnnnnnnnnnnnnnnnnnnnnnnnnnnnnnnnnnnnnnnnnnnnnnnnnnnnnnnnnnnnnnnnnnnnnnnnnnnnnnnnnnnnnnnnnnnnnnnnnnnnnnnnnnnnnnnnnnnnnnnnnnnnnnnnnnnnnnnnnnnnnnnnnnnnnnnnnnnnnnnnnnnnnnnnnnnnnnnnnnnnnnnnnnnnnnnnnnnnnnnnnnnnnnnnnnnnnnnnnnnnnnnnnnnnnnnnnnnnnnnnnnnnnnnnnnnnnnnnnnnnnnnnnnnnnnnnnnnnnnnnnnnnnnnnnnnnnnnnnnnnnnnnnnnnnnnnnnnnnnnnnnnnnnnnnnnnnnnnnnnnnnnnnnnnnnnnnnnnnnnnnnnnnnnnnnnnnnnnnnnnnnnnnnnnnnnnnnnnnnnnnnnnnnnnnnnnnnnnnnnnnnnnnnnnnnnnnnnnnnnnnnnnnnnnnnnnnnnnnnnnnnnnnnnnnnnnnnnnnnnnnnnnnnnnnnnnnnnnnnnnnnnnnnnnnnnnnnnnnnnnnnnnnnnnnnnnnnnnnnnnnnnnnnnnnnnnnnnnnnnnnnnnnnnnnnnnnnnnnnnnnnnnnnnnnnnnnnnnnnnnnnnnnnnnnnnnnnnnnnnnnnnnnnnnnnnnnnnnnnnnnnnnnnnnnnnnnnnnnnnnnnnnnnnnnnnnnnnnnnnnnnnnnnnnnnnnnnnnnnnnnnnnnnnnnnnnnnnnnnnnnnnnnnnnnnnnnnnnnnnnnnnnnnnnnnnnnnnnnnnnnnnnnnnnnnnnnnnnnnnnnnnnnnnnnnnnnnnnnnnnnnnnnnnnnnnnnnnnnnnnnnnnnnnnnnnnnnnnnnnnnnnnnnnnnnnnnnnnnnnnnnnnnnnnnnnnnnnnnnnnnnnnnnnnnnnnnnnnnnnnnnnnnnnnnnnnnnnnnnnnnnnnnnnnnnnnnnnnnnnnnnnnnnnnnnnnnnnnnnnnnnnnnnnnnnnnnnnnnnnnnnnnnnnnnnnnnnnnnnnnnnnnnnnnnnnnnnnnnnnnnnnnnnnnnnnnnnnnnnnnnnnnnnnnnnnnnnnnnnnnnnnnnnnnnnnnnnnnnnnnnnnnnnnnnnnnnnnnnnnnnnnnnnnnnnnnnnnnnnnnnnnnnnnnnnnnnnnnnnnnnnnnnnnnnnnnnnnnnnnnnnnnnnnnnnnnnnnnnnnnnnnnnnnnnnnnnnnnnnnnnnnnnnnnnnnnnnnnnnnnnnnnnnnnnnnnnnnnnnnnnnnnnnnnnnnnnnnnnnnnnnnnnnnnnnnnnnnnnnnnnnnnnnnnnnnnnnnnnnnnnnnnnnnnnnnnnnnnnnnnnnnnnnnnnnnnnnnnnnnnnnnnnnnnnnnnnnnnnnnnnnnnnnnnnnnnnnnnnnnnnnnnnnnnnnnnnnnnnnnnnnnnnnnnnnnnnnnnnnnnnnnnnnnnnnnnnnnnnnnnnnnnnnnnnnnnnnnnnnnnnnnnnnnnnnnnnnnnnnnnnnnnnnnnnnnnnnnnnnnnnnnnnnnnnnnnnnnnnnnnnnnnnnnnnnnnnnnnnnnnnnnnnnnnnnnnnnnnnnnnnnnnnnnnnnnnnnnnnnnnnnnnnnnnnnnnnnnnnnnnnnnnnnnnnnnnnnnnnnnnnnnnnnnnnnnnnnnnnnnnnnnnnnnnnnnnnnnnnnnnnnnnnnnnnnnnnnnnnnnnnnnnnnnnnnnnnnnnnnnnnnnnnnnnnnnnnnnnnnnnnnnnnnnnnnnnnnnnnnnnnnnnnnnnnnnnnnnnnnnnnnnnnnnnnnnnnnnnnnnnnnnnnnnnnnnnnnnnnnnnnnnnnnnnnnnnnnnnnnnnnnnnnnnnnnnnnnnnnnnnnnnnnnnnnnnnnnnnnnnnnnnnnnnnnnnnnnnnnnnnnnnnnnnnnnnnnnnnnnnnnnnnnnnnnnnnnnnnnnnnnnnnnnnnnnnnnnnnnnnnnnnnnnnnnnnnnnnnnnnnnnnnnnnnnnnnnnnnnnnnnnnnnnnnnnnnnnnnnnnnnnnnnnnnnnnnnnnnnnnnnnnnnnnnnnnnnnnnnnnnnnnnnnnnnnnnnnnnnnnnnnnnnnnnnnnnnnnnnnnnnnnnnnnnnnnnnnnnnnnnnnnnnnnnnnnnnnnnnnnnnnnnnnnnnnnnnnnnnnnnnnnnnnnnnnnnnnnnnnnnnnnnnnnnnnnnnnnnnnnnnnnnnnnnnnnnnnnnnnnnnnnnnnnnnnnnnnnnnnnnnnnnnnnnnnnnnnnnnnnnnnnnnnnnnnnnnnnnnnnnnnnnnnnnnnnnnnnnnnnnnnnnnnnnnnnnnnnnnnnnnnnnnnnnnnnnnnnnnnnnnnnnnnnnnnnnnnnnnnnnnnnnnnnnnnnnnnnnnnnnnnnnnnnnnnnnnnnnnnnnnnnnnnnnnnnnnnnnnnnnnnnnnnnnnnnnnnnnnnnnnnnnnnnnnnnnnnnnnnnnnnnnnnnnnnnnnnnnnnnnnnnnnnnnnnnnnnnnnnnnnnnnnnnnnnnnnnnnnnnnnnnnnnnnnnnnnnnnnnnnnnnnnnnnnnnnnnnnnnnnnnnnnnnnnnnnnnnnnnnnnnnnnnnnnnnnnnnnnnnnnnnnnnnnnnnnnnnnnnnnnnnnnnnnnnnnnnnnnnnnnnnnnnnnnnnnnnnnnnnnnnnnnnnnnnnnnnnnnnnnnnnnnnnnnnnnnnnnnnnnnnnnnnnnnnnnnnnnnnnnnnnnnnnnnnnnnnnnnnnnnnnnnnnnnnnnnnnnnnnnnnnnnnnnnnnnnnnnnnnnnnnnnnnnnnnnnnnnnnnnnnnnnnnnnnnnnnnnnnnnnnnnnnnnnnnnnnnnnnnnnnnnnnnnnnnnnnnnnnnnnnnnnnnnnnnnnnnnnnnnnnnnnnnnnnnnnnnnnnnnnnnnnnnnnnnnnnnnnnnnnnnnnnnnnnnnnnnnnnnnnnnnnnnnnnnnnnnnnnnnnnnnnnnnnnnnnnnnnnnnnnnnnnnnnnnnnnnnnnnnnnnnnnnnnnnnnnnnnnnnnnnnnnnnnnnnnnnnnnnnnnnnnnnnnnnnnnnnnnnnnnnnnnnnnnnnnnnnnnnnnnnnnnnnnnnnnnnnnnnnnnnnnnnnnnnnnnnnnnnnnnnnnnnnnnnnnnnnnnnnnnnnnnnnnnnnnnnnnnnnnnnnnnnnnnnnnnnnnnnnnnnnnnnnnnnnnnnnnnnnnnnnnnnnnnnnnnnnnnnnnnnnnnnnnnnnnnnnnnnnnnnnnnnnnnnnnnnnnnnnnnnnnnnnnnnnnnnnnnnnnnnnnnnnnnnnnnnnnnnnnnnnnnnnnnnnnnnnnnnnnnnnnnnnnnnnnnnnnnnnnnnnnnnnnnnnnnnnnnnnnnnnnnnnnnnnnnnnnnnnnnnnnnnnnnnnnnnnnnnnnnnnnnnnnnnnnnnnnnnnnnnnnnnnnnnnnnnnnnnnnnnnnnnnnnnnnnnnnnnnnnnnnnnnnnnnnnnnnnnnnnnnnnnnnnnnnnnnnnnnnnnnnnnnnnnnnnnnnnnnnnnnnnnnnnnnnnnnnnnnnnnnnnnnnnnnnnnnnnnnnnnnnnnnnnnnnnnnnnnnnnnnnnnnnnnnnnnnnnnnnnnnnnnnnnnnnnnnnnnnnnnnnnnnnnnnnnnnnnnnnnnnnnnnnnnnnnnnnnnnnnnnnnnnnnnnnnnnnnnnnnnnnnnnnnnnnnnnnnnnnnnnnnnnnnnnnnnnnnnnnnnnnnnnnnnnnnnnnnnnnnnnnnnnnnnnnnnnnnnnnnnnnnnnnnnnnnnnnnnnnnnnnnnnnnnnnnnnnnnnnnnnnnnnnnnnnnnnnnnnnnnnnnnnnnnnnnnnnnnnnnnnnnnnnnnnnnnnnnnnnnnnnnnnnnnnnnnnnnnnnnnnnnnnnnnnnnnnnnnnnnnnnnnnnnnnnnnnnnnnnnnnnnnnnnnnnnnnnnnnnnnnnnnnnnnnnnnnnnnnnnnnnnnnnnnnnnnnnnnnnnnnnnnnnnnnnnnnnnnnnnnnnnnnnnnnnnnnnnnnnnnnnnnnnnnnnnnnnnnnnnnnnnnnnnnnnnnnnnnnnnnnnnnnnnnnnnnnnnnnnnnnnnnnnnnnnnnnnnnnnnnnnnnnnnnnnnnnnnnnnnnnnnnnnnnnnnnnnnnnnnnnnnnnnnnnnnnnnnnnnnnnnnnnnnnnnnnnnnnnnnnnnnnnnnnnnnnnnnnnnnnnnnnnnnnnnnnnnnnnnnnnnnnnnnnnnnnnnnnnnnnnnnnnnnnnnnnnnnnnnnnnnnnnnnnnnnnnnnnnnnnnnnnnnnnnnnnnnnnnnnnnnnnnnnnnnnnnnnnnnnnnnnnnnnnnnnnnnnnnnnnnnnnnnnnnnnnnnnnnnnnnnnnnnnnnnnnnnnnnnnnnnnnnnnnnnnnnnnnnnnnnnnnnnnnnnnnnnnnnnnnnnnnnnnnnnnnnnnnnnnnnnnnnnnnnnnnnnnnnnnnnnnnnnnnnnnnnnnnnnnnnnnnnnnnnnnnnnnnnnnnnnnnnnnnnnnnnnnnnnnnnnnnnnnnnnnnnnnnnnnnnnnnnnnnnnnnnnnnnnnnnnnnnnnnnnnnnnnnnnnnnnnnnnnnnnnnnnnnnnnnnnnnnnnnnnnnnnnnnnnnnnnnnnnnnnnnnnnnnnnnnnnnnnnnnnnnnnnnnnnnnnnnnnnnnnnnnnnnnnnnnnnnnnnnnnnnnnnnnnnnnnnnnnnnnnnnnnnnnnnnnnnnnnnnnnnnnnnnnnnnnnnnnnnnnnnnnnnnnnnnnnnnnnnnnnnnnnnnnnnnnnnnnnnnnnnnnnnnnnnnnnnnnnnnnnnnnnnnnnnnnnnnnnnnnnnnnnnnnnnnnnnnnnnnnnnnnnnnnnnnnnnnnnnnnnnnnnnnnnnnnnnnnnnnnnnnnnnnnnnnnnnnnnnnnnnnnnnnnnnnnnnnnnnnnnnnnnnnnnnnnnnnnnnnnnnnnnnnnnnnnnnnnnnnnnnnnnnnnnnnnnnnnnnnnnnnnnnnnnnnnnnnnnnnnnnnnnnnnnnnnnnnnnnnnnnnnnnnnnnnnnnnnnnnnnnnnnnnnnnnnnnnnnnnnnnnnnnnnnnnnnnnnnnnnnnnnnnnnnnnnnnnnnnnnnnnnnnnnnnnnnnnnnnnnnnnnnnnnnnnnnnnnnnnnnnnnnnnnnnnnnnnnnnnnnnnnnnnnnnnnnnnnnnnnnnnnnnnnnnnnnnnnnnnnnnnnnnnnnnnnnnnnnnnnnnnnnnnnnnnnnnnnnnnnnnnnnnnnnnnnnnnnnnnnnnnnnnnnnnnnnnnnnnnnnnnnnnnnnnnnnnnnnnnnnnnnnnnnnnnnnnnnnnnnnnnnnnnnnnnnnnnnnnnnnnnnnnnnnnnnnnnnnnnnnnnnnnnnnnnnnnnnnnnnnnnnnnnnnnnnnnnnnnnnnnnnnnnnnnnnnnnnnnnnnnnnnnnnnnnnnnnnnnnnnnnnnnnnnnnnnnnnnnnnnnnnnnnnnnnnnnnnnnnnnnnnnnnnnnnnnnnnnnnnnnnnnnnnnnnnnnnnnnnnnnnnnnnnnnnnnnnnnnnnnnnnnnnnnnnnnnnnnnnnnnnnnnnnnnnnnnnnnnnnnnnnnnnnnnnnnnnnnnnnnnnnnnnnnnnnnnnnnnnnnnnnnnnnnnnnnnnnnnnnnnnnnnnnnnnnnnnnnnnnnnnnnnnnnnnnnnnnnnnnnnnnnnnnnnnnnnnnnnnnnnnnnnnnnnnnnnnnnnnnnnnnnnnnnnnnnnnnnnnnnnnnnnnnnnnnnnnnnnnnnnnnnnnnnnnnnnnnnnnnnnnnnnnnnnnnnnnnnnnnnnnnnnnnnnnnnnnnnnnnnnnnnnnnnnnnnnnnnnnnnnnnnnnnnnnnnnnnnnnnnnnnnnnnnnnnnnnnnnnnnnnnnnnnnnnnnnnnnnnnnnnnnnnnnnnnnnnnnnnnnnnnnnnnnnnnnnnnnnnnnnnnnnnnnnnnnnnnnnnnnnnnnnnnnnnnnnnnnnnnnnnnnnnnnnnnnnnnnnnnnnnnnnnnnnnnnnnnnnnnnnnnnnnnnnnnnnnnnnnnnnnnnnnnnnnnnnnnnnnnnnnnnnnnnnnnnnnnnnnnnnnnnnnnnnnnnnnnnnnnnnnnnnnnnnnnnnnnnnnnnnnnnnnnnnnnnnnnnnnnnnnnnnnnnnnnnnnnnnnnnnnnnnnnnnnnnnnnnnnnnnnnnnnnnnnnnnnnnnnnnnnnnnnnnnnnnnnnnnnnnnnnnnnnnnnnnnnnnnnnnnnnnnnnnnnnnnnnnnnnnnnnnnnnnnnnnnnnnnnnnnnnnnnnnnnnnnnnnnnnnnnnnnnnnnnnnnnnnnnnnnnnnnnnnnnnnnnnnnnnnnnnnnnnnnnnnnnnnnnnnnnnnnnnnnnnnnnnnnnnnnnnnnnnnnnnnnnnnnnnnnnnnnnnnnnnnnnnnnnnnnnnnnnnnnnnnnnnnnnnnnnnnnnnnnnnnnnnnnnnnnnnnnnnnnnnnnnnnnnnnnnnnnnnnnnnnnnnnnnnnnnnnnnnnnnnnnnnnnnnnnnnnnnnnnnnnnnnnnnnnnnnnnnnnnnnnnnnnnnnnnnnnnnnnnnnnnnnnnnnnnnnnnnnnnnnnnnnnnnnnnnnnnnnnnnnnnnnnnnnnnnnnnnnnnnnnnnnnnnnnnnnnnnnnnnnnnnnnnnnnnnnnnnnnnnnnnnnnnnnnnnnnnnnnnnnnnnnnnnnnnnnnnnnnnnnnnnnnnnnnnnnnnnnnnnnnnnnnnnnnnnnnnnnnnnnnnnnnnnnnnnnnnnnnnnnnnnnnnnnnnnnnnnnnnnnnnnnnnnnnnnnnnnnnnnnnnnnnnnnnnnnnnnnnnnnnnnnnnnnnnnnnnnnnnnnnnnnnnnnnnnnnnnnnnnnnnnnnnnnnnnnnnnnnnnnnnnnnnnnnnnnnnnnnnnnnnnnnnnnnnnnnnnnnnnnnnnnnnnnnnnnnnnnnnnnnnnnnnnnnnnnnnnnnnnnnnnnnnnnnnnnnnnnnnnnnnnnnnnnnnnnnnnnnnnnnnnnnnnnnnnnnnnnnnnnnnnnnnnnnnnnnnnnnnnnnnnnnnnnnnnnnnnnnnnnnnnnnnnnnnnnnnnnnnnnnnnnnnnnnnnnnnnnnnnnnnnnnnnnnnnnnnnnnnnnnnnnnnnnnnnnnnnnnnnnnnnnnnnnnnnnnnnnnnnnnnnnnnnnnnnnnnnnnnnnnnnnnnnnnnnnnnnnnnnnnnnnnnnnnnnnnnnnnnnnnnnnnnnnnnnnnnnnnnnnnnnnnnnnnnnnnnnnnnnnnnnnnnnnnnnnnnnnnnnnnnnnnnnnnnnnnnnnnnnnnnnnnnnnnnnnnnnnnnnnnnnnnnnnnnnnnnnnnnnnnnnnnnnnnnnnnnnnnnnnnnnnnnnnnnnnnnnnnnnnnnnnnnnnnnnnnnnnnnnnnnnnnnnnnnnnnnnnnnnnnnnnnnnnnnnnnnnnnnnnnnnnnnnnnnnnnnnnnnnnnnnnnnnnnnnnnnnnnnnnnnnnnnnnnnnnnnnnnnnnnnnnnnnnnnnnnnnnnnnnnnnnnnnnnnnnnnnnnnnnnnnnnnnnnnnnnnnnnnnnnnnnnnnnnnnnnnnnnnnnnnnnnnnnnnnnnnnnnnnnnnnnnnnnnnnnnnnnnnnnnnnnnnnnnnnnnnnnnnnnnnnnnnnnnnnnnnnnnnnnnnnnnnnnnnnnnnnnnnnnnnnnnnnnnnnnnnnnnnnnnnnnnnnnnnnnnnnnnnnnnnnnnnnnnnnnnnnnnnnnnnnnnnnnnnnnnnnnnnnnnnnnnnnnnnnnnnnnnnnnnnnnnnnnnnnnnnnnnnnnnnnnnnnnnnnnnnnnnnnnnnnnnnnnnnnnnnnnnnnnnnnnnnnnnnnnnnnnnnnnnnnnnnnnnnnnnnnnnnnnnnnnnnnnnnnnnnnnnnnnnnnnnnnnnnnnnnnnnnnnnnnnnnnnnnnnnnnnnnnnnnnnnnnnnnnnnnnnnnnnnnnnnnnnnnnnnnnnnnnnnnnnnnnnnnnnnnnnnnnnnnnnnnnnnnnnnnnnnnnnnnnnnnnnnnnnnnnnnnnnnnnnnnnnnnnnnnnnnnnnnnnnnnnnnnnnnnnnnnnnnnnnnnnnnnnnnnnnnnnnnnnnnnnnnnnnnnnnnnnnnnnnnnnnnnnnnnnnnnnnnnnnnnnnnnnnnnnnnnnnnnnnnnnnnnnnnnnnnnnnnnnnnnnnnnnnnnnnnnnnnnnnnnnnnnnnnnnnnnnnnnnnnnnnnnnnnnnnnnnnnnnnnnnnnnnnnnnnnnnnnnnnnnnnnnnnnnnnnnnnnnnnnnnnnnnnnnnnnnnnnnnnnnnnnnnnnnnnnnnnnnnnnnnnnnnnnnnnnnnnnnnnnnnnnnnnnnnnnnnnnnnnnnnnnnnnnnnnnnnnnnnnnnnnnnnnnnnnnnnnnnnnnnnnnnnnnnnnnnnnnnnnnnnnnnnnnnnnnnnnnnnnnnnnnnnnnnnnnnnnnnnnnnnnnnnnnnnnnnnnnnnnnnnnnnnnnnnnnnnnnnnnnnnnnnnnnnnnnnnnnnnnnnnnnnnnnnnnnnnnnnnnnnnnnnnnnnnnnnnnnnnnnnnnnnnnnnnnnnnnnnnnnnnnnnnnnnnnnnnnnnnnnnnnnnnnnnnnnnnnnnnnnnnnnnnnnnnnnnnnnnnnnnnnnnnnnnnnnnnnnnnnnnnnnnnnnnnnnnnnnnnnnnnnnnnnnnnnnnnnnnnnnnnnnnnnnnnnnnnnnnnnnnnnnnnnnnnnnnnnnnnnnnnnnnnnnnnnnnnnnnnnnnnnnnnnnnnnnnnnnnnnnnnnnnnnnnnnnnnnnnnnnnnnnnnnnnnnnnnnnnnnnnnnnnnnnnnnnnnnnnnnnnnnnnnnnnnnnnnnnnnnnnnnnnnnnnnnnnnnnnnnnnnnnnnnnnnnnnnnnnnnnnnnnnnnnnnnnnnnnnnnnnnnnnnnnnnnnnnnnnnnnnnnnnnnnnnnnnnnnnnnnnnnnnnnnnnnnnnnnnnnnnnnnnnnnnnnnnnnnnnnnnnnnnnnnnnnnnnnnnnnnnnnnnnnnnnnnnnnnnnnnnnnnnnnnnnnnnnnnnnnnnnnnnnnnnnnnnnnnnnnnnnnnnnnnnnnnnnnnnnnnnnnnnnnnnnnnnnnnnnnnnnnnnnnnnnnnnnnnnnnnnnnnnnnnnnnnnnnnnnnnnnnnnnnnnnnnnnnnnnnnnnnnnnnnnnnnnnnnnnnnnnnnnnnnnnnnnnnnnnnnnnnnnnnnnnnnnnnnnnnnnnnnnnnnnnnnnnnnnnnnnnnnnnnnnnnnnnnnnnnnnnnnnnnnnnnnnnnnnnnnnnnnnnnnnnnnnnnnnnnnnnnnnnnnnnnnnnnnnnnnnnnnnnnnnnnnnnnnnnnnnnnnnnnnnnnnnnnnnnnnnnnnnnnnnnnnnnnnnnnnnnnnnnnnnnnnnnnnnnnnnnnnnnnnnnnnnnnnnnnnnnnnnnnnnnnnnnnnnnnnnnnnnnnnnnnnnnnnnnnnnnnnnnnnnnnnnnnnnnnnnnnnnnnnnnnnnnnnnnnnnnnnnnnnnnnnnnnnnnnnnnnnnnnnnnnnnnnnnnnnnnnnnnnnnnnnnnnnnnnnnnnnnnnnnnnnnnnnnnnnnnnnnnnnnnnnnnnnnnnnnnnnnnnnnnnnnnnnnnnnnnnnnnnnnnnnnnnnnnnnnnnnnnnnnnnnnnnnnnnnnnnnnnnnnnnnnnnnnnnnnnnnnnnnnnnnnnnnnnnnnnnnnnnnnnnnnnnnnnnnnnnnnnnnnnnnnnnnnnnnnnnnnnnnnnnnnnnnnnnnnnnnnnnnnnnnnnnnnnnnnnnnnnnnnnnnnnnnnnnnnnnnnnnnnnnnnnnnnnnnnnnnnnnnnnnnnnnnnnnnnnnnnnnnnnnnnnnnnnnnnnnnnnnnnnnnnnnnnnnnnnnnnnnnnnnnnnnnnnnnnnnnnnnnnnnnnnnnnnnnnnnnnnnnnnnnnnnnnnnnnnnnnnnnnnnnnnnnnnnnnnnnnnnnnnnnnnnnnnnnnnnnnnnnnnnnnnnnnnnnnnnnnnnnnnnnnnnnnnnnnnnnnnnnnnnnnnnnnnnnnnnnnnnnnnnnnnnnnnnnnnnnnnnnnnnnnnnnnnnnnnnnnnnnnnnnnnnnnnnnnnnnnnnnnnnnnnnnnnnnnnnnnnnnnnnnnnnnnnnnnnnnnnnnnnnnnnnnnnnnnnnnnnnnnnnnnnnnnnnnnnnnnnnnnnnnnnnnnnnnnnnnnnnnnnnnnnnnnnnnnnnnnnnnnnnnnnnnnnnnnnnnnnnnnnnnnnnnnnnnnnnnnnnnnnnnnnnnnnnnnnnnnnnnnnnnnnnnnnnnnnnnnnnnnnnnnnnnnnnnnnnnnnnnnnnnnnnnnnnnnnnnnnnnnnnnnnnnnnnnnnnnnnnnnnnnnnnnnnnnnnnnnnnnnnnnnnnnnnnnnnnnnnnnnnnnnnnnnnnnnnnnnnnnnnnnnnnnnnnnnnnnnnnnnnnnnnnnnnnnnnnnnnnnnnnnnnnnnnnnnnnnnnnnnnnnnnnnnnnnnnnnnnnnnnnnnnnnnnnnnnnnnnnnnnnnnnnnnnnnnnnnnnnnnnnnnnnnnnnnnnnnnnnnnnnnnnnnnnnnnnnnnnnnnnnnnnnnnnnnnnnnnnnnnnnnnnnnnnnnnnnnnnnnnnnnnnnnnnnnnnnnnnnnnnnnnnnnnnnnnnnnnnnnnnnnnnnnnnnnnnnnnnnnnnnnnnnnnnnnnnnnnnnnnnnnnnnnnnnnnnnnnnnnnnnnnnnnnnnnnnnnnnnnnnnnnnnnnnnnnnnnnnnnnnnnnnnnnnnnnnnnnnnnnnnnnnnnnnnnnnnnnnnnnnnnnnnnnnnnnnnnnnnnnnnnnnnnnnnnnnnnnnnnnnnnnnnnnnnnnnnnnnnnnnnnnnnnnnnnnnnnnnnnnnnnnnnnnnnnnnnnnnnnnnnnnnnnnnnnnnnnnnnnnnnnnnnnnnnnnnnnnnnnnnnnnnnnnnnnnnnnnnnnnnnnnnnnnnnnnnnnnnnnnnnnnnnnnnnnnnnnnnnnnnnnnnnnnnnnnnnnnnnnnnnnnnnnnnnnnnnnnnnnnnnnnnnnnnnnnnnnnnnnnnnnnnnnnnnnnnnnnnnnnnnnnnnnnnnnnnnnnnnnnnnnnnnnnnnnnnnnnnnnnnnnnnnnnnnnnnnnnnnnnnnnnnnnnnnnnnnnnnnnnnnnnnnnnnnnnnnnnnnnnnnnnnnnnnnnnnnnnnnnnnnnnnnnnnnnnnnnnnnnnnnnnnnnnnnnnnnnnnnnnnnnnnnnnnnnnnnnnnnnnnnnnnnnnnnnnnnnnnnnnnnnnnnnnnnnnnnnnnnnnnnnnnnnnnnnnnnnnnnnnnnnnnnnnnnnnnnnnnnnnnnnnnnnnnnnnnnnnnnnnnnnnnnnnnnnnnnnnnnnnnnnnnnnnnnnnnnnnnnnnnnnnnnnnnnnnnnnnnnnnnnnnnnnnnnnnnnnnnnnnnnnnnnnnnnnnnnnnnnnnnnnnnnnnnnnnnnnnnnnnnnnnnnnnnnnnnnnnnnnnnnnnnnnnnnnnnnnnnnnnnnnnnnnnnnnnnnnnnnnnnnnnnnnnnnnnnnnnnnnnnnnnnnnnnnnnnnnnnnnnnnnnnnnnnnnnnnnnnnnnnnnnnnnnnnnnnnnnnnnnnnnnnnnnnnnnnnnnnnnnnnnnnnnnnnnnnnnnnnnnnnnnnnnnnnnnnnnnnnnnnnnnnnnnnnnnnnnnnnnnnnnnnnnnnnnnnnnnnnnnnnnnnnnnnnnnnnnnnnnnnnnnnnnnnnnnnnnnnnnnnnnnnnnnnnnnnnnnnnnnnnnnnnnnnnnnnnnnnnnnnnnnnnnnnnnnnnnnnnnnnnnnnnnnnnnnnnnnnnnnnnnnnnnnnnnnnnnnnnnnnnnnnnnnnnnnnnnnnnnnnnnnnnnnnnnnnnnnnnnnnnnnnnnnnnnnnnnnnnnnnnnnnnnnnnnnnnnnnnnnnnnnnnnnnnnnnnnnnnnnnnnnnnnnnnnnnnnnnnnnnnnnnnnnnnnnnnnnnnnnnnnnnnnnnnnnnnnnnnnnnnnnnnnnnnnnnnnnnnnnnnnnnnnnnnnnnnnnnnnnnnnnnnnnnnnnnnnnnnnnnnnnnnnnnnnnnnnnnnnnnnnnnnnnnnnnnnnnnnnnnnnnnnnnnnnnnnnnnnnnnnnnnnnnnnnnnnnnnnnnnnnnnnnnnnnnnnnnnnnnnnnnnnnnnnnnnnnnnnnnnnnnnnnnnnnnnnnnnnnnnnnnnnnnnnnnnnnnnnnnnnnnnnnnnnnnnnnnnnnnnnnnnnnnnnnnnnnnnnnnnnnnnnnnnnnnnnnnnnnnnnnnnnnnnnnnnnnnnnnnnnnnnnnnnnnnnnnnnnnnnnnnnnnnnnnnnnnnnnnnnnnnnnnnnnnnnnnnnnnnnnnnnnnnnnnnnnnnnnnnnnnnnnnnnnnnnnnnnnnnnnnnnnnnnnnnnnnnnnnnnnnnnnnnnnnnnnnnnnnnnnnnnnnnnnnnnnnnnnnnnnnnnnnnnnnnnnnnnnnnnnnnnnnnnnnnnnnnnnnnnnnnnnnnnnnnnnnnnnnnnnnnnnnnnnnnnnnnnnnnnnnnnnnnnnnnnnnnnnnnnnnnnnnnnnnnnnnnnnnnnnnnnnnnnnnnnnnnnnnnnnnnnnnnnnnnnnnnnnnnnnnnnnnnnnnnnnnnnnnnnnnnnnnnnnnnnnnnnnnnnnnnnnnnnnnnnnnnnnnnnnnnnnnnnnnnnnnnnnnnnnnnnnnnnnnnnnnnnnnnnnnnnnnnnnnnnnnnnnnnnnnnnnnnnnnnnnnnnnnnnnnnnnnnnnnnnnnnnnnnnnnnnnnnnnnnnnnnnnnnnnnnnnnnnnnnnnnnnnnnnnnnnnnnnnnnnnnnnnnnnnnnnnnnnnnnnnnnnnnnnnnnnnnnnnnnnnnnnnnnnnnnnnnnnnnnnnnnnnnnnnnnnnnnnnnnnnnnnnnnnnnnnnnnnnnnnnnnnnnnnnnnnnnnnnnnnnnnnnnnnnnnnnnnnnnnnnnnnnnnnnnnnnnnnnnnnnnnnnnnnnnnnnnnnnnnnnnnnnnnnnnnnnnnnnnnnnnnnnnnnnnnnnnnnnnnnnnnnnnnnnnnnnnnnnnnnnnnnnnnnnnnnnnnnnnnnnnnnnnnnnnnnnnnnnnnnnnnnnnnnnnnnnnnnnnnnnnnnnnnnnnnnnnnnnnnnnnnnnnnnnnnnnnnnnnnnnnnnnnnnnnnnnnnnnnnnnnnnnnnnnnnnnnnnnnnnnnnnnnnnnnnnnnnnnnnnnnnnnnnnnnnnnnnnnnnnnnnnnnnnnnnnnnnnnnnnnnnnnnnnnnnnnnnnnnnnnnnnnnnnnnnnnnnnnnnnnnnnnnnnnnnnnnnnnnnnnnnnnnnnnnnnnnnnnnnnnnnnnnnnnnnnnnnnnnnnnnnnnnnnnnnnnnnnnnnnnnnnnnnnnnnnnnnnnnnnnnnnnnnnnnnnnnnnnnnnnnnnnnnnnnnnnnnnnnnnnnnnnnnnnnnnnnnnnnnnnnnnnnnnnnnnnnnnnnnnnnnnnnnnnnnnnnnnnnnnnnnnnnnnnnnnnnnnnnnnnnnnnnnnnnnnnnnnnnnnnnnnnnnnnnnnnnnnnnnnnnnnnnnnnnnnnnnnnnnnnnnnnnnnnnnnnnnnnnnnnnnnnnnnnnnnnnnnnnnnnnnnnnnnnnnnnnnnnnnnnnnnnnnnnnnnnnnnnnnnnnnnnnnnnnnnnnnnnnnnnnnnnnnnnnnnnnnnnnnnnnnnnnnnnnnnnnnnnnnnnnnnnnnnnnnnnnnnnnnnnnnnnnnnnnnnnnnnnnnnnnnnnnnnnnnnnnnnnnnnnnnnnnnnnnnnnnnnnnnnnnnnnnnnnnnnnnnnnnnnnnnnnnnnnnnnnnnnnnnnnnnnnnnnnnnnnnnnnnnnnnnnnnnnnnnnnnnnnnnnnnnnnnnnnnnnnnnnnnnnnnnnnnnnnnnnnnnnnnnnnnnnnnnnnnnnnnnnnnnnnnnnnnnnnnnnnnnnnnnnnnnnnnnnnnnnnnnnnnnnnnnnnnnnnnnnnnnnnnnnnnnnnnnnnnnnnnnnnnnnnnnnnnnnnnnnnnnnnnnnnnnnnnnnnnnnnnnnnnnnnnnnnnnnnnnnnnnnnnnnnnnnnnnnnnnnnnnnnnnnnnnnnnnnnnnnnnnnnnnnnnnnnnnnnnnnnnnnnnnnnnnnnnnnnnnnnnnnnnnnnnnnnnnnnnnnnnnnnnnnnnnnnnnnnnnnnnnnnnnnnnnnnnnnnnnnnnnnnnnnnnnnnnnnnnnnnnnnnnnnnnnnnnnnnnnnnnnnnnnnnnnnnnnnnnnnnnnnnnnnnnnnnnnnnnnnnnnnnnnnnnnnnnnnnnnnnnnnnnnnnnnnnnnnnnnnnnnnnnnnnnnnnnnnnnnnnnnnnnnnnnnnnnnnnnnnnnnnnnnnnnnnnnnnnnnnnnnnnnnnnnnnnnnnnnnnnnnnnnnnnnnnnnnnnnnnnnnnnnnnnnnnnnnnnnnnnnnnnnnnnnnnnnnnnnnnnnnnnnnnnnnnnnnnnnnnnnnnnnnnnnnnnnnnnnnnnnnnnnnnnnnnnnnnnnnnnnnnnnnnnnnnnnnnnnnnnnnnnnnnnnnnnnnnnnnnnnnnnnnnnnnnnnnnnnnnnnnnnnnnnnnnnnnnnnnnnnnnnnnnnnnnnnnnnnnnnnnnnnnnnnnnnnnnnnnnnnnnnnnnnnnnnnnnnnnnnnnnnnnnnnnnnnnnnnnnnnnnnnnnnnnnnnnnnnnnnnnnnnnnnnnnnnnnnnnnnnnnnnnnnnnnnnnnnnnnnnnnnnnnnnnnnnnnnnnnnnnnnnnnnnnnnnnnnnnnnnnnnnnnnnnnnnnnnnnnnnnnnnnnnnnnnnnnnnnnnnnnnnnnnnnnnnnnnnnnnnnnnnnnnnnnnnnnnnnnnnnnnnnnnnnnnnnnnnnnnnnnnnnnnnnnnnnnnnnnnnnnnnnnnnnnnnnnnnnnnnnnnnnnnnnnnnnnnnnnnnnnnnnnnnnnnnnnnnnnnnnnnnnnnnnnnnnnnnnnnnnnnnnnnnnnnnnnnnnnnnnnnnnnnnnnnnnnnnnnnnnnnnnnnnnnnnnnnnnnnnnnnnnnnnnnnnnnnnnnnnnnnnnnnnnnnnnnnnnnnnnnnnnnnnnnnnnnnnnnnnnnnnnnnnnnnnnnnnnnnnnnnnnnnnnnnnnnnnnnnnnnnnnnnnnnnnnnnnnnnnnnnnnnnnnnnnnnnnnnnnnnnnnnnnnnnnnnnnnnnnnnnnnnnnnnnnnnnnnnnnnnnnnnnnnnnnnnnnnnnnnnnnnnnnnnnnnnnnnnnnnnnnnnnnnnnnnnnnnnnnnnnnnnnnnnnnnnnnnnnnnnnnnnnnnnnnnnnnnnnnnnnnnnnnnnnnnnnnnnnnnnnnnnnnnnnnnnnnnnnnnnnnnnnnnnnnnnnnnnnnnnnnnnnnnnnnnnnnnnnnnnnnnnnnnnnnnnnnnnnnnnnnnnnnnnnnnnnnnnnnnnnnnnnnnnnnnnnnnnnnnnnnnnnnnnnnnnnnnnnnnnnnnnnnnnnnnnnnnnnnnnnnnnnnnnnnnnnnnnnnnnnnnnnnnnnnnnnnnnnnnnnnnnnnnnnnnnnnnnnnnnnnnnnnnnnnnnnnnnnnnnnnnnnnnnnnnnnnnnnnnnnnnnnnnnnnnnnnnnnnnnnnnnnnnnnnnnnnnnnnnnnnnnnnnnnnnnnnnnnnnnnnnnnnnnnnnnnnnnnnnnnnnnnnnnnnnnnnnnnnnnnnnnnnnnnnnnnnnnnnnnnnnnnnnnnnnnnnnnnnnnnnnnnnnnnnnnnnnnnnnnnnnnnnnnnnnnnnnnnnnnnnnnnnnnnnnnnnnnnnnnnnnnnnnnnnnnnnnnnnnnnnnnnnnnnnnnnnnnnnnnnnnnnnnnnnnnnnnnnnnnnnnnnnnnnnnnnnnnnnnnnnnnnnnnnnnnnnnnnnnnnnnnnnnnnnnnnnnnnnnnnnnnnnnnnnnnnnnnnnnnnnnnnnnnnnnnnnnnnnnnnnnnnnnnnnnnnnnnnnnnnnnnnnnnnnnnnnnnnnnnnnnnnnnnnnnnnnnnnnnnnnnnnnnnnnnnnnnnnnnnnnnnnnnnnnnnnnnnnnnnnnnnnnnnnnnnnnnnnnnnnnnnnnnnnnnnnnnnnnnnnnnnnnnnnnnnnnnnnnnnnnnnnnnnnnnnnnnnnnnnnnnnnnnnnnnnnnnnnnnnnnnnnnnnnnnnnnnnnnnnnnnnnnnnnnnnnnnnnnnnnnnnnnnnnnnnnnnnnnnnnnnnnnnnnnnnnnnnnnnnnnnnnnnnnnnnnnnnnnnnnnnnnnnnnnnnnnnnnnnnnnnnnnnnnnnnnnnnnnnnnnnnnnnnnnnnnnnnnnnnnnnnnnnnnnnnnnnnnnnnnnnnnnnnnnnnnnnnnnnnnnnnnnnnnnnnnnnnnnnnnnnnnnnnnnnnnnnnnnnnnnnnnnnnnnnnnnnnnnnnnnnnnnnnnnnnnnnnnnnnnnnnnnnnnnnnnnnnnnnnnnnnnnnnnnnnnnnnnnnnnnnnnnnnnnnnnnnnnnnnnnnnnnnnnnnnnnnnnnnnnnnnnnnnnnnnnnnnnnnnnnnnnnnnnnnnnnnnnnnnnnnnnnnnnnnnnnnnnnnnnnnnnnnnnnnnnnnnnnnnnnnnnnnnnnnnnnnnnnnnnnnnnnnnnnnnnnnnnnnnnnnnnnnnnnnnnnnnnnnnnnnnnnnnnnnnnnnnnnnnnnnnnnnnnnnnnnnnnnnnnnnnnnnnnnnnnnnnnnnnnnnnnnnnnnnnnnnnnnnnnnnnnnnnnnnnnnnnnnnnnnnnnnnnnnnnnnnnnnnnnnnnnnnnnnnnnnnnnnnnnnnnnnnnnnnnnnnnnnnnnnnnnnnnnnnnnnnnnnnnnnnnnnnnnnnnnnnnnnnnnnnnnnnnnnnnnnnnnnnnnnnnnnnnnnnnnnnnnnnnnnnnnnnnnnnnnnnnnnnnnnnnnnnnnnnnnnnnnnnnnnnnnnnnnnnnnnnnnnnnnnnnnnnnnnnnnnnnnnnnnnnnnnnnnnnnnnnnnnnnnnnnnnnnnnnnnnnnnnnnnnnnnnnnnnnnnnnnnnnnnnnnnnnnnnnnnnnnnnnnnnnnnnnnnnnnnnnnnnnnnnnnnnnnnnnnnnnnnnnnnnnnnnnnnnnnnnnnnnnnnnnnnnnnnnnnnnnnnnnnnnnnnnnnnnnnnnnnnnnnnnnnnnnnnnnnnnnnnnnnnnnnnnnnnnnnnnnnnnnnnnnnnnnnnnnnnnnnnnnnnnnnnnnnnnnnnnnnnnnnnnnnnnnnnnnnnnnnnnnnnnnnnnnnnnnnnnnnnnnnnnnnnnnnnnnnnnnnnnnnnnnnnnnnnnnnnnnnnnnnnnnnnnnnnnnnnnnnnnnnnnnnnnnnnnnnnnnnnnnnnnnnnnnnnnnnnnnnnnnnnnnnnnnnnnnnnnnnnnnnnnnnnnnnnnnnnnnnnnnnnnnnnnnnnnnnnnnnnnnnnnnnnnnnnnnnnnnnnnnnnnnnnnnnnnnnnnnnnnnnnnnnnnnnnnnnnnnnnnnnnnnnnnnnnnnnnnnnnnnnnnnnnnnnnnnnnnnnnnnnnnnnnnnnnnnnnnnnnnnnnnnnnnnnnnnnnnnnnnnnnnnnnnnnnnnnnnnnnnnnnnnnnnnnnnnnnnnnnnnnnnnnnnnnnnnnnnnnnnnnnnnnnnnnnnnnnnnnnnnnnnnnnnnnnnnnnnnnnnnnnnnnnnnnnnnnnnnnnnnnnnnnnnnnnnnnnnnnnnnnnnnnnnnnnnnnnnnnnnnnnnnnnnnnnnnnnnnnnnnnnnnnnnnnnnnnnnnnnnnnnnnnnnnnnnnnnnnnnnnnnnnnnnnnnnnnnnnnnnnnnnnnnnnnnnnnnnnnnnnnnnnnnnnnnnnnnnnnnnnnnnnnnnnnnnnnnnnnnnnnnnnnnnnnnnnnnnnnnnnnnnnnnnnnnnnnnnnnnnnnnnnnnnnnnnnnnnnnnnnnnnnnnnnnnnnnnnnnnnnnnnnnnnnnnnnnnnnnnnnnnnnnnnnnnnnnnnnnnnnnnnnnnnnnnnnnnnnnnnnnnnnnnnnnnnnnnnnnnnnnnnnnnnnnnnnnnnnnnnnnnnnnnnnnnnnnnnnnnnnnnnnnnnnnnnnnnnnnnnnnnnnnnnnnnnnnnnnnnnnnnnnnnnnnnnnnnnnnnnnnnnnnnnnnnnnnnnnnnnnnnnnnnnnnnnnnnnnnnnnnnnnnnnnnnnnnnnnnnnnnnnnnnnnnnnnnnnnnnnnnnnnnnnnnnnnnnnnnnnnnnnnnnnnnnnnnnnnnnnnnnnnnnnnnnnnnnnnnnnnnnnnnnnnnnnnnnnnnnnnnnnnnnnnnnnnnnnnnnnnnnnnnnnnnnnnnnnnnnnnnnnnnnnnnnnnnnnnnnnnnnnnnnnnnnnnnnnnnnnnnnnnnnnnnnnnnnnnnnnnnnnnnnnnnnnnnnnnnnnnnnnnnnnnnnnnnnnnnnnnnnnnnnnnnnnnnnnnnnnnnnnnnnnnnnnnnnnnnnnnnnnnnnnnnnnnnnnnnnnnnnnnnnnnnnnnnnnnnnnnnnnnnnnnnnnnnnnnnnnnnnnnnnnnnnnnnnnnnnnnnnnnnnnnnnnnnnnnnnnnnnnnnnnnnnnnnnnnnnnnnnnnnnnnnnnnnnnnnnnnnnnnnnnnnnnnnnnnnnnnnnnnnnnnnnnnnnnnnnnnnnnnnnnnnnnnnnnnnnnnnnnnnnnnnnnnnnnnnnnnnnnnnnnnnnnnnnnnnnnnnnnnnnnnnnnnnnnnnnnnnnnnnnnnnnnnnnnnnnnnnnnnnnnnnnnnnnnnnnnnnnnnnnnnnnnnnnnnnnnnnnnnnnnnnnnnnnnnnnnnnnnnnnnnnnnnnnnnnnnnnnnnnnnnnnnnnnnnnnnnnnnnnnnnnnnnnnnnnnnnnnnnnnnnnnnnnnnnnnnnnnnnnnnnnnnnnnnnnnnnnnnnnnnnnnnnnnnnnnnnnnnnnnnnnnnnnnnnnnnnnnnnnnnnnnnnnnnnnnnnnnnnnnnnnnnnnnnnnnnnnnnnnnnnnnnnnnnnnnnnnnnnnnnnnnnnnnnnnnnnnnnnnnnnnnnnnnnnnnnnnnnnnnnnnnnnnnnnnnnnnnnnnnnnnnnnnnnnnnnnnnnnnnnnnnnnnnnnnnnnnnnnnnnnnnnnnnnnnnnnnnnnnnnnnnnnnnnnnnnnnnnnnnnnnnnnnnnnnnnnnnnnnnnnnnnnnnnnnnnnnnnnnnnnnnnnnnnnnnnnnnnnnnnnnnnnnnnnnnnnnnnnnnnnnnnnnnnnnnnnnnnnnnnnnnnnnnnnnnnnnnnnnnnnnnnnnnnnnnnnnnnnnnnnnnnnnnnnnnnnnnnnnnnnnnnnnnnnnnnnnnnnnnnnnnnnnnnnnnnnnnnnnnnnnnnnnnnnnnnnnnnnnnnnnnnnnnnnnnnnnnnnnnnnnnnnnnnnnnnnnnnnnnnnnnnnnnnnnnnnnnnnnnnnnnnnnnnnnnnnnnnnnnnnnnnnnnnnnnnnnnnnnnnnnnnnnnnnnnnnnnnnnnnnnnnnnnnnnnnnnnnnnnnnnnnnnnnnnnnnnnnnnnnnnnnnnnnnnnnnnnnnnnnnnnnnnnnnnnnnnnnnnnnnnnnnnnnnnnnnnnnnnnnnnnnnnnnnnnnnnnnnnnnnnnnnnnnnnnnnnnnnnnnnnnnnnnnnnnnnnnnnnnnnnnnnnnnnnnnnnnnnnnnnnnnnnnnnnnnnnnnnnnnnnnnnnnnnnnnnnnnnnnnnnnnnnnnnnnnnnnnnnnnnnnnnnnnnnnnnnnnnnnnnnnnnnnnnnnnnnnnnnnnnnnnnnnnnnnnnnnnnnnnnnnnnnnnnnnnnnnnnnnnnnnnnnnnnnnnnnnnnnnnnnnnnnnnnnnnnnnnnnnnnnnnnnnnnnnnnnnnnnnnnnnnnnnnnnnnnnnnnnnnnnnnnnnnnnnnnnnnnnnnnnnnnnnnnnnnnnnnnnnnnnnnnnnnnnnnnnnnnnnnnnnnnnnnnnnnnnnnnnnnnnnnnnnnnnnnnnnnnnnnnnnnnnnnnnnnnnnnnnnnnnnnnnnnnnnnnnnnnnnnnnnnnnnnnnnnnnnnnnnnnnnnnnnnnnnnnnnnnnnnnnnnnnnnnnnnnnnnnnnnnnnnnnnnnnnnnnnnnnnnnnnnnnnnnnnnnnnnnnnnnnnnnnnnnnnnnnnnnnnnnnnnnnnnnnnnnnnnnnnnnnnnnnnnnnnnnnnnnnnnnnnnnnnnnnnnnnnnnnnnnnnnnnnnnnnnnnnnnnnnnnnnnnnnnnnnnnnnnnnnnnnnnnnnnnnnnnnnnnnnnnnnnnnnnnnnnnnnnnnnnnnnnnnnnnnnnnnnnnnnnnnnnnnnnnnnnnnnnnnnnnnnnnnnnnnnnnnnnnnnnnnnnnnnnnnnnnnnnnnnnnnnnnnnnnnnnnnnnnnnnnnnnnnnnnnnnnnnnnnnnnnnnnnnnnnnnnnnnnnnnnnnnnnnnnnnnnnnnnnnnnnnnnnnnnnnnnnnnnnnnnnnnnnnnnnnnnnnnnnnnnnnnnnnnnnnnnnnnnnnnnnnnnnnnnnnnnnnnnnnnnnnnnnnnnnnnnnnnnnnnnnnnnnnnnnnnnnnnnnnnnnnnnnnnnnnnnnnnnnnnnnnnnnnnnnnnnnnnnnnnnnnnnnnnnnnnnnnnnnnnnnnnnnnnnnnnnnnnnnnnnnnnnnnnnnnnnnnnnnnnnnnnnnnnnnnnnnnnnnnnnnnnnnnnnnnnnnnnnnnnnnnnnnnnnnnnnnnnnnnnnnnnnnnnnnnnnnnnnnnnnnnnnnnnnnnnnnnnnnnnnnnnnnnnnnnnnnnnnnnnnnnnnnnnnnnnnnnnnnnnnnnnnnnnnnnnnnnnnnnnnnnnnnnnnnnnnnnnnnnnnnnnnnnnnnnnnnnnnnnnnnnnnnnnnnnnnnnnnnnnnnnnnnnnnnnnnnnnnnnnnnnnnnnnnnnnnnnnnnnnnnnnnnnnnnnnnnnnnnnnnnnnnnnnnnnnnnnnnnnnnnnnnnnnnnnnnnnnnnnnnnnnnnnnnnnnnnnnnnnnnnnnnnnnnnnnnnnnnnnnnnnnnnnnnnnnnnnnnnnnnnnnnnnnnnnnnnnnnnnnnnnnnnnnnnnnnnnnnnnnnnnnnnnnnnnnnnnnnnnnnnnnnnnnnnnnnnnnnnnnnnnnnnnnnnnnnnnnnnnnnnnnnnnnnnnnnnnnnnnnnnnnnnnnnnnnnnnnnnnnnnnnnnnnnnnnnnnnnnnnnnnnnnnnnnnnnnnnnnnnnnnnnnnnnnnnnnnnnnnnnnnnnnnnnnnnnnnnnnnnnnnnnnnnnnnnnnnnnnnnnnnnnnnnnnnnnnnnnnnnnnnnnnnnnnnnnnnnnnnnnnnnnnnnnnnnnnnnnnnnnnnnnnnnnnnnnnnnnnnnnnnnnnnnnnnnnnnnnnnnnnnnnnnnnnnnnnnnnnnnnnnnnnnnnnnnnnnnnnnnnnnnnnnnnnnnnnnnnnnnnnnnnnnnnnnnnnnnnnnnnnnnnnnnnnnnnnnnnnnnnnnnnnnnnnnnnnnnnnnnnnnnnnnnnnnnnnnnnnnnnnnnnnnnnnnnnnnnnnnnnnnnnnnnnnnnnnnnnnnnnnnnnnnnnnnnnnnnnnnnnnnnnnnnnnnnnnnnnnnnnnnnnnnnnnnnnnnnnnnnnnnnnnnnnnnnnnnnnnnnnnnnnnnnnnnnnnnnnnnnnnnnnnnnnnnnnnnnnnnnnnnnnnnnnnnnnnnnnnnnnnnnnnnnnnnnnnnnnnnnnnnnnnnnnnnnnnnnnnnnnnnnnnnnnnnnnnnnnnnnnnnnnnnnnnnnnnnnnnnnnnnnnnnnnnnnnnnnnnnnnnnnnnnnnnnnnnnnnnnnnnnnnnnnnnnnnnnnnnnnnnnnnnnnnnnnnnnnnnnnnnnnnnnnnnnnnnnnnnnnnnnnnnnnnnnnnnnnnnnnnnnnnnnnnnnnnnnnnnnnnnnnnnnnnnnnnnnnnnnnnnnnnnnnnnnnnnnnnnnnnnnnnnnnnnnnnnnnnnnnnnnnnnnnnnnnnnnnnnnnnnnnnnnnnnnnnnnnnnnnnnnnnnnnnnnnnnnnnnnnnnnnnnnnnnnnnnnnnnnnnnnnnnnnnnnnnnnnnnnnnnnnnnnnnnnnnnnnnnnnnnnnnnnnnnnnnnnnnnnnnnnnnnnnnnnnnnnnnnnnnnnnnnnnnnnnnnnnnnnnnnnnnnnnnnnnnnnnnnnnnnnnnnnnnnnnnnnnnnnnnnnnnnnnnnnnnnnnnnnnnnnnnnnnnnnnnnnnnnnnnnnnnnnnnnnnnnnnnnnnnnnnnnnnnnnnnnnnnnnnnnnnnnnnnnnnnnnnnnnnnnnnnnnnnnnnnnnnnnnnnnnnnnnnnnnnnnnnnnnnnnnnnnnnnnnnnnnnnnnnnnnnnnnnnnnnnnnnnnnnnnnnnnnnnnnnnnnnnnnnnnnnnnnnnnnnnnnnnnnnnnnnnnnnnnnnnnnnnnnnnnnnnnnnnnnnnnnnnnnnnnnnnnnnnnnnnnnnnnnnnnnnnnnnnnnnnnnnnnnnnnnnnnnnnnnnnnnnnnnnnnnnnnnnnnnnnnnnnnnnnnnnnnnnnnnnnnnnnnnnnnnnnnnnnnnnnnnnnnnnnnnnnnnnnnnnnnnnnnnnnnnnnnnnnnnnnnnnnnnnnnnnnnnnnnnnnnnnnnnnnnnnnnnnnnnnnnnnnnnnnnnnnnnnnnnnnnnnnnnnnnnnnnnnnnnnnnnnnnnnnnnnnnnnnnnnnnnnnnnnnnnnnnnnnnnnnnnnnnnnnnnnnnnnnnnnnnnnnnnnnnnnnnnnnnnnnnnnnnnnnnnnnnnnnnnnnnnnnnnnnnnnnnnnnnnnnnnnnnnnnnnnnnnnnnnnnnnnnnnnnnnnnnnnnnnnnnnnnnnnnnnnnnnnnnnnnnnnnnnnnnnnnnnnnnnnnnnnnnnnnnnnnnnnnnnnnnnnnnnnnnnnnnnnnnnnnnnnnnnnnnnnnnnnnnnnnnnnnnnnnnnnnnnnnnnnnnnnnnnnnnnnnnnnnnnnnnnnnnnnnnnnnnnnnnnnnnnnnnnnnnnnnnnnnnnnnnnnnnnnnnnnnnnnnnnnnnnnnnnnnnnnnnnnnnnnnnnnnnnnnnnnnnnnnnnnnnnnnnnnnnnnnnnnnnnnnnnnnnnnnnnnnnnnnnnnnnnnnnnnnnnnnnnnnnnnnnnnnnnnnnnnnnnnnnnnnnnnnnnnnnnnnnnnnnnnnnnnnnnnnnnnnnnnnnnnnnnnnnnnnnnnnnnnnnnnnnnnnnnnnnnnnnnnnnnnnnnnnnnnnnnnnnnnnnnnnnnnnnnnnnnnnnnnnnnnnnnnnnnnnnnnnnnnnnnnnnnnnnnnnnnnnnnnnnnnnnnnnnnnnnnnnnnnnnnnnnnnnnnnnnnnnnnnnnnnnnnnnnnnnnnnnnnnnnnnnnnnnnnnnnnnnnnnnnnnnnnnnnnnnnnnnnnnnnnnnnnnnnnnnnnnnnnnnnnnnnnnnnnnnnnnnnnnnnnnnnnnnnnnnnnnnnnnnnnnnnnnnnnnnnnnnnnnnnnnnnnnnnnnnnnnnnnnnnnnnnnnnnnnnnnnnnnnnnnnnnnnnnnnnnnnnnnnnnnnnnnnnnnnnnnnnnnnnnnnnnnnnnnnnnnnnnnnnnnnnnnnnnnnnnnnnnnnnnnnnnnnnnnnnnnnnnnnnnnnnnnnnnnnnnnnnnnnnnnnnnnnnnnnnnnnnnnnnnnnnnnnnnnnnnnnnnnnnnnnnnnnnnnnnnnnnnnnnnnnnnnnnnnnnnnnnnnnnnnnnnnnnnnnnnnnnnnnnnnnnnnnnnnnnnnnnnnnnnnnnnnnnnnnnnnnnnnnnnnnnnnnnnnnnnnnnnnnnnnnnnnnnnnnnnnnnnnnnnnnnnnnnnnnnnnnnnnnnnnnnnnnnnnnnnnnnnnnnnnnnnnnnnnnnnnnnnnnnnnnnnnnnnnnnnnnnnnnnnnnnnnnnnnnnnnnnnnnnnnnnnnnnnnnnnnnnnnnnnnnnnnnnnnnnnnnnnnnnnnnnnnnnnnnnnnnnnnnnnnnnnnnnnnnnnnnnnnnnnnnnnnnnnnnnnnnnnnnnnnnnnnnnnnnnnnnnnnnnnnnnnnnnnnnnnnnnnnnnnnnnnnnnnnnnnnnnnnnnnnnnnnnnnnnnnnnnnnnnnnnnnnnnnnnnnnnnnnnnnnnnnnnnnnnnnnnnnnnnnnnnnnnnnnnnnnnnnnnnnnnnnnnnnnnnnnnnnnnnnnnnnnnnnnnnnnnnnnnnnnnnnnnnnnnnnnnnnnnnnnnnnnnnnnnnnnnnnnnnnnnnnnnnnnnnnnnnnnnnnnnnnnnnnnnnnnnnnnnnnnnnnnnnnnnnnnnnnnnnnnnnnnnnnnnnnnnnnnnnnnnnnnnnnnnnnnnnnnnnnnnnnnnnnnnnnnnnnnnnnnnnnnnnnnnnnnnnnnnnnnnnnnnnnnnnnnnnnnnnnnnnnnnnnnnnnnnnnnnnnnnnnnnnnnnnnnnnnnnnnnnnnnnnnnnnnnnnnnnnnnnnnnnnnnnnnnnnnnnnnnnnnnnnnnnnnnnnnnnnnnnnnnnnnnnnnnnnnnnnnnnnnnnnnnnnnnnnnnnnnnnnnnnnnnnnnnnnnnnnnnnnnnnnnnnnnnnnnnnnnnnnnnnnnnnnnnnnnnnnnnnnnnnnnnnnnnnnnnnnnnnnnnnnnnnnnnnnnnnnnnnnnnnnnnnnnnnnnnnnnnnnnnnnnnnnnnnnnnnnnnnnnnnnnnnnnnnnnnnnnnnnnnnnnnnnnnnnnnnnnnnnnnnnnnnnnnnnnnnnnnnnnnnnnnnnnnnnnnnnnnnnnnnnnnnnnnnnnnnnnnnnnnnnnnnnnnnnnnnnnnnnnnnnnnnnnnnnnnnnnnnnnnnnnnnnnnnnnnnnnnnnnnnnnnnnnnnnnnnnnnnnnnnnnnnnnnnnnnnnnnnnnnnnnnnnnnnnnnnnnnnnnnnnnnnnnnnnnnnnnnnnnnnnnnnnnnnnnnnnnnnnnnnnnnnnnnnnnnnnnnnnnnnnnnnnnnnnnnnnnnnnnnnnnnnnnnnnnnnnnnnnnnnnnnnnnnnnnnnnnnnnnnnnnnnnnnnnnnnnnnnnnnnnnnnnnnnnnnnnnnnnnnnnnnnnnnnnnnnnnnnnnnnnnnnnnnnnnnnnnnnnnnnnnnnnnnnnnnnnnnnnnnnnnnnnnnnnnnnnnnnnnnnnnnnnnnnnnnnnnnnnnnnnnnnnnnnnnnnnnnnnnnnnnnnnnnnnnnnnnnnnnnnnnnnnnnnnnnnnnnnnnnnnnnnnnnnnnnnnnnnnnnnnnnnnnnnnnnnnnnnnnnnnnnnnnnnnnnnnnnnnnnnnnnnnnnnnnnnnnnnnnnnnnnnnnnnnnnnnnnnnnnnnnnnnnnnnnnnnnnnnnnnnnnnnnnnnnnnnnnnnnnnnnnnnnnnnnnnnnnnnnnnnnnnnnnnnnnnnnnnnnnnnnnnnnnnnnnnnnnnnnnnnnnnnnnnnnnnnnnnnnnnnnnnnnnnnnnnnnnnnnnnnnnnnnnnnnnnnnnnnnnnnnnnnnnnnnnnnnnnnnnnnnnnnnnnnnnnnnnnnnnnnnnnnnnnnnnnnnnnnnnnnnnnnnnnnnnnnnnnnnnnnnnnnnnnnnnnnnnnnnnnnnnnnnnnnnnnnnnnnnnnnnnnnnnnnnnnnnnnnnnnnnnnnnnnnnnnnnnnnnnnnnnnnnnnnnnnnnnnnnnnnnnnnnnnnnnnnnnnnnnnnnnnnnnnnnnnnnnnnnnnnnnnnnnnnnnnnnnnnnnnnnnnnnnnnnnnnnnnnnnnnnnnnnnnnnnnnnnnnnnnnnnnnnnnnnnnnnnnnnnnnnnnnnnnnnnnnnnnnnnnnnnnnnnnnnnnnnnnnnnnnnnnnnnnnnnnnnnnnnnnnnnnnnnnnnnnnnnnnnnnnnnnnnnnnnnnnnnnnnnnnnnnnnnnnnnnnnnnnnnnnnnnnnnnnnnnnnnnnnnnnnnnnnnnnnnnnnnnnnnnnnnnnnnnnnnnnnnnnnnnnnnnnnnnnnnnnnnnnnnnnnnnnnnnnnnnnnnnnnnnnnnnnnnnnnnnnnnnnnnnnnnnnnnnnnnnnnnnnnnnnnnnnnnnnnnnnnnnnnnnnnnnnnnnnnnnnnnnnnnnnnnnnnnnnnnnnnnnnnnnnnnnnnnnnnnnnnnnnnnnnnnnnnnnnnnnnnnnnnnnnnnnnnnnnnnnnnnnnnnnnnnnnnnnnnnnnnnnnnnnnnnnnnnnnnnnnnnnnnnnnnnnnnnnnnnnnnnnnnnnnnnnnnnnnnnnnnnnnnnnnnnnnnnnnnnnnnnnnnnnnnnnnnnnnnnnnnnnnnnnnnnnnnnnnnnnnnnnnnnnnnnnnnnnnnnnnnnnnnnnnnnnnnnnnnnnnnnnnnnnnnnnnnnnnnnnnnnnnnnnnnnnnnnnnnnnnnnnnnnnnnnnnnnnnnnnnnnnnnnnnnnnnnnnnnnnnnnnnnnnnnnnnnnnnnnnnnnnnnnnnnnnnnnnnnnnnnnnnnnnnnnnnnnnnnnnnnnnnnnnnnnnnnnnnnnnnnnnnnnnnnnnnnnnnnnnnnnnnnnnnnnnnnnnnnnnnnnnnnnnnnnnnnnnnnnnnnnnnnnnnnnnnnnnnnnnnnnnnnnnnnnnnnnnnnnnnnnnnnnnnnnnnnnnnnnnnnnnnnnnnnnnnnnnnnnnnnnnnnnnnnnnnnnnnnnnnnnnnnnnnnnnnnnnnnnnnnnnnnnnnnnnnnnnnnnnnnnnnnnnnnnnnnnnnnnnnnnnnnnnnnnnnnnnnnnnnnnnnnnnnnnnnnnnnnnnnnnnnnnnnnnnnnnnnnnnnnnnnnnnnnnnnnnnnnnnnnnnnnnnnnnnnnnnnnnnnnnnnnnnnnnnnnnnnnnnnnnnnnnnnnnnnnnnnnnnnnnnnnnnnnnnnnnnnnnnnnnnnnnnnnnnnnnnnnnnnnnnnnnnnnnnnnnnnnnnnnnnnnnnnnnnnnnnnnnnnnnnnnnnnnnnnnnnnnnnnnnnnnnnnnnnnnnnnnnnnnnnnnnnnnnnnnnnnnnnnnnnnnnnnnnnnnnnnnnnnnnnnnnnnnnnnnnnnnnnnnnnnnnnnnnnnnnnnnnnnnnnnnnnnnnnnnnnnnnnnnnnnnnnnnnnnnnnnnnnnnnnnnnnnnnnnnnnnnnnnnnnnnnnnnnnnnnnnnnnnnnnnnnnnnnnnnnnnnnnnnnnnnnnnnnnnnnnnnnnnnnnnnnnnnnnnnnnnnnnnnnnnnnnnnnnnnnnnnnnnnnnnnnnnnnnnnnnnnnnnnnnnnnnnnnnnnnnnnnnnnnnnnnnnnnnnnnnnnnnnnnnnnnnnnnnnnnnnnnnnnnnnnnnnnnnnnnnnnnnnnnnnnnnnnnnnnnnnnnnnnnnnnnnnnnnnnnnnnnnnnnnnnnnnnnnnnnnnnnnnnnnnnnnnnnnnnnnnnnnnnnnnnnnnnnnnnnnnnnnnnnnnnnnnnnnnnnnnnnnnnnnnnnnnnnnnnnnnnnnnnnnnnnnnnnnnnnnnnnnnnnnnnnnnnnnnnnnnnnnnnnnnnnnnnnnnnnnnnnnnnnnnnnnnnnnnnnnnnnnnnnnnnnnnnnnnnnnnnnnnnnnnnnnnnnnnnnnnnnnnnnnnnnnnnnnnnnnnnnnnnnnnnnnnnnnnnnnnnnnnnnnnnnnnnnnnnnnnnnnnnnnnnnnnnnnnnnnnnnnnnnnnnnnnnnnnnnnnnnnnnnnnnnnnnnnnnnnnnnnnnnnnnnnnnnnnnnnnnnnnnnnnnnnnnnnnnnnnnnnnnnnnnnnnnnnnnnnnnnnnnnnnnnnnnnnnnnnnnnnnnnnnnnnnnnnnnnnnnnnnnnnnnnnnnnnnnnnnnnnnnnnnnnnnnnnnnnnnnnnnnnnnnnnnnnnnnnnnnnnnnnnnnnnnnnnnnnnnnnnnnnnnnnnnnnnnnnnnnnnnnnnnnnnnnnnnnnnnnnnnnnnnnnnnnnnnnnnnnnnnnnnnnnnnnnnnnnnnnnnnnnnnnnnnnnnnnnnnnnnnnnnnnnnnnnnnnnnnnnnnnnnnnnnnnnnnnnnnnnnnnnnnnnnnnnnnnnnnnnnnnnnnnnnnnnnnnnnnnnnnnnnnnnnnnnnnnnnnnnnnnnnnnnnnnnnnnnnnnnnnnnnnnnnnnnnnnnnnnnnnnnnnnnnnnnnnnnnnnnnnnnnnnnnnnnnnnnnnnnnnnnnnnnnnnnnnnnnnnnnnnnnnnnnnnnnnnnnnnnnnnnnnnnnnnnnnnnnnnnnnnnnnnnnnnnnnnnnnnnnnnnnnnnnnnnnnnnnnnnnnnnnnnnnnnnnnnnnnnnnnnnnnnnnnnnnnnnnnnnnnnnnnnnnnnnnnnnnnnnnnnnnnnnnnnnnnnnnnnnnnnnnnnnnnnnnnnnnnnnnnnnnnnnnnnnnnnnnnnnnnnnnnnnnnnnnnnnnnnnnnnnnnnnnnnnnnnnnnnnnnnnnnnnnnnnnnnnnnnnnnnnnnnnnnnnnnnnnnnnnnnnnnnnnnnnnnnnnnnnnnnnnnnnnnnnnnnnnnnnnnnnnnnnnnnnnnnnnnnnnnnnnnnnnnnnnnnnnnnnnnnnnnnnnnnnnnnnnnnnnnnnnnnnnnnnnnnnnnnnnnnnnnnnnnnnnnnnnnnnnnnnnnnnnnnnnnnnnnnnnnnnnnnnnnnnnnnnnnnnnnnnnnnnnnnnnnnnnnnnnnnnnnnnnnnnnnnnnnnnnnnnnnnnnnnnnnnnnnnnnnnnnnnnnnnnnnnnnnnnnnnnnnnnnnnnnnnnnnnnnnnnnnnnnnnnnnnnnnnnnnnnnnnnnnnnnnnnnnnnnnnnnnnnnnnnnnnnnnnnnnnnnnnnnnnnnnnnnnnnnnnnnnnnnnnnnnnnnnnnnnnnnnnnnnnnnnnnnnnnnnnnnnnnnnnnnnnnnnnnnnnnnnnnnnnnnnnnnnnnnnnnnnnnnnnnnnnnnnnnnnnnnnnnnnnnnnnnnnnnnnnnnnnnnnnnnnnnnnnnnnnnnnnnnnnnnnnnnnnnnnnnnnnnnnnnnnnnnnnnnnnnnnnnnnnnnnnnnnnnnnnnnnnnnnnnnnnnnnnnnnnnnnnnnnnnnnnnnnnnnnnnnnnnnnnnnnnnnnnnnnnnnnnnnnnnnnnnnnnnnnnnnnnnnnnnnnnnnnnnnnnnnnnnnnnnnnnnnnnnnnnnnnnnnnnnnnnnnnnnnnnnnnnnnnnnnnnnnnnnnnnnnnnnnnnnnnnnnnnnnnnnnnnnnnnnnnnnnnnnnnnnnnnnnnnnnnnnnnnnnnnnnnnnnnnnnnnnnnnnnnnnnnnnnnnnnnnnnnnnnnnnnnnnnnnnnnnnnnnnnnnnnnnnnnnnnnnnnnnnnnnnnnnnnnnnnnnnnnnnnnnnnnnnnnnnnnnnnnnnnnnnnnnnnnnnnnnnnnnnnnnnnnnnnnnnnnnnnnnnnnnnnnnnnnnnnnnnnnnnnnnnnnnnnnnnnnnnnnnnnnnnnnnnnnnnnnnnnnnnnnnnnnnnnnnnnnnnnnnnnnnnnnnnnnnnnnnnnnnnnnnnnnnnnnnnnnnnnnnnnnnnnnnnnnnnnnnnnnnnnnnnnnnnnnnnnnnnnnnnnnnnnnnnnnnnnnnnnnnnnnnnnnnnnnnnnnnnnnnnnnnnnnnnnnnnnnnnnnnnnnnnnnnnnnnnnnnnnnnnnnnnnnnnnnnnnnnnnnnnnnnnnnnnnnnnnnnnnnnnnnnnnnnnnnnnnnnnnnnnnnnnnnnnnnnnnnnnnnnnnnnnnnnnnnnnnnnnnnnnnnnnnnnnnnnnnnnnnnnnnnnnnnnnnnnnnnnnnnnnnnnnnnnnnnnnnnnnnnnnnnnnnnnnnnnnnnnnnnnnnnnnnnnnnnnnnnnnnnnnnnnnnnnnnnnnnnnnnnnnnnnnnnnnnnnnnnnnnnnnnnnnnnnnnnnnnnnnnnnnnnnnnnnnnnnnnnnnnnnnnnnnnnnnnnnnnnnnnnnnnnnnnnnnnnnnnnnnnnnnnnnnnnnnnnnnnnnnnnnnnnnnnnnnnnnnnnnnnnnnnnnnnnnnnnnnnnnnnnnnnnnnnnnnnnnnnnnnnnnnnnnnnnnnnnnnnnnnnnnnnnnnnnnnnnnnnnnnnnnnnnnnnnnnnnnnnnnnnnnnnnnnnnnnnnnnnnnnnnnnnnnnnnnnnnnnnnnnnnnnnnnnnnnnnnnnnnnnnnnnnnnnnnnnnnnnnnnnnnnnnnnnnnnnnnnnnnnnnnnnnnnnnnnnnnnnnnnnnnnnnnnnnnnnnnnnnnnnnnnnnnnnnnnnnnnnnnnnnnnnnnnnnnnnnnnnnnnnnnnnnnnnnnnnnnnnnnnnnnnnnnnnnnnnnnnnnnnnnnnnnnnnnnnnnnnnnnnnnnnnnnnnnnnnnnnnnnnnnnnnnnnnnnnnnnnnnnnnnnnnnnnnnnnnnnnnnnnnnnnnnnnnnnnnnnnnnnnnnnnnnnnnnnnnnnnnnnnnnnnnnnnnnnnnnnnnnnnnnnnnnnnnnnnnnnnnnnnnnnnnnnnnnnnnnnnnnnnnnnnnnnnnnnnnnnnnnnnnnnnnnnnnnnnnnnnnnnnnnnnnnnnnnnnnnnnnnnnnnnnnnnnnnnnnnnnnnnnnnnnnnnnnnnnnnnnnnnnnnnnnnnnnnnnnnnnnnnnnnnnnnnnnnnnnnnnnnnnnnnnnnnnnnnnnnnnnnnnnnnnnnnnnnnnnnnnnnnnnnnnnnnnnnnnnnnnnnnnnnnnnnnnnnnnnnnnnnnnnnnnnnnnnnnnnnnnnnnnnnnnnnnnnnnnnnnnnnnnnnnnnnnnnnnnnnnnnnnnnnnnnnnnnnnnnnnnnnnnnnnnnnnnnnnnnnnnnnnnnnnnnnnnnnnnnnnnnnnnnnnnnnnnnnnnnnnnnnnnnnnnnnnnnnnnnnnnnnnnnnnnnnnnnnnnnnnnnnnnnnnnnnnnnnnnnnnnnnnnnnnnnnnnnnnnnnnnnnnnnnnnnnnnnnnnnnnnnnnnnnnnnnnnnnnnnnnnnnnnnnnnnnnnnnnnnnnnnnnnnnnnnnnnnnnnnnnnnnnnnnnnnnnnnnnnnnnnnnnnnnnnnnnnnnnnnnnnnnnnnnnnnnnnnnnnnnnnnnnnnnnnnnnnnnnnnnnnnnnnnnnnnnnnnnnnnnnnnnnnnnnnnnnnnnnnnnnnnnnnnnnnnnnnnnnnnnnnnnnnnnnnnnnnnnnnnnnnnnnnnnnnnnnnnnnnnnnnnnnnnnnnnnnnnnnnnnnnnnnnnnnnnnnnnnnnnnnnnnnnnnnnnnnnnnnnnnnnnnnnnnnnnnnnnnnnnnnnnnnnnnnnnnnnnnnnnnnnnnnnnnnnnnnnnnnnnnnnnnnnnnnnnnnnnnnnnnnnnnnnnnnnnnnnnnnnnnnnnnnnnnnnnnnnnnnnnnnnnnnnnnnnnnnnnnnnnnnnnnnnnnnnnnnnnnnnnnnnnnnnnnnnnnnnnnnnnnnnnnnnnnnnnnnnnnnnnnnnnnnnnnnnnnnnnnnnnnnnnnnnnnnnnnnnnnnnnnnnnnnnnnnnnnnnnnnnnnnnnnnnnnnnnnnnnnnnnnnnnnnnnnnnnnnnnnnnnnnnnnnnnnnnnnnnnnnnnnnnnnnnnnnnnnnnnnnnnnnnnnnnnnnnnnnnnnnnnnnnnnnnnnnnnnnnnnnnnnnnnnnnnnnnnnnnnnnnnnnnnnnnnnnnnnnnnnnnnnnnnnnnnnnnnnnnnnnnnnnnnnnnnnnnnnnnnnnnnnnnnnnnnnnnnnnnnnnnnnnnnnnnnnnnnnnnnnnnnnnnnnnnnnnnnnnnnnnnnnnnnnnnnnnnnnnnnnnnnnnnnnnnnnnnnnnnnnnnnnnnnnnnnnnnnnnnnnnnnnnnnnnnnnnnnnnnnnnnnnnnnnnnnnnnnnnnnnnnnnnnnnnnnnnnnnnnnnnnnnnnnnnnnnnnnnnnnnnnnnnnnnnnnnnnnnnnnnnnnnnnnnnnnnnnnnnnnnnnnnnnnnnnnnnnnnnnnnnnnnnnnnnnnnnnnnnnnnnnnnnnnnnnnnnnnnnnnnnnnnnnnnnnnnnnnnnnnnnnnnnnnnnnnnnnnnnnnnnnnnnnnnnnnnnnnnnnnnnnnnnnnnnnnnnnnnnnnnnnnnnnnnnnnnnnnnnnnnnnnnnnnnnnnnnnnnnnnnnnnnnnnnnnnnnnnnnnnnnnnnnnnnnnnnnnnnnnnnnnnnnnnnnnnnnnnnnnnnnnnnnnnnnnnnnnnnnnnnnnnnnnnnnnnnnnnnnnnnnnnnnnnnnnnnnnnnnnnnnnnnnnnnnnnnnnnnnnnnnnnnnnnnnnnnnnnnnnnnnnnnnnnnnnnnnnnnnnnnnnnnnnnnnnnnnnnnnnnnnnnnnnnnnnnnnnnnnnnnnnnnnnnnnnnnnnnnnnnnnnnnnnnnnnnnnnnnnnnnnnnnnnnnnnnnnnnnnnnnnnnnnnnnnnnnnnnnnnnnnnnnnnnnnnnnnnnnnnnnnnnnnnnnnnnnnnnnnnnnnnnnnnnnnnnnnnnnnnnnnnnnnnnnnnnnnnnnnnnnnnnnnnnnnnnnnnnnnnnnnnnnnnnnnnnnnnnnnnnnnnnnnnnnnnnnnnnnnnnnnnnnnnnnnnnnnnnnnnnnnnnnnnnnnnnnnnnnnnnnnnnnnnnnnnnnnnnnnnnnnnnnnnnnnnnnnnnnnnnnnnnnnnnnnnnnnnnnnnnnnnnnnnnnnnnnnnnnnnnnnnnnnnnnnnnnnnnnnnnnnnnnnnnnnnnnnnnnnnnnnnnnnnnnnnnnnnnnnnnnnnnnnnnnnnnnnnnnnnnnnnnnnnnnnnnnnnnnnnnnnnnnnnnnnnnnnnnnnnnnnnnnnnnnnnnnnnnnnnnnnnnnnnnnnnnnnnnnnnnnnnnnnnnnnnnnnnnnnnnnnnnnnnnnnnnnnnnnnnnnnnnnnnnnnnnnnnnnnnnnnnnnnnnnnnnnnnnnnnnnnnnnnnnnnnnnnnnnnnnnnnnnnnnnnnnnnnnnnnnnnnnnnnnnnnnnnnnnnnnnnnnnnnnnnnnnnnnnnnnnnnnnnnnnnnnnnnnnnnnnnnnnnnnnnnnnnnnnnnnnnnnnnnnnnnnnnnnnnnnnnnnnnnnnnnnnnnnnnnnnnnnnnnnnnnnnnnnnnnnnnnnnnnnnnnnnnnnnnnnnnnnnnnnnnnnnnnnnnnnnnnnnnnnnnnnnnnnnnnnnnnnnnnnnnnnnnnnnnnnnnnnnnnnnnnnnnnnnnnnnnnnnnnnnnnnnnnnnnnnnnnnnnnnnnnnnnnnnnnnnnnnnnnnnnnnnnnnnnnnnnnnnnnnnnnnnnnnnnnnnnnnnnnnnnnnnnnnnnnnnnnnnnnnnnnnnnnnnnnnnnnnnnnnnnnnnnnnnnnnnnnnnnnnnnnnnnnnnnnnnnnnnnnnnnnnnnnnnnnnnnnnnnnnnnnnnnnnnnnnnnnnnnnnnnnnnnnnnnnnnnnnnnnnnnnnnnnnnnnnnnnnnnnnnnnnnnnnnnnnnnnnnnnnnnnnnnnnnnnnnnnnnnnnnnnnnnnnnnnnnnnnnnnnnnnnnnnnnnnnnnnnnnnnnnnnnnnnnnnnnnnnnnnnnnnnnnnnnnnnnnnnnnnnnnnnnnnnnnnnnnnnnnnnnnnnnnnnnnnnnnnnnnnnnnnnnnnnnnnnnnnnnnnnnnnnnnnnnnnnnnnnnnnnnnnnnnnnnnnnnnnnnnnnnnnnnnnnnnnnnnnnnnnnnnnnnnnnnnnnnnnnnnnnnnnnnnnnnnnnnnnnnnnnnnnnnnnnnnnnnnnnnnnnnnnnnnnnnnnnnnnnnnnnnnnnnnnnnnnnnnnnnnnnnnnnnnnnnnnnnnnnnnnnnnnnnnnnnnnnnnnnnnnnnnnnnnnnnnnnnnnnnnnnnnnnnnnnnnnnnnnnnnnnnnnnnnnnnnnnnnnnnnnnnnnnnnnnnnnnnnnnnnnnnnnnnnnnnnnnnnnnnnnnnnnnnnnnnnnnnnnnnnnnnnnnnnnnnnnnnnnnnnnnnnnnnnnnnnnnnnnnnnnnnnnnnnnnnnnnnnnnnnnnnnnnnnnnnnnnnnnnnnnnnnnnnnnnnnnnnnnnnnnnnnnnnnnnnnnnnnnnnnnnnnnnnnnnnnnnnnnnnnnnnnnnnnnnnnnnnnnnnnnnnnnnnnnnnnnnnnnnnnnnnnnnnnnnnnnnnnnnnnnnnnnnnnnnnnnnnnnnnnnnnnnnnnnnnnnnnnnnnnnnnnnnnnnnnnnnnnnnnnnnnnnnnnnnnnnnnnnnnnnnnnnnnnnnnnnnnnnnnnnnnnnnnnnnnnnnnnnnnnnnnnnnnnnnnnnnnnnnnnnnnnnnnnnnnnnnnnnnnnnnnnnnnnnnnnnnnnnnnnnnnnnnnnnnnnnnnnnnnnnnnnnnnnnnnnnnnnnnnnnnnnnnnnnnnnnnnnnnnnnnnnnnnnnnnnnnnnnnnnnnnnnnnnnnnnnnnnnnnnnnnnnnnnnnnnnnnnnnnnnnnnnnnnnnnnnnnnnnnnnnnnnnnnnnnnnnnnnnnnnnnnnnnnnnnnnnnnnnnnnnnnnnnnnnnnnnnnnnnnnnnnnnnnnnnnnnnnnnnnnnnnnnnnnnnnnnnnnnnnnnnnnnnnnnnnnnnnnnnnnnnnnnnnnnnnnnnnnnnnnnnnnnnnnnnnnnnnnnnnnnnnnnnnnnnnnnnnnnnnnnnnnnnnnnnnnnnnnnnnnnnnnnnnnnnnnnnnnnnnnnnnnnnnnnnnnnnnnnnnnnnnnnnnnnnnnnnnnnnnnnnnnnnnnnnnnnnnnnnnnnnnnnnnnnnnnnnnnnnnnnnnnnnnnnnnnnnnnnnnnnnnnnnnnnnnnnnnnnnnnnnnnnnnnnnnnnnnnnnnnnnnnnnnnnnnnnnnnnnnnnnnnnnnnnnnnnnnnnnnnnnnnnnnnnnnnnnnnnnnnnnnnnnnnnnnnnnnnnnnnnnnnnnnnnnnnnnnnnnnnnnnnnnnnnnnnnnnnnnnnnnnnnnnnnnnnnnnnnnnnnnnnnnnnnnnnnnnnnnnnnnnnnnnnnnnnnnnnnnnnnnnnnnnnnnnnnnnnnnnnnnnnnnnnnnnnnnnnnnnnnnnnnnnnnnnnnnnnnnnnnnnnnnnnnnnnnnnnnnnnnnnnnnnnnnnnnnnnnnnnnnnnnnnnnnnnnnnnnnnnnnnnnnnnnnnnnnnnnnnnnnnnnnnnnnnnnnnnnnnnnnnnnnnnnnnnnnnnnnnnnnnnnnnnnnnnnnnnnnnnnnnnnnnnnnnnnnnnnnnnnnnnnnnnnnnnnnnnnnnnnnnnnnnnnnnnnnnnnnnnnnnnnnnnnnnnnnnnnnnnnnnnnnnnnnnnnnnnnnnnnnnnnnnnnnnnnnnnnnnnnnnnnnnnnnnnnnnnnnnnnnnnnnnnnnnnnnnnnnnnnnnnnnnnnnnnnnnnnnnnnnnnnnnnnnnnnnnnnnnnnnnnnnnnnnnnnnnnnnnnnnnnnnnnnnnnnnnnnnnnnnnnnnnnnnnnnnnnnnnnnnnnnnnnnnnnnnnnnnnnnnnnnnnnnnnnnnnnnnnnnnnnnnnnnnnnnnnnnnnnnnnnnnnnnnnnnnnnnnnnnnnnnnnnnnnnnnnnnnnnnnnnnnnnnnnnnnnnnnnnnnnnnnnnnnnnnnnnnnnnnnnnnnnnnnnnnnnnnnnnnnnnnnnnnnnnnnnnnnnnnnnnnnnnnnnnnnnnnnnnnnnnnnnnnnnnnnnnnnnnnnnnnnnnnnnnnnnnnnnnnnnnnnnnnnnnnnnnnnnnnnnnnnnnnnnnnnnnnnnnnnnnnnnnnnnnnnnnnnnnnnnnnnnnnnnnnnnnnnnnnnnnnnnnnnnnnnnnnnnnnnnnnnnnnnnnnnnnnnnnnnnnnnnnnnnnnnnnnnnnnnnnnnnnnnnnnnnnnnnnnnnnnnnnnnnnnnnnnnnnnnnnnnnnnnnnnnnnnnnnnnnnnnnnnnnnnnnnnnnnnnnnnnnnnnnnnnnnnnnnnnnnnnnnnnnnnnnnnnnnnnnnnnnnnnnnnnnnnnnnnnnnnnnnnnnnnnnnnnnnnnnnnnnnnnnnnnnnnnnnnnnnnnnnnnnnnnnnnnnnnnnnnnnnnnnnnnnnnnnnnnnnnnnnnnnnnnnnnnnnnnnnnnnnnnnnnnnnnnnnnnnnnnnnnnnnnnnnnnnnnnnnnnnnnnnnnnnnnnnnnnnnnnnnnnnnnnnnnnnnnnnnnnnnnnnnnnnnnnnnnnnnnnnnnnnnnnnnnnnnnnnnnnnnnnnnnnnnnnnnnnnnnnnnnnnnnnnnnnnnnnnnnnnnnnnnnnnnnnnnnnnnnnnnnnnnnnnnnnnnnnnnnnnnnnnnnnnnnnnnnnnnnnnnnnnnnnnnnnnnnnnnnnnnnnnnnnnnnnnnnnnnnnnnnnnnnnnnnnnnnnnnnnnnnnnnnnnnnnnnnnnnnnnnnnnnnnnnnnnnnnnnnnnnnnnnnnnnnnnnnnnnnnnnnnnnnnnnnnnnnnnnnnnnnnnnnnnnnnnnnnnnnnnnnnnnnnnnnnnnnnnnnnnnnnnnnnnnnnnnnnnnnnnnnnnnnnnnnnnnnnnnnnnnnnnnnnnnnnnnnnnnnnnnnnnnnnnnnnnnnnnnnnnnnnnnnnnnnnnnnnnnnnnnnnnnnnnnnnnnnnnnnnnnnnnnnnnnnnnnnnnnnnnnnnnnnnnnnnnnnnnnnnnnnnnnnnnnnnnnnnnnnnnnnnnnnnnnnnnnnnnnnnnnnnnnnnnnnnnnnnnnnnnnnnnnnnnnnnnnnnnnnnnnnnnnnnnnnnnnnnnnnnnnnnnnnnnnnnnnnnnnnnnnnnnnnnnnnnnnnnnnnnnnnnnnnnnnnnnnnnnnnnnnnnnnnnnnnnnnnnnnnnnnnnnnnnnnnnnnnnnnnnnnnnnnnnnnnnnnnnnnnnnnnnnnnnnnnnnnnnnnnnnnnnnnnnnnnnnnnnnnnnnnnnnnnnnnnnnnnnnnnnnnnnnnnnnnnnnnnnnnnnnnnnnnnnnnnnnnnnnnnnnnnnnnnnnnnnnnnnnnnnnnnnnnnnnnnnnnnnnnnnnnnnnnnnnnnnnnnnnnnnnnnnnnnnnnnnnnnnnnnnnnnnnnnnnnnnnnnnnnnnnnnnnnnnnnnnnnnnnnnnnnnnnnnnnnnnnnnnnnnnnnnnnnnnnnnnnnnnnnnnnnnnnnnnnnnnnnnnnnnnnnnnnnnnnnnnnnnnnnnnnnnnnnnnnnnnnnnnnnnnnnnnnnnnnnnnnnnnnnnnnnnnnnnnnnnnnnnnnnnnnnnnnnnnnnnnnnnnnnnnnnnnnnnnnnnnnnnnnnnnnnnnnnnnnnnnnnnnnnnnnnnnnnnnnnnnnnnnnnnnnnnnnnnnnnnnnnnnnnnnnnnnnnnnnnnnnnnnnnnnnnnnnnnnnnnnnnnnnnnnnnnnnnnnnnnnnnnnnnnnnnnnnnnnnnnnnnnnnnnnnnnnnnnnnnnnnnnnnnnnnnnnnnnnnnnnnnnnnnnnnnnnnnnnnnnnnnnnnnnnnnnnnnnnnnnnnnnnnnnnnnnnnnnnnnnnnnnnnnnnnnnnnnnnnnnnnnnnnnnnnnnnnnnnnnnnnnnnnnnnnnnnnnnnnnnnnnnnnnnnnnnnnnnnnnnnnnnnnnnnnnnnnnnnnnnnnnnnnnnnnnnnnnnnnnnnnnnnnnnnnnnnnnnnnnnnnnnnnnnnnnnnnnnnnnnnnnnnnnnnnnnnnnnnnnnnnnnnnnnnnnnnnnnnnnnnnnnnnnnnnnnnnnnnnnnnnnnnnnnnnnnnnnnnnnnnnnnnnnnnnnnnnnnnnnnnnnnnnnnnnnnnnnnnnnnnnnnnnnnnnnnnnnnnnnnnnnnnnnnnnnnnnnnnnnnnnnnnnnnnnnnnnnnnnnnnnnnnnnnnnnnnnnnnnnnnnnnnnnnnnnnnnnnnnnnnnnnnnnnnnnnnnnnnnnnnnnnnnnnnnnnnnnnnnnnnnnnnnnnnnnnnnnnnnnnnnnnnnnnnnnnnnnnnnnnnnnnnnnnnnnnnnnnnnnnnnnnnnnnnnnnnnnnnnnnnnnnnnnnnnnnnnnnnnnnnnnnnnnnnnnnnnnnnnnnnnnnnnnnnnnnnnnnnnnnnnnnnnnnnnnnnnnnnnnnnnnnnnnnnnnnnnnnnnnnnnnnnnnnnnnnnnnnnnnnnnnnnnnnnnnnnnnnnnnnnnnnnnnnnnnnnnnnnnnnnnnnnnnnnnnnnnnnnnnnnnnnnnnnnnnnnnnnnnnnnnnnnnnnnnnnnnnnnnnnnnnnnnnnnnnnnnnnnnnnnnnnnnnnnnnnnnnnnnnnnnnnnnnnnnnnnnnnnnnnnnnnnnnnnnnnnnnnnnnnnnnnnnnnnnnnnnnnnnnnnnnnnnnnnnnnnnnnnnnnnnnnnnnnnnnnnnnnnnnnnnnnnnnnnnnnnnnnnnnnnnnnnnnnnnnnnnnnnnnnnnnnnnnnnnnnnnnnnnnnnnnnnnnnnnnnnnnnnnnnnnnnnnnnnnnnnnnnnnnnnnnnnnnnnnnnnnnnnnnnnnnnnnnnnnnnnnnnnnnnnnnnnnnnnnnnnnnnnnnnnnnnnnnnnnnnnnnnnnnnnnnnnnnnnnnnnnnnnnnnnnnnnnnnnnnnnnnnnnnnnnnnnnnnnnnnnnnnnnnnnnnnnnnnnnnnnnnnnnnnnnnnnnnnnnnnnnnnnnnnnnnnnnnnnnnnnnnnnnnnnnnnnnnnnnnnnnnnnnnnnnnnnnnnnnnnnnnnnnnnnnnnnnnnnnnnnnnnnnnnnnnnnnnnnnnnnnnnnnnnnnnnnnnnnnnnnnnnnnnnnnnnnnnnnnnnnnnnnnnnnnnnnnnnnnnnnnnnnnnnnnnnnnnnnnnnnnnnnnnnnnnnnnnnnnnnnnnnnnnnnnnnnnnnnnnnnnnnnnnnnnnnnnnnnnnnnnnnnnnnnnnnnnnnnnnnnnnnnnnnnnnnnnnnnnnnnnnnnnnnnnnnnnnnnnnnnnnnnnnnnnnnnnnnnnnnnnnnnnnnnnnnnnnnnnnnnnnnnnnnnnnnnnnnnnnnnnnnnnnnnnnnnnnnnnnnnnnnnnnnnnnnnnnnnnnnnnnnnnnnnnnnnnnnnnnnnnnnnnnnnnnnnnnnnnnnnnnnnnnnnnnnnnnnnnnnnnnnnnnnnnnnnnnnnnnnnnnnnnnnnnnnnnnnnnnnnnnnnnnnnnnnnnnnnnnnnnnnnnnnnnnnnnnnnnnnnnnnnnnnnnnnnnnnnnnnnnnnnnnnnnnnnnnnnnnnnnnnnnnnnnnnnnnnnnnnnnnnnnnnnnnnnnnnnnnnnnnnnnnnnnnnnnnnnnnnnnnnnnnnnnnnnnnnnnnnnnnnnnnnnnnnnnnnnnnnnnnnnnnnnnnnnnnnnnnnnnnnnnnnnnnnnnnnnnnnnnnnnnnnnnnnnnnnnnnnnnnnnnnnnnnnnnnnnnnnnnnnnnnnnnnnnnnnnnnnnnnnnnnnnnnnnnnnnnnnnnnnnnnnnnnnnnnnnnnnnnnnnnnnnnnnnnnnnnnnnnnnnnnnnnnnnnnnnnnnnnnnnnnnnnnnnnnnnnnnnnnnnnnnnnnnnnnnnnnnnnnnnnnnnnnnnnnnnnnnnnnnnnnnnnnnnnnnnnnnnnnnnnnnnnnnnnnnnnnnnnnnnnnnnnnnnnnnnnnnnnnnnnnnnnnnnnnnnnnnnnnnnnnnnnnnnnnnnnnnnnnnnnnnnnnnnnnnnnnnnnnnnnnnnnnnnnnnnnnnnnnnnnnnnnnnnnnnnnnnnnnnnnnnnnnnnnnnnnnnnnnnnnnnnnnnnnnnnnnnnnnnnnnnnnnnnnnnnnnnnnnnnnnnnnnnnnnnnnnnnnnnnnnnnnnnnnnnnnnnnnnnnnnnnnnnnnnnnnnnnnnnnnnnnnnnnnnnnnnnnnnnnnnnnnnnnnnnnnnnnnnnnnnnnnnnnnnnnnnnnnnnnnnnnnnnnnnnnnnnnnnnnnnnnnnnnnnnnnnnnnnnnnnnnnnnnnnnnnnnnnnnnnnnnnnnnnnnnnnnnnnnnnnnnnnnnnnnnnnnnnnnnnnnnnnnnnnnnnnnnnnnnnnnnnnnnnnnnnnnnnnnnnnnnnnnnnnnnnnnnnnnnnnnnnnnnnnnnnnnnnnnnnnnnnnnnnnnnnnnnnnnnnnnnnnnnnnnnnnnnnnnnnnnnnnnnnnnnnnnnnnnnnnnnnnnnnnnnnnnnnnnnnnnnnnnnnnnnnnnnnnnnnnnnnnnnnnnnnnnnnnnnnnnnnnnnnnnnnnnnnnnnnnnnnnnnnnnnnnnnnnnnnnnnnnnnnnnnnnnnnnnnnnnnnnnnnnnnnnnnnnnnnnnnnnnnnnnnnnnnnnnnnnnnnnnnnnnnnnnnnnnnnnnnnnnnnnnnnnnnnnnnnnnnnnnnnnnnnnnnnnnnnnnnnnnnnnnnnnnnnnnnnnnnnnnnnnnnnnnnnnnnnnnnnnnnnnnnnnnnnnnnnnnnnnnnnnnnnnnnnnnnnnnnnnnnnnnnnnnnnnnnnnnnnnnnnnnnnnnnnnnnnnnnnnnnnnnnnnnnnnnnnnnnnnnnnnnnnnnnnnnnnnnnnnnnnnnnnnnnnnnnnnnnnnnnnnnnnnnnnnnnnnnnnnnnnnnnnnnnnnnnnnnnnnnnnnnnnnnnnnnnnnnnnnnnnnnnnnnnnnnnnnnnnnnnnnnnnnnnnnnnnnnnnnnnnnnnnnnnnnnnnnnnnnnnnnnnnnnnnnnnnnnnnnnnnnnnnnnnnnnnnnnnnnnnnnnnnnnnnnnnnnnnnnnnnnnnnnnnnnnnnnnnnnnnnnnnnnnnnnnnnnnnnnnnnnnnnnnnnnnnnnnnnnnnnnnnnnnnnnnnnnnnnnnnnnnnnnnnnnnnnnnnnnnnnnnnnnnnnnnnnnnnnnnnnnnnnnnnnnnnnnnnnnnnnnnnnnnnnnnnnnnnnnnnnnnnnnnnnnnnnnnnnnnnnnnnnnnnnnnnnnnnnnnnnnnnnnnnnnnnnnnnnnnnnnnnnnnnnnnnnnnnnnnnnnnnnnnnnnnnnnnnnnnnnnnnnnnnnnnnnnnnnnnnnnnnnnnnnnnnnnnnnnnnnnnnnnnnnnnnnnnnnnnnnnnnnnnnnnnnnnnnnnnnnnnnnnnnnnnnnnnnnnnnnnnnnnnnnnnnnnnnnnnnnnnnnnnnnnnnnnnnnnnnnnnnnnnnnnnnnnnnnnnnnnnnnnnnnnnnnnnnnnnnnnnnnnnnnnnnnnnnnnnnnnnnnnnnnnnnnnnnnnnnnnnnnnnnnnnnnnnnnnnnnnnnnnnnnnnnnnnnnnnnnnnnnnnnnnnnnnnnnnnnnnnnnnnnnnnnnnnnnnnnnnnnnnnnnnnnnnnnnnnnnnnnnnnnnnnnnnnnnnnnnnnnnnnnnnnnnnnnnnnnnnnnnnnnnnnnnnnnnnnnnnnnnnnnnnnnnnnnnnnnnnnnnnnnnnnnnnnnnnnnnnnnnnnnnnnnnnnnnnnnnnnnnnnnnnnnnnnnnnnnnnnnnnnnnnnnnnnnnnnnnnnnnnnnnnnnnnnnnnnnnnnnnnnnnnnnnnnnnnnnnnnnnnnnnnnnnnnnnnnnnnnnnnnnnnnnnnnnnnnnnnnnnnnnnnnnnnnnnnnnnnnnnnnnnnnnnnnnnnnnnnnnnnnnnnnnnnnnnnnnnnnnnnnnnnnnnnnnnnnnnnnnnnnnnnnnnnnnnnnnnnnnnnnnnnnnnnnnnnnnnnnnnnnnnnnnnnnnnnnnnnnnnnnnnnnnnnnnnnnnnnnnnnnnnnnnnnnnnnnnnnnnnnnnnnnnnnnnnnnnnnnnnnnnnnnnnnnnnnnnnnnnnnnnnnnnnnnnnnnnnnnnnnnnnnnnnnnnnnnnnnnnnnnnnnnnnnnnnnnnnnnnnnnnnnnnnnnnnnnnnnnnnnnnnnnnnnnnnnnnnnnnnnnnnnnnnnnnnnnnnnnnnnnnnnnnnnnnnnnnnnnnnnnnnnnnnnnnnnnnnnnnnnnnnnnnnnnnnnnnnnnnnnnnnnnnnnnnnnnnnnnnnnnnnnnnnnnnnnnnnnnnnnnnnnnnnnnnnnnnnnnnnnnnnnnnnnnnnnnnnnnnnnnnnnnnnnnnnnnnnnnnnnnnnnnnnnnnnnnnnnnnnnnnnnnnnnnnnnnnnnnnnnnnnnnnnnnnnnnnnnnnnnnnnnnnnnnnnnnnnnnnnnnnnnnnnnnnnnnnnnnnnnnnnnnnnnnnnnnnnnnnnnnnnnnnnnnnnnnnnnnnnnnnnnnnnnnnnnnnnnnnnnnnnnnnnnnnnnnnnnnnnnnnnnnnnnnnnnnnnnnnnnnnnnnnnnnnnnnnnnnnnnnnnnnnnnnnnnnnnnnnnnnnnnnnnnnnnnnnnnnnnnnnnnnnnnnnnnnnnnnnnnnnnnnnnnnnnnnnnnnnnnnnnnnnnnnnnnnnnnnnnnnnnnnnnnnnnnnnnnnnnnnnnnnnnnnnnnnnnnnnnnnnnnnnnnnnnnnnnnnnnnnnnnnnnnnnnnnnnnnnnnnnnnnnnnnnnnnnnnnnnnnnnnnnnnnnnnnnnnnnnnnnnnnnnnnnnnnnnnnnnnnnnnnnnnnnnnnnnnnnnnnnnnnnnnnnnnnnnnnnnnnnnnnnnnnnnnnnnnnnnnnnnnnnnnnnnnnnnnnnnnnnnnnnnnnnnnnnnnnnnnnnnnnnnnnnnnnnnnnnnnnnnnnnnnnnnnnnnnnnnnnnnnnnnnnnnnnnnnnnnnnnnnnnnnnnnnnnnnnnnnnnnnnnnnnnnnnnnnnnnnnnnnnnnnnnnnnnnnnnnnnnnnnnnnnnnnnnnnnnnnnnnnnnnnnnnnnnnnnnnnnnnnnnnnnnnnnnnnnnnnnnnnnnnnnnnnnnnnnnnnnnnnnnnnnnnnnnnnnnnnnnnnnnnnnnnnnnnnnnnnnnnnnnnnnnnnnnnnnnnnnnnnnnnnnnnnnnnnnnnnnnnnnnnnnnnnnnnnnnnnnnnnnnnnnnnnnnnnnnnnnnnnnnnnnnnnnnnnnnnnnnnnnnnnnnnnnnnnnnnnnnnnnnnnnnnnnnnnnnnnnnnnnnnnnnnnnnnnnnnnnnnnnnnnnnnnnnnnnnnnnnnnnnnnnnnnnnnnnnnnnnnnnnnnnnnnnnnnnnnnnnnnnnnnnnnnnnnnnnnnnnnnnnnnnnnnnnnnnnnnnnnnnnnnnnnnnnnnnnnnnnnnnnnnnnnnnnnnnnnnnnnnnnnnnnnnnnnnnnnnnnnnnnnnnnnnnnnnnnnnnnnnnnnnnnnnnnnnnnnnnnnnnnnnnnnnnnnnnnnnnnnnnnnnnnnnnnnnnnnnnnnnnnnnnnnnnnnnnnnnnnnnnnnnnnnnnnnnnnnnnnnnnnnnnnnnnnnnnnnnnnnnnnnnnnnnnnnnnnnnnnnnnnnnnnnnnnnnnnnnnnnnnnnnnnnnnnnnnnnnnnnnnnnnnnnnnnnnnnnnnnnnnnnnnnnnnnnnnnnnnnnnnnnnnnnnnnnnnnnnnnnnnnnnnnnnnnnnnnnnnnnnnnnnnnnnnnnnnnnnnnnnnnnnnnnnnnnnnnnnnnnnnnnnnnnnnnnnnnnnnnnnnnnnnnnnnnnnnnnnnnnnnnnnnnnnnnnnnnnnnnnnnnnnnnnnnnnnnnnnnnnnnnnnnnnnnnnnnnnnnnnnnnnnnnnnnnnnnnnnnnnnnnnnnnnnnnnnnnnnnnnnnnnnnnnnnnnnnnnnnnnnnnnnnnnnnnnnnnnnnnnnnnnnnnnnnnnnnnnnnnnnnnnnnnnnnnnnnnnnnnnnnnnnnnnnnnnnnnnnnnnnnnnnnnnnnnnnnnnnnnnnnnnnnnnnnnnnnnnnnnnnnnnnnnnnnnnnnnnnnnnnnnnnnnnnnnnnnnnnnnnnnnnnnnnnnnnnnnnnnnnnnnnnnnnnnnnnnnnnnnnnnnnnnnnnnnnnnnnnnnnnnnnnnnnnnnnnnnnnnnnnnnnnnnnnnnnnnnnnnnnnnnnnnnnnnnnnnnnnnnnnnnnnnnnnnnnnnnnnnnnnnnnnnnnnnnnnnnnnnnnnnnnnnnnnnnnnnnnnnnnnnnnnnnnnnnnnnnnnnnnnnnnnnnnnnnnnnnnnnnnnnnnnnnnnnnnnnnnnnnnnnnnnnnnnnnnnnnnnnnnnnnnnnnnnnnnnnnnnnnnnnnnnnnnnnnnnnnnnnnnnnnnnnnnnnnnnnnnnnnnnnnnnnnnnnnnnnnnnnnnnnnnnnnnnnnnnnnnnnnnnnnnnnnnnnnnnnnnnnnnnnnnnnnnnnnnnnnnnnnnnnnnnnnnnnnnnnnnnnnnnnnnnnnnnnnnnnnnnnnnnnnnnnnnnnnnnnnnnnnnnnnnnnnnnnnnnnnnnnnnnnnnnnnnnnnnnnnnnnnnnnnnnnnnnnnnnnnnnnnnnnnnnnnnnnnnnnnnnnnnnnnnnnnnnnnnnnnnnnnnnnnnnnnnnnnnnnnnnnnnnnnnnnnnnnnnnnnnnnnnnnnnnnnnnnnnnnnnnnnnnnnnnnnnnnnnnnnnnnnnnnnnnnnnnnnnnnnnnnnnnnnnnnnnnnnnnnnnnnnnnnnnnnnnnnnnnnnnnnnnnnnnnnnnnnnnnnnnnnnnnnnnnnnnnnnnnnnnnnnnnnnnnnnnnnnnnnnnnnnnnnnnnnnnnnnnnnnnnnnnnnnnnnnnnnnnnnnnnnnnnnnnnnnnnnnnnnnnnnnnnnnnnnnnnnnnnnnnnnnnnnnnnnnnnnnnnnnnnnnnnnnnnnnnnnnnnnnnnnnnnnnnnnnnnnnnnnnnnnnnnnnnnnnnnnnnnnnnnnnnnnnnnnnnnnnnnnnnnnnnnnnnnnnnnnnnnnnnnnnnnnnnnnnnnnnnnnnnnnnnnnnnnnnnnnnnnnnnnnnnnnnnnnnnnnnnnnnnnnnnnnnnnnnnnnnnnnnnnnnnnnnnnnnnnnnnnnnnnnnnnnnnnnnnnnnnnnnnnnnnnnnnnnnnnnnnnnnnnnnnnnnnnnnnnnnnnnnnnnnnnnnnnnnnnnnnnnnnnnnnnnnnnnnnnnnnnnnnnnnnnnnnnnnnnnnnnnnnnnnnnnnnnnnnnnnnnnnnnnnnnnnnnnnnnnnnnnnnnnnnnnnnnnnnnnnnnnnnnnnnnnnnnnnnnnnnnnnnnnnnnnnnnnnnnnnnnnnnnnnnnnnnnnnnnnnnnnnnnnnnnnnnnnnnnnnnnnnnnnnnnnnnnnnnnnnnnnnnnnnnnnnnnnnnnnnnnnnnnnnnnnnnnnnnnnnnnnnnnnnnnnnnnnnnnnnnnnnnnnnnnnnnnnnnnnnnnnnnnnnnnnnnnnnnnnnnnnnnnnnnnnnnnnnnnnnnnnnnnnnnnnnnnnnnnnnnnnnnnnnnnnnnnnnnnnnnnnnnnnnnnnnnnnnnnnnnnnnnnnnnnnnnnnnnnnnnnnnnnnnnnnnnnnnnnnnnnnnnnnnnnnnnnnnnnnnnnnnnnnnnnnnnnnnnnnnnnnnnnnnnnnnnnnnnnnnnnnnnnnnnnnnnnnnnnnnnnnnnnnnnnnnnnnnnnnnnnnnnnnnnnnnnnnnnnnnnnnnnnnnnnnnnnnnnnnnnnnnnnnnnnnnnnnnnnnnnnnnnnnnnnnnnnnnnnnnnnnnnnnnnnnnnnnnnnnnnnnnnnnnnnnnnnnnnnnnnnnnnnnnnnnnnnnnnnnnnnnnnnnnnnnnnnnnnnnnnnnnnnnnnnnnnnnnnnnnnnnnnnnnnnnnnnnnnnnnnnnnnnnnnnnnnnnnnnnnnnnnnnnnnnnnnnnnnnnnnnnnnnnnnnnnnnnnnnnnnnnnnnnnnnnnnnnnnnnnnnnnnnnnnnnnnnnnnnnnnnnnnnnnnnnnnnnnnnnnnnnnnnnnnnnnnnnnnnnnnnnnnnnnnnnnnnnnnnnnnnnnnnnnnnnnnnnnnnnnnnnnnnnnnnnnnnnnnnnnnnnnnnnnnnnnnnnnnnnnnnnnnnnnnnnnnnnnnnnnnnnnnnnnnnnnnnnnnnnnnnnnnnnnnnnnnnnnnnnnnnnnnnnnnnnnnnnnnnnnnnnnnnnnnnnnnnnnnnnnnnnnnnnnnnnnnnnnnnnnnnnnnnnnnnnnnnnnnnnnnnnnnnnnnnnnnnnnnnnnnnnnnnnnnnnnnnnnnnnnnnnnnnnnnnnnnnnnnnnnnnnnnnnnnnnnnnnnnnnnnnnnnnnnnnnnnnnnnnnnnnnnnnnnnnnnnnnnnnnnnnnnnnnnnnnnnnnnnnnnnnnnnnnnnnnnnnnnnnnnnnnnnnnnnnnnnnnnnnnnnnnnnnnnnnnnnnnnnnnnnnnnnnnnnnnnnnnnnnnnnnnnnnnnnnnnnnnnnnnnnnnnnnnnnnnnnnnnnnnnnnnnnnnnnnnnnnnnnnnnnnnnnnnnnnnnnnnnnnnnnnnnnnnnnnnnnnnnnnnnnnnnnnnnnnnnnnnnnnnnnnnnnnnnnnnnnnnnnnnnnnnnnnnnnnnnnnnnnnnnnnnnnnnnnnnnnnnnnnnnnnnnnnnnnnnnnnnnnnnnnnnnnnnnnnnnnnnnnnnnnnnnnnnnnnnnnnnnnnnnnnnnnnnnnnnnnnnnnnnnnnnnnnnnnnnnnnnnnnnnnnnnnnnnnnnnnnnnnnnnnnnnnnnnnnnnnnnnnnnnnnnnnnnnnnnnnnnnnnnnnnnnnnnnnnnnnnnnnnnnnnnnnnnnnnnnnnnnnnnnnnnnnnnnnnnnnnnnnnnnnnnnnnnnnnnnnnnnnnnnnnnnnnnnnnnnnnnnnnnnnnnnnnnnnnnnnnnnnnnnnnnnnnnnnnnnnnnnnnnnnnnnnnnnnnnnnnnnnnnnnnnnnnnnnnnnnnnnnnnnnnnnnnnnnnnnnnnnnnnnnnnnnnnnnnnnnnnnnnnnnnnnnnnnnnnnnnnnnnnnnnnnnnnnnnnnnnnnnnnnnnnnnnnnnnnnnnnnnnnnnnnnnnnnnnnnnnnnnnnnnnnnnnnnnnnnnnnnnnnnnnnnnnnnnnnnnnnnnnnnnnnnnnnnnnnnnnnnnnnnnnnnnnnnnnnnnnnnnnnnnnnnnnnnnnnnnnnnnnnnnnnnnnnnnnnnnnnnnnnnnnnnnnnnnnnnnnnnnnnnnnnnnnnnnnnnnnnnnnnnnnnnnnnnnnnnnnnnnnnnnnnnnnnnnnnnnnnnnnnnnnnnnnnnnnnnnnnnnnnnnnnnnnnnnnnnnnnnnnnnnnnnnnnnnnnnnnnnnnnnnnnnnnnnnnnnnnnnnnnnnnnnnnnnnnnnnnnnnnnnnnnnnnnnnnnnnnnnnnnnnnnnnnnnnnnnnnnnnnnnnnnnnnnnnnnnnnnnnnnnnnnnnnnnnnnnnnnnnnnnnnnnnnnnnnnnnnnnnnnnnnnnnnnnnnnnnnnnnnnnnnnnnnnnnnnnnnnnnnnnnnnnnnnnnnnnnnnnnnnnnnnnnnnnnnnnnnnnnnnnnnnnnnnnnnnnnnnnnnnnnnnnnnnnnnnnnnnnnnnnnnnnnnnnnnnnnnnnnnnnnnnnnnnnnnnnnnnnnnnnnnnnnnnnnnnnnnnnnnnnnnnnnnnnnnnnnnnnnnnnnnnnnnnnnnnnnnnnnnnnnnnnnnnnnnnnnnnnnnnnnnnnnnnnnnnnnnnnnnnnnnnnnnnnnnnnnnnnnnnnnnnnnnnnnnnnnnnnnnnnnnnnnnnnnnnnnnnnnnnnnnnnnnnnnnnnnnnnnnnnnnnnnnnnnnnnnnnnnnnnnnnnnnnnnnnnnnnnnnnnnnnnnnnnnnnnnnnnnnnnnnnnnnnnnnnnnnnnnnnnnnnnnnnnnnnnnnnnnnnnnnnnnnnnnnnnnnnnnnnnnnnnnnnnnnnnnnnnnnnnnnnnnnnnnnnnnnnnnnnnnnnnnnnnnnnnnnnnnnnnnnnnnnnnnnnnnnnnnnnnnnnnnnnnnnnnnnnnnnnnnnnnnnnnnnnnnnnnnnnnnnnnnnnnnnnnnnnnnnnnnnnnnnnnnnnnnnnnnnnnnnnnnnnnnnnnnnnnnnnnnnnnnnnnnnnnnnnnnnnnnnnnnnnnnnnnnnnnnnnnnnnnnnnnnnnnnnnnnnnnnnnnnnnnnnnnnnnnnnnnnnnnnnnnnnnnnnnnnnnnnnnnnnnnnnnnnnnnnnnnnnnnnnnnnnnnnnnnnnnnnnnnnnnnnnnnnnnnnnnnnnnnnnnnnnnnnnnnnnnnnnnnnnnnnnnnnnnnnnnnnnnnnnnnnnnnnnnnnnnnnnnnnnnnnnnnnnnnnnnnnnnnnnnnnnnnnnnnnnnnnnnnnnnnnnnnnnnnnnnnnnnnnnnnnnnnnnnnnnnnnnnnnnnnnnnnnnnnnnnnnnnnnnnnnnnnnnnnnnnnnnnnnnnnnnnnnnnnnnnnnnnnnnnnnnnnnnnnnnnnnnnnnnnnnnnnnnnnnnnnnnnnnnnnnnnnnnnnnnnnnnnnnnnnnnnnnnnnnnnnnnnnnnnnnnnnnnnnnnnnnnnnnnnnnnnnnnnnnnnnnnnnnnnnnnnnnnnnnnnnnnnnnnnnnnnnnnnnnnnnnnnnnnnnnnnnnnnnnnnnnnnnnnnnnnnnnnnnnnnnnnnnnnnnnnnnnnnnnnnnnnnnnnnnnnnnnnnnnnnnnnnnnnnnnnnnnnnnnnnnnnnnnnnnnnnnnnnnnnnnnnnnnnnnnnnnnnnnnnnnnnnnnnnnnnnnnnnnnnnnnnnnnnnnnnnnnnnnnnnnnnnnnnnnnnnnnnnnnnnnnnnnnnnnnnnnnnnnnnnnnnnnnnnnnnnnnnnnnnnnnnnnnnnnnnnnnnnnnnnnnnnnnnnnnnnnnnnnnnnnnnnnnnnnnnnnnnnnnnnnnnnnnnnnnnnnnnnnnnnnnnnnnnnnnnnnnnnnnnnnnnnnnnnnnnnnnnnnnnnnnnnnnnnnnnnnnnnnnnnnnnnnnnnnnnnnnnnnnnnnnnnnnnnnnnnnnnnnnnnnnnnnnnnnnnnnnnnnnnnnnnnnnnnnnnnnnnnnnnnnnnnnnnnnnnnnnnnnnnnnnnnnnnnnnnnnnnnnnnnnnnnnnnnnnnnnnnnnnnnnnnnnnnnnnnnnnnnnnnnnnnnnnnnnnnnnnnnnnnnnnnnnnnnnnnnnnnnnnnnnnnnnnnnnnnnnnnnnnnnnnnnnnnnnnnnnnnnnnnnnnnnnnnnnnnnnnnnnnnnnnnnnnnnnnnnnnnnnnnnnnnnnnnnnnnnnnnnnnnnnnnnnnnnnnnnnnnnnnnnnnnnnnnnnnnnnnnnnnnnnnnnnnnnnnnnnnnnnnnnnnnnnnnnnnnnnnnnnnnnnnnnnnnnnnnnnnnnnnnnnnnnnnnnnnnnnnnnnnnnnnnnnnnnnnnnnnnnnnnnnnnnnnnnnnnnnnnnnnnnnnnnnnnnnnnnnnnnnnnnnnnnnnnnnnnnnnnnnnnnnnnnnnnnnnnnnnnnnnnnnnnnnnnnnnnnnnnnnnnnnnnnnnnnnnnnnnnnnnnnnnnnnnnnnnnnnnnnnnnnnnnnnnnnnnnnnnnnnnnnnnnnnnnnnnnnnnnnnnnnnnnnnnnnnnnnnnnnnnnnnnnnnnnnnnnnnnnnnnnnnnnnnnnnnnnnnnnnnnnnnnnnnnnnnnnnnnnnnnnnnnnnnnnnnnnnnnnnnnnnnnnnnnnnnnnnnnnnnnnnnnnnnnnnnnnnnnnnnnnnnnnnnnnnnnnnnnnnnnnnnnnnnnnnnnnnnnnnnnnnnnnnnnnnnnnnnnnnnnnnnnnnnnnnnnnnnnnnnnnnnnnnnnnnnnnnnnnnnnnnnnnnnnnnnnnnnnnnnnnnnnnnnnnnnnnnnnnnnnnnnnnnnnnnnnnnnnnnnnnnnnnnnnnnnnnnnnnnnnnnnnnnnnnnnnnnnnnnnnnnnnnnnnnnnnnnnnnnnnnnnnnnnnnnnnnnnnnnnnnnnnnnnnnnnnnnnnnnnnnnnnnnnnnnnnnnnnnnnnnnnnnnnnnnnnnnnnnnnnnnnnnnnnnnnnnnnnnnnnnnnnnnnnnnnnnnnnnnnnnnnnnnnnnnnnnnnnnnnnnnnnnnnnnnnnnnnnnnnnnnnnnnnnnnnnnnnnnnnnnnnnnnnnnnnnnnnnnnnnnnnnnnnnnnnnnnnnnnnnnnnnnnnnnnnnnnnnnnnnnnnnnnnnnnnnnnnnnnnnnnnnnnnnnnnnnnnnnnnnnnnnnnnnnnnnnnnnnnnnnnnnnnnnnnnnnnnnnnnnnnnnnnnnnnnnnnnnnnnnnnnnnnnnnnnnnnnnnnnnnnnnnnnnnnnnnnnnnnnnnnnnnnnnnnnnnnnnnnnnnnnnnnnnnnnnnnnnnnnnnnnnnnnnnnnnnnnnnnnnnnnnnnnnnnnnnnnnnnnnnnnnnnnnnnnnnnnnnnnnnnnnnnnnnnnnnnnnnnnnnnnnnnnnnnnnnnnnnnnnnnnnnnnnnnnnnnnnnnnnnnnnnnnnnnnnnnnnnnnnnnnnnnnnnnnnnnnnnnnnnnnnnnnnnnnnnnnnnnnnnnnnnnnnnnnnnnnnnnnnnnnnnnnnnnnnnnnnnnnnnnnnnnnnnnnnnnnnnnnnnnnnnnnnnnnnnnnnnnnnnnnnnnnnnnnnnnnnnnnnnnnnnnnnnnnnnnnnnnnnnnnnnnnnnnnnnnnnnnnnnnnnnnnnnnnnnnnnnnnnnnnnnnnnnnnnnnnnnnnnnnnnnnnnnnnnnnnnnnnnnnnnnnnnnnnnnnnnnnnnnnnnnnnnnnnnnnnnnnnnnnnnnnnnnnnnnnnnnnnnnnnnnnnnnnnnnnnnnnnnnnnnnnnnnnnnnnnnnnnnnnnnnnnnnnnnnnnnnnnnnnnnnnnnnnnnnnnnnnnnnnnnnnnnnnnnnnnnnnnnnnnnnnnnnnnnnnnnnnnnnnnnnnnnnnnnnnnnnnnnnnnnnnnnnnnnnnnnnnnnnnnnnnnnnnnnnnnnnnnnnnnnnnnnnnnnnnnnnnnnnnnnnnnnnnnnnnnnnnnnnnnnnnnnnnnnnnnnnnnnnnnnnnnnnnnnnnnnnnnnnnnnnnnnnnnnnnnnnnnnnnnnnnnnnnnnnnnnnnnnnnnnnnnnnnnnnnnnnnnnnnnnnnnnnnnnnnnnnnnnnnnnnnnnnnnnnnnnnnnnnnnnnnnnnnnnnnnnnnnnnnnnnnnnnnnnnnnnnnnnnnnnnnnnnnnnnnnnnnnnnnnnnnnnnnnnnnnnnnnnnnnnnnnnnnnnnnnnnnnnnnnnnnnnnnnnnnnnnnnnnnnnnnnnnnnnnnnnnnnnnnnnnnnnnnnnnnnnnnnnnnnnnnnnnnnnnnnnnnnnnnnnnnnnnnnnnnnnnnnnnnnnnnnnnnnnnnnnnnnnnnnnnnnnnnnnnnnnnnnnnnnnnnnnnnnnnnnnnnnnnnnnnnnnnnnnnnnnnnnnnnnnnnnnnnnnnnnnnnnnnnnnnnnnnnnnnnnnnnnnnnnnnnnnnnnnnnnnnnnnnnnnnnnnnnnnnnnnnnnnnnnnnnnnnnnnnnnnnnnnnnnnnnnnnnnnnnnnnnnnnnnnnnnnnnnnnnnnnnnnnnnnnnnnnnnnnnnnnnnnnnnnnnnnnnnnnnnnnnnnnnnnnnnnnnnnnnnnnnnnnnnnnnnnnnnnnnnnnnnnnnnnnnnnnnnnnnnnnnnnnnnnnnnnnnnnnnnnnnnnnnnnnnnnnnnnnnnnnnnnnnnnnnnnnnnnnnnnnnnnnnnnnnnnnnnnnnnnnnnnnnnnnnnnnnnnnnnnnnnnnnnnnnnnnnnnnnnnnnnnnnnnnnnnnnnnnnnnnnnnnnnnnnnnnnnnnnnnnnnnnnnnnnnnnnnnnnnnnnnnnnnnnnnnnnnnnnnnnnnnnnnnnnnnnnnnnnnnnnnnnnnnnnnnnnnnnnnnnnnnnnnnnnnnnnnnnnnnnnnnnnnnnnnnnnnnnnnnnnnnnnnnnnnnnnnnnnnnnnnnnnnnnnnnnnnnnnnnnnnnnnnnnnnnnnnnnnnnnnnnnnnnnnnnnnnnnnnnnnnnnnnnnnnnnnnnnnnnnnnnnnnnnnnnnnnnnnnnnnnnnnnnnnnnnnnnnnnnnnnnnnnnnnnnnnnnnnnnnnnnnnnnnnnnnnnnnnnnnnnnnnnnnnnnnnnnnnnnnnnnnnnnnnnnnnnnnnnnnnnnnnnnnnnnnnnnnnnnnnnnnnnnnnnnnnnnnnnnnnnnnnnnnnnnnnnnnnnnnnnnnnnnnnnnnnnnnnnnnnnnnnnnnnnnnnnnnnnnnnnnnnnnnnnnnnnnnnnnnnnnnnnnnnnnnnnnnnnnnnnnnnnnnnnnnnnnnnnnnnnnnnnnnnnnnnnnnnnnnnnnnnnnnnnnnnnnnnnnnnnnnnnnnnnnnnnnnnnnnnnnnnnnnnnnnnnnnnnnnnnnnnnnnnnnnnnnnnnnnnnnnnnnnnnnnnnnnnnnnnnnnnnnnnnnnnnnnnnnnnnnnnnnnnnnnnnnnnnnnnnnnnnnnnnnnnnnnnnnnnnnnnnnnnnnnnnnnnnnnnnnnnnnnnnnnnnnnnnnnnnnnnnnnnnnnnnnnnnnnnnnnnnnnnnnnnnnnnnnnnnnnnnnnnnnnnnnnnnnnnnnnnnnnnnnnnnnnnnnnnnnnnnnnnnnnnnnnnnnnnnnnnnnnnnnnnnnnnnnnnnnnnnnnnnnnnnnnnnnnnnnnnnnnnnnnnnnnnnnnnnnnnnnnnnnnnnnnnnnnnnnnnnnnnnnnnnnnnnnnnnnnnnnnnnnnnnnnnnnnnnnnnnnnnnnnnnnnnnnnnnnnnnnnnnnnnnnnnnnnnnnnnnnnnnnnnnnnnnnnnnnnnnnnnnnnnnnnnnnnnnnnnnnnnnnnnnnnnnnnnnnnnnnnnnnnnnnnnnnnnnnnnnnnnnnnnnnnnnnnnnnnnnnnnnnnnnnnnnnnnnnnnnnnnnnnnnnnnnnnnnnnnnnnnnnnnnnnnnnnnnnnnnnnnnnnnnnnnnnnnnnnnnnnnnnnnnnnnnnnnnnnnnnnnnnnnnnnnnnnnnnnnnnnnnnnnnnnnnnnnnnnnnnnnnnnnnnnnnnnnnnnnnnnnnnnnnnnnnnnnnnnnnnnnnnnnnnnnnnnnnnnnnnnnnnnnnnnnnnnnnnnnnnnnnnnnnnnnnnnnnnnnnnnnnnnnnnnnnnnnnnnnnnnnnnnnnnnnnnnnnnnnnnnnnnnnnnnnnnnnnnnnnnnnnnnnnnnnnnnnnnnnnnnnnnnnnnnnnnnnnnnnnnnnnnnnnnnnnnnnnnnnnnnnnnnnnnnnnnnnnnnnnnnnnnnnnnnnnnnnnnnnnnnnnnnnnnnnnnnnnnnnnnnnnnnnnnnnnnnnnnnnnnnnnnnnnnnnnnnnnnnnnnnnnnnnnnnnnnnnnnnnnnnnnnnnnnnnnnnnnnnnnnnnnnnnnnnnnnnnnnnnnnnnnnnnnnnnnnnnnnnnnnnnnnnnnnnnnnnnnnnnnnnnnnnnnnnnnnnnnnnnnnnnnnnnnnnnnnnnnnnnnnnnnnnnnnnnnnnnnnnnnnnnnnnnnnnnnnnnnnnnnnnnnnnnnnnnnnnnnnnnnnnnnnnnnnnnnnnnnnnnnnnnnnnnnnnnnnnnnnnnnnnnnnnnnnnnnnnnnnnnnnnnnnnnnnnnnnnnnnnnnnnnnnnnnnnnnnnnnnnnnnnnnnnnnnnnnnnnnnnnnnnnnnnnnnnnnnnnnnnnnnnnnnnnnnnnnnnnnnnnnnnnnnnnnnnnnnnnnnnnnnnnnnnnnnnnnnnnnnnnnnnnnnnnnnnnnnnnnnnnnnnnnnnnnnnnnnnnnnnnnnnnnnnnnnnnnnnnnnnnnnnnnnnnnnnnnnnnnnnnnnnnnnnnnnnnnnnnnnnnnnnnnnnnnnnnnnnnnnnnnnnnnnnnnnnnnnnnnnnnnnnnnnnnnnnnnnnnnnnnnnnnnnnnnnnnnnnnnnnnnnnnnnnnnnnnnnnnnnnnnnnnnnnnnnnnnnnnnnnnnnnnnnnnnnnnnnnnnnnnnnnnnnnnnnnnnnnnnnnnnnnnnnnnnnnnnnnnnnnnnnnnnnnnnnnnnnnnnnnnnnnnnnnnnnnnnnnnnnnnnnnnnnnnnnnnnnnnnnnnnnnnnnnnnnnnnnnnnnnnnnnnnnnnnnnnnnnnnnnnnnnnnnnnnnnnnnnnnnnnnnnnnnnnnnnnnnnnnnnnnnnnnnnnnnnnnnnnnnnnnnnnnnnnnnnnnnnnnnnnnnnnnnnnnnnnnnnnnnnnnnnnnnnnnnnnnnnnnnnnnnnnnnnnnnnnnnnnnnnnnnnnnnnnnnnnnnnnnnnnnnnnnnnnnnnnnnnnnnnnnnnnnnnnnnnnnnnnnnnnnnnnnnnnnnnnnnnnnnnnnnnnnnnnnnnnnnnnnnnnnnnnnnnnnnnnnnnnnnnnnnnnnnnnnnnnnnnnnnnnnnnnnnnnnnnnnnnnnnnnnnnnnnnnnnnnnnnnnnnnnnnnnnnnnnnnnnnnnnnnnnnnnnnnnnnnnnnnnnnnnnnnnnnnnnnnnnnnnnnnnnnnnnnnnnnnnnnnnnnnnnnnnnnnnnnnnnnnnnnnnnnnnnnnnnnnnnnnnnnnnnnnnnnnnnnnnnnnnnnnnnnnnnnnnnnnnnnnnnnnnnnnnnnnnnnnnnnnnnnnnnnnnnnnnnnnnnnnnnnnnnnnnnnnnnnnnnnnnnnnnnnnnnnnnnnnnnnnnnnnnnnnnnnnnnnnnnnnnnnnnnnnnnnnnnnnnnnnnnnnnnnnnnnnnnnnnnnnnnnnnnnnnnnnnnnnnnnnnnnnnnnnnnnnnnnnnnnnnnnnnnnnnnnnnnnnnnnnnnnnnnnnnnnnnnnnnnnnnnnnnnnnnnnnnnnnnnnnnnnnnnnnnnnnnnnnnnnnnnnnnnnnnnnnnnnnnnnnnnnnnnnnnnnnnnnnnnnnnnnnnnnnnnnnnnnnnnnnnnnnnnnnnnnnnnnnnnnnnnnnnnnnnnnnnnnnnnnnnnnnnnnnnnnnnnnnnnnnnnnnnnnnnnnnnnnnnnnnnnnnnnnnnnnnnnnnnnnnnnnnnnnnnnnnnnnnnnnnnnnnnnnnnnnnnnnnnnnnnnnnnnnnnnnnnnnnnnnnnnnnnnnnnnnnnnnnnnnnnnnnnnnnnnnnnnnnnnnnnnnnnnnnnnnnnnnnnnnnnnnnnnnnnnnnnnnnnnnnnnnnnnnnnnnnnnnnnnnnnnnnnnnnnnnnnnnnnnnnnnnnnnnnnnnnnnnnnnnnnnnnnnnnnnnnnnnnnnnnnnnnnnnnnnnnnnnnnnnnnnnnnnnnnnnnnnnnnnnnnnnnnnnnnnnnnnnnnnnnnnnnnnnnnnnnnnnnnnnnnnnnnnnnnnnnnnnnnnnnnnnnnnnnnnnnnnnnnnnnnnnnnnnnnnnnnnnnnnnnnnnnnnnnnnnnnnnnnnnnnnnnnnnnnnnnnnnnnnnnnnnnnnnnnnnnnnnnnnnnnnnnnnnnnnnnnnnnnnnnnnnnnnnnnnnnnnnnnnnnnnnnnnnnnnnnnnnnnnnnnnnnnnnnnnnnnnnnnnnnnnnnnnnnnnnnnnnnnnnnnnnnnnnnnnnnnnnnnnnnnnnnnnnnnnnnnnnnnnnnnnnnnnnnnnnnnnnnnnnnnnnnnnnnnnnnnnnnnnnnnnnnnnnnnnnnnnnnnnnnnnnnnnnnnnnnnnnnnnnnnnnnnnnnnnnnnnnnnnnnnnnnnnnnnnnnnnnnnnnnnnnnnnnnnnnnnnnnnnnnnnnnnnnnnnnnnnnnnnnnnnnnnnnnnnnnnnnnnnnnnnnnnnnnnnnnnnnnnnnnnnnnnnnnnnnnnnnnnnnnnnnnnnnnnnnnnnnnnnnnnnnnnnnnnnnnnnnnnnnnnnnnnnnnnnnnnnnnnnnnnnnnnnnnnnnnnnnnnnnnnnnnnnnnnnnnnnnnnnnnnnnnnnnnnnnnnnnnnnnnnnnnnnnnnnnnnnnnnnnnnnnnnnnnnnnnnnnnnnnnnnnnnnnnnnnnnnnnnnnnnnnnnnnnnnnnnnnnnnnnnnnnnnnnnnnnnnnnnnnnnnnnnnnnnnnnnnnnnnnnnnnnnnnnnnnnnnnnnnnnnnnnnnnnnnnnnnnnnnnnnnnnnnnnnnnnnnnnnnnnnnnnnnnnnnnnnnnnnnnnnnnnnnnnnnnnnnnnnnnnnnnnnnnnnnnnnnnnnnnnnnnnnnnnnnnnnnnnnnnnnnnnnnnnnnnnnnnnnnnnnnnnnnnnnnnnnnnnnnnnnnnnnnnnnnnnnnnnnnnnnnnnnnnnnnnnnnnnnnnnnnnnnnnnnnnnnnnnnnnnnnnnnnnnnnnnnnnnnnnnnnnnnnnnnnnnnnnnnnnnnnnnnnnnnnnnnnnnnnnnnnnnnnnnnnnnnnnnnnnnnnnnnnnnnnnnnnnnnnnnnnnnnnnnnnnnnnnnnnnnnnnnnnnnnnnnnnnnnnnnnnnnnnnnnnnnnnnnnnnnnnnnnnnnnnnnnnnnnnnnnnnnnnnnnnnnnnnnnnnnnnnnnnnnnnnnnnnnnnnnnnnnnnnnnnnnnnnnnnnnnnnnnnnnnnnnnnnnnnnnnnnnnnnnnnnnnnnnnnnnnnnnnnnnnnnnnnnnnnnnnnnnnnnnnnnnnnnnnnnnnnnnnnnnnnnnnnnnnnnnnnnnnnnnnnnnnnnnnnnnnnnnnnnnnnnnnnnnnnnnnnnnnnnnnnnnnnnnnnnnnnnnnnnnnnnnnnnnnnnnnnnnnnnnnnnnnnnnnnnnnnnnnnnnnnnnnnnnnnnnnnnnnnnnnnnnnnnnnnnnnnnnnnnnnnnnnnnnnnnnnnnnnnnnnnnnnnnnnnnnnnnnnnnnnnnnnnnnnnnnnnnnnnnnnnnnnnnnnnnnnnnnnnnnnnnnnnnnnnnnnnnnnnnnnnnnnnnnnnnnnnnnnnnnnnnnnnnnnnnnnnnnnnnnnnnnnnnnnnnnnnnnnnnnnnnnnnnnnnnnnnnnnnnnnnnnnnnnnnnnnnnnnnnnnnnnnnnnnnnnnnnnnnnnnnnnnnnnnnnnnnnnnnnnnnnnnnnnnnnnnnnnnnnnnnnnnnnnnnnnnnnnnnnnnnnnnnnnnnnnnnnnnnnnnnnnnnnnnnnnnnnnnnnnnnnnnnnnnnnnnnnnnnnnnnnnnnnnnnnnnnnnnnnnnnnnnnnnnnnnnnnnnnnnnnnnnnnnnnnnnnnnnnnnnnnnnnnnnnnnnnnnnnnnnnnnnnnnnnnnnnnnnnnnnnnnnnnnnnnnnnnnnnnnnnnnnnnnnnnnnnnnnnnnnnnnnnnnnnnnnnnnnnnnnnnnnnnnnnnnnnnnnnnnnnnnnnnnnnnnnnnnnnnnnnnnnnnnnnnnnnnnnnnnnnnnnnnnnnnnnnnnnnnnnnnnnnnnnnnnnnnnnnnnnnnnnnnnnnnnnnnnnnnnnnnnnnnnnnnnnnnnnnnnnnnnnnnnnnnnnnnnnnnnnnnnnnnnnnnnnnnnnnnnnnnnnnnnnnnnnnnnnnnnnnnnnnnnnnnnnnnnnnnnnnnnnnnnnnnnnnnnnnnnnnnnnnnnnnnnnnnnnnnnnnnnnnnnnnnnnnnnnnnnnnnnnnnnnnnnnnnnnnnnnnnnnnnnnnnnnnnnnnnnnnnnnnnnnnnnnnnnnnnnnnnnnnnnnnnnnnnnnnnnnnnnnnnnnnnnnnnnnnnnnnnnnnnnnnnnnnnnnnnnnnnnnnnnnnnnnnnnnnnnnnnnnnnnnnnnnnnnnnnnnnnnnnnnnnnnnnnnnnnnnnnnnnnnnnnnnnnnnnnnnnnnnnnnnnnnnnnnnnnnnnnnnnnnnnnnnnnnnnnnnnnnnnnnnnnnnnnnnnnnnnnnnnnnnnnnnnnnnnnnnnnnnnnnnnnnnnnnnnnnnnnnnnnnnnnnnnnnnnnnnnnnnnnnnnnnnnnnnnnnnnnnnnnnnnnnnnnnnnnnnnnnnnnnnnnnnnnnnnnnnnnnnnnnnnnnnnnnnnnnnnnnnnnnnnnnnnnnnnnnnnnnnnnnnnnnnnnnnnnnnnnnnnnnnnnnnnnnnnnnnnnnnnnnnnnnnnnnnnnnnnnnnnnnnnnnnnnnnnnnnnnnnnnnnnnnnnnnnnnnnnnnnnnnnnnnnnnnnnnnnnnnnnnnnnnnnnnnnnnnnnnnnnnnnnnnnnnnnnnnnnnnnnnnnnnnnnnnnnnnnnnnnnnnnnnnnnnnnnnnnnnnnnnnnnnnnnnnnnnnnnnnnnnnnnnnnnnnnnnnnnnnnnnnnnnnnnnnnnnnnnnnnnnnnnnnnnnnnnnnnnnnnnnnnnnnnnnnnnnnnnnnnnnnnnnnnnnnnnnnnnnnnnnnnnnnnnnnnnnnnnnnnnnnnnnnnnnnnnnnnnnnnnnnnnnnnnnnnnnnnnnnnnnnnnnnnnnnnnnnnnnnnnnnnnnnnnnnnnnnnnnnnnnnnnnnnnnnnnnnnnnnnnnnnnnnnnnnnnnnnnnnnnnnnnnnnnnnnnnnnnnnnnnnnnnnnnnnnnnnnnnnnnnnnnnnnnnnnnnnnnnnnnnnnnnnnnnnnnnnnnnnnnnnnnnnnnnnnnnnnnnnnnnnnnnnnnnnnnnnnnnnnnnnnnnnnnnnnnnnnnnnnnnnnnnnnnnnnnnnnnnnnnnnnnnnnnnnnnnnnnnnnnnnnnnnnnnnnnnnnnnnnnnnnnnnnnnnnnnnnnnnnnnnnnnnnnnnnnnnnnnnnnnnnnnnnnnnnnnnnnnnnnnnnnnnnnnnnnnnnnnnnnnnnnnnnnnnnnnnnnnnnnnnnnnnnnnnnnnnnnnnnnnnnnnnnnnnnnnnnnnnnnnnnnnnnnnnnnnnnnnnnnnnnnnnnnnnnnnnnnnnnnnnnnnnnnnnnnnnnnnnnnnnnnnnnnnnnnnnnnnnnnnnnnnnnnnnnnnnnnnnnnnnnnnnnnnnnnnnnnnnnnnnnnnnnnnnnnnnnnnnnnnnnnnnnnnnnnnnnnnnnnnnnnnnnnnnnnnnnnnnnnnnnnnnnnnnnnnnnnnnnnnnnnnnnnnnnnnnnnnnnnnnnnnnnnnnnnnnnnnnnnnnnnnnnnnnnnnnnnnnnnnnnnnnnnnnnnnnnnnnnnnnnnnnnnnnnnnnnnnnnnnnnnnnnnnnnnnnnnnnnnnnnnnnnnnnnnnnnnnnnnnnnnnnnnnnnnnnnnnnnnnnnnnnnnnnnnnnnnnnnnnnnnnnnnnnnnnnnnnnnnnnnnnnnnnnnnnnnnnnnnnnnnnnnnnnnnnnnnnnnnnnnnnnnnnnnnnnnnnnnnnnnnnnnnnnnnnnnnnnnnnnnnnnnnnnnnnnnnnnnnnnnnnnnnnnnnnnnnnnnnnnnnnnnnnnnnnnnnnnnnnnnnnnnnnnnnnnnnnnnnnnnnnnnnnnnnnnnnnnnnnnnnnnnnnnnnnnnnnnnnnnnnnnnnnnnnnnnnnnnnnnnnnnnnnnnnnnnnnnnnnnnnnnnnnnnnnnnnnnnnnnnnnnnnnnnnnnnnnnnnnnnnnnnnnnnnnnnnnnnnnnnnnnnnnnnnnnnnnnnnnnnnnnnnnnnnnnnnnnnnnnnnnnnnnnnnnnnnnnnnnnnnnnnnnnnnnnnnnnnnnnnnnnnnnnnnnnnnnnnnnnnnnnnnnnnnnnnnnnnnnnnnnnnnnnnnnnnnnnnnnnnnnnnnnnnnnnnnnnnnnnnnnnnnnnnnnnnnnnnnnnnnnnnnnnnnnnnnnnnnnnnnnnnnnnnnnnnnnnnnnnnnnnnnnnnnnnnnnnnnnnnnnnnnnnnnnnnnnnnnnnnnnnnnnnnnnnnnnnnnnnnnnnnnnnnnnnnnnnnnnnnnnnnnnnnnnnnnnnnnnnnnnnnnnnnnnnnnnnnnnnnnnnnnnnnnnnnnnnnnnnnnnnnnnnnnnnnnnnnnnnnnnnnnnnnnnnnnnnnnnnnnnnnnnnnnnnnnnnnnnnnnnnnnnnnnnnnnnnnnnnnnnnnnnnnnnnnnnnnnnnnnnnnnnnnnnnnnnnnnnnnnnnnnnnnnnnnnnnnnnnnnnnnnnnnnnnnnnnnnnnnnnnnnnnnnnnnnnnnnnnnnnnnnnnnnnnnnnnnnnnnnnnnnnnnnnnnnnnnnnnnnnnnnnnnnnnnnnnnnnnnnnnnnnnnnnnnnnnnnnnnnnnnnnnnnnnnnnnnnnnnnnnnnnnnnnnnnnnnnnnnnnnnnnnnnnnnnnnnnnnnnnnnnnnnnnnnnnnnnnnnnnnnnnnnnnnnnnnnnnnnnnnnnnnnnnnnnnnnnnnnnnnnnnnnnnnnnnnnnnnnnnnnnnnnnnnnnnnnnnnnnnnnnnnnnnnnnnnnnnnnnnnnnnnnnnnnnnnnnnnnnnnnnnnnnnnnnnnnnnnnnnnnnnnnnnnnnnnnnnnnnnnnnnnnnnnnnnnnnnnnnnnnnnnnnnnnnnnnnnnnnnnnnnnnnnnnnnnnnnnnnnnnnnnnnnnnnnnnnnnnnnnnnnnnnnnnnnnnnnnnnnnnnnnnnnnnnnnnnnnnnnnnnnnnnnnnnnnnnnnnnnnnnnnnnnnnnnnnnnnnnnnnnnnnnnnnnnnnnnnnnnnnnnnnnnnnnnnnnnnnnnnnnnnnnnnnnnnnnnnnnnnnnnnnnnnnnnnnnnnnnnnnnnnnnnnnnnnnnnnnnnnnnnnnnnnnnnnnnnnnnnnnnnnnnnnnnnnnnnnnnnnnnnnnnnnnnnnnnnnnnnnnnnnnnnnnnnnnnnnnnnnnnnnnnnnnnnnnnnnnnnnnnnnnnnnnnnnnnnnnnnnnnnnnnnnnnnnnnnnnnnnnnnnnnnnnnnnnnnnnnnnnnnnnnnnnnnnnnnnnnnnnnnnnnnnnnnnnnnnnnnnnnnnnnnnnnnnnnnnnnnnnnnnnnnnnnnnnnnnnnnnnnnnnnnnnnnnnnnnnnnnnnnnnnnnnnnnnnnnnnnnnnnnnnnnnnnnnnnnnnnnnnnnnnnnnnnnnnnnnnnnnnnnnnnnnnnnnnnnnnnnnnnnnnnnnnnnnnnnnnnnnnnnnnnnnnnnnnnnnnnnnnnnnnnnnnnnnnnnnnnnnnnnnnnnnnnnnnnnnnnnnnnnnnnnnnnnnnnnnnnnnnnnnnnnnnnnnnnnnnnnnnnnnnnnnnnnnnnnnnnnnnnnnnnnnnnnnnnnnnnnnnnnnnnnnnnnnnnnnnnnnnnnnnnnnnnnnnnnnnnnnnnnnnnnnnnnnnnnnnnnnnnnnnnnnnnnnnnnnnnnnnnnnnnnnnnnnnnnnnnnnnnnnnnnnnnnnnnnnnnnnnnnnnnnnnnnnnnnnnnnnnnnnnnnnnnnnnnnnnnnnnnnnnnnnnnnnnnnnnnnnnnnnnnnnnnnnnnnnnnnnnnnnnnnnnnnnnnnnnnnnnnnnnnnnnnnnnnnnnnnnnnnnnnnnnnnnnnnnnnnnnnnnnnnnnnnnnnnnnnnnnnnnnnnnnnnnnnnnnnnnnnnnnnnnnnnnnnnnnnnnnnnnnnnnnnnnnnnnnnnnnnnnnnnnnnnnnnnnnnnnnnnnnnnnnnnnnnnnnnnnnnnnnnnnnnnnnnnnnnnnnnnnnnnnnnnnnnnnnnnnnnnnnnnnnnnnnnnnnnnnnnnnnnnnnnnnnnnnnnnnnnnnnnnnnnnnnnnnnnnnnnnnnnnnnnnnnnnnnnnnnnnnnnnnnnnnnnnnnnnnnnnnnnnnnnnnnnnnnnnnnnnnnnnnnnnnnnnnnnnnnnnnnnnnnnnnnnnnnnnnnnnnnnnnnnnnnnnnnnnnnnnnnnnnnnnnnnnnnnnnnnnnnnnnnnnnnnnnnnnnnnnnnnnnnnnnnnnnnnnnnnnnnnnnnnnnnnnnnnnnnnnnnnnnnnnnnnnnnnnnnnnnnnnnnnnnnnnnnnnnnnnnnnnnnnnnnnnnnnnnnnnnnnnnnnnnnnnnnnnnnnnnnnnnnnnnnnnnnnnnnnnnnnnnnnnnnnnnnnnnnnnnnnnnnnnnnnnnnnnnnnnnnnnnnnnnnnnnnnnnnnnnnnnnnnnnnnnnnnnnnnnnnnnnnnnnnnnnnnnnnnnnnnnnnnnnnnnnnnnnnnnnnnnnnnnnnnnnnnnnnnnnnnnnnnnnnnnnnnnnnnnnnnnnnnnnnnnnnnnnnnnnnnnnnnnnnnnnnnnnnnnnnnnnnnnnnnnnnnnnnnnnnnnnnnnnnnnnnnnnnnnnnnnnnnnnnnnnnnnnnnnnnnnnnnnnnnnnnnnnnnnnnnnnnnnnnnnnnnnnnnnnnnnnnnnnnnnnnnnnnnnnnnnnnnnnnnnnnnnnnnnnnnnnnnnnnnnnnnnnnnnnnnnnnnnnnnnnnnnnnnnnnnnnnnnnnnnnnnnnnnnnnnnnnnnnnnnnnnnnnnnnnnnnnnnnnnnnnnnnnnnnnnnnnnnnnnnnnnnnnnnnnnnnnnnnnnnnnnnnnnnnnnnnnnnnnnnnnnnnnnnnnnnnnnnnnnnnnnnnnnnnnnnnnnnnnnnnnnnnnnnnnnnnnnnnnnnnnnnnnnnnnnnnnnnnnnnnnnnnnnnnnnnnnnnnnnnnnnnnnnnnnnnnnnnnnnnnnnnnnnnnnnnnnnnnnnnnnnnnnnnnnnnnnnnnnnnnnnnnnnnnnnnnnnnnnnnnnnnnnnnnnnnnnnnnnnnnnnnnnnnnnnnnnnnnnnnnnnnnnnnnnnnnnnnnnnnnnnnnnnnnnnnnnnnnnnnnnnnnnnnnnnnnnnnnnnnnnnnnnnnnnnnnnnnnnnnnnnnnnnnnnnnnnnnnnnnnnnnnnnnnnnnnnnnnnnnnnnnnnnnnnnnnnnnnnnnnnnnnnnnnnnnnnnnnnnnnnnnnnnnnnnnnnnnnnnnnnnnnnnnnnnnnnnnnnnnnnnnnnnnnnnnnnnnnnnnnnnnnnnnnnnnnnnnnnnnnnnnnnnnnnnnnnnnnnnnnnnnnnnnnnnnnnnnnnnnnnnnnnnnnnnnnnnnnnnnnnnnnnnnnnnnnnnnnnnnnnnnnnnnnnnnnnnnnnnnnnnnnnnnnnnnnnnnnnnnnnnnnnnnnnnnnnnnnnnnnnnnnnnnnnnnnnnnnnnnnnnnnnnnnnnnnnnnnnnnnnnnnnnnnnnnnnnnnnnnnnnnnnnnnnnnnnnnnnnnnnnnnnnnnnnnnnnnnnnnnnnnnnnnnnnnnnnnnnnnnnnnnnnnnnnnnnnnnnnnnnnnnnnnnnnnnnnnnnnnnnnnnnnnnnnnnnnnnnnnnnnnnnnnnnnnnnnnnnnnnnnnnnnnnnnnnnnnnnnnnnnnnnnnnnnnnnnnnnnnnnnnnnnnnnnnnnnnnnnnnnnnnnnnnnnnnnnnnnnnnnnnnnnnnnnnnnnnnnnnnnnnnnnnnnnnnnnnnnnnnnnnnnnnnnnnnnnnnnnnnnnnnnnnnnnnnnnnnnnnnnnnnnnnnnnnnnnnnnnnnnnnnnnnnnnnnnnnnnnnnnnnnnnnnnnnnnnnnnnnnnnnnnnnnnnnnnnnnnnnnnnnnnnnnnnnnnnnnnnnnnnnnnnnnnnnnnnnnnnnnnnnnnnnnnnnnnnnnnnnnnnnnnnnnnnnnnnnnnnnnnnnnnnnnnnnnnnnnnnnnnnnnnnnnnnnnnnnnnnnnnnnnnnnnnnnnnnnnnnnnnnnnnnnnnnnnnnnnnnnnnnnnnnnnnnnnnnnnnnnnnnnnnnnnnnnnnnnnnnnnnnnnnnnnnnnnnnnnnnnnnnnnnnnnnnnnnnnnnnnnnnnnnnnnnnnnnnnnnnnnnnnnnnnnnnnnnnnnnnnnnnnnnnnnnnnnnnnnnnnnnnnnnnnnnnnnnnnnnnnnnnnnnnnnnnnnnnnnnnnnnnnnnnnnnnnnnnnnnnnnnnnnnnnnnnnnnnnnnnnnnnnnnnnnnnnnnnnnnnnnnnnnnnnnnnnnnnnnnnnnnnnnnnnnnnnnnnnnnnnnnnnnnnnnnnnnnnnnnnnnnnnnnnnnnnnnnnnnnnnnnnnnnnnnnnnnnnnnnnnnnnnnnnnnnnnnnnnnnnnnnnnnnnnnnnnnnnnnnnnnnnnnnnnnnnnnnnnnnnnnnnnnnnnnnnnnnnnnnnnnnnnnnnnnnnnnnnnnnnnnnnnnnnnnnnnnnnnnnnnnnnnnnnnnnnnnnnnnnnnnnnnnnnnnnnnnnnnnnnnnnnnnnnnnnnnnnnnnnnnnnnnnnnnnnnnnnnnnnnnnnnnnnnnnnnnnnnnnnnnnnnnnnnnnnnnnnnnnnnnnnnnnnnnnnnnnnnnnnnnnnnnnnnnnnnnnnnnnnnnnnnnnnnnnnnnnnnnnnnnnnnnnnnnnnnnnnnnnnnnnnnnnnnnnnnnnnnnnnnnnnnnnnnnnnnnnnnnnnnnnnnnnnnnnnnnnnnnnnnnnnnnnnnnnnnnnnnnnnnnnnnnnnnnnnnnnnnnnnnnnnnnnnnnnnnnnnnnnnnnnnnnnnnnnnnnnnnnnnnnnnnnnnnnnnnnnnnnnnnnnnnnnnnnnnnnnnnnnnnnnnnnnnnnnnnnnnnnnnnnnnnnnnnnnnnnnnnnnnnnnnnnnnnnnnnnnnnnnnnnnnnnnnnnnnnnnnnnnnnnnnnnnnnnnnnnnnnnnnnnnnnnnnnnnnnnnnnnnnnnnnnnnnnnnnnnnnnnnnnnnnnnnnnnnnnnnnnnnnnnnnnnnnnnnnnnnnnnnnnnnnnnnnnnnnnnnnnnnnnnnnnnnnnnnnnnnnnnnnnnnnnnnnnnnnnnnnnnnnnnnnnnnnnnnnnnnnnnnnnnnnnnnnnnnnnnnnnnnnnnnnnnnnnnnnnnnnnnnnnnnnnnnnnnnnnnnnnnnnnnnnnnnnnnnnnnnnnnnnnnnnnnnnnnnnnnnnnnnnnnnnnnnnnnnnnnnnnnnnnnnnnnnnnnnnnnnnnnnnnnnnnnnnnnnnnnnnnnnnnnnnnnnnnnnnnnnnnnnnnnnnnnnnnnnnnnnnnnnnnnnnnnnnnnnnnnnnnnnnnnnnnnnnnnnnnnnnnnnnnnnnnnnnnnnnnnnnnnnnnnnnnnnnnnnnnnnnnnnnnnnnnnnnnnnnnnnnnnnnnnnnnnnnnnnnnnnnnnnnnnnnnnnnnnnnnnnnnnnnnnnnnnnnnnnnnnnnnnnnnnnnnnnnnnnnnnnnnnnnnnnnnnnnnnnnnnnnnnnnnnnnnnnnnnnnnnnnnnnnnnnnnnnnnnnnnnnnnnnnnnnnnnnnnnnnnnnnnnnnnnnnnnnnnnnnnnnnnnnnnnnnnnnnnnnnnnnnnnnnnnnnnnnnnnnnnnnnnnnnnnnnnnnnnnnnnnnnnnnnnnnnnnnnnnnnnnnnnnnnnnnnnnnnnnnnnnnnnnnnnnnnnnnnnnnnnnnnnnnnnnnnnnnnnnnnnnnnnnnnnnnnnnnnnnnnnnnnnnnnnnnnnnnnnnnnnnnnnnnnnnnnnnnnnnnnnnnnnnnnnnnnnnnnnnnnnnnnnnnnnnnnnnnnnnnnnnnnnnnnnnnnnnnnnnnnnnnnnnnnnnnnnnnnnnnnnnnnnnnnnnnnnnnnnnnnnnnnnnnnnnnnnnnnnnnnnnnnnnnnnnnnnnnnnnnnnnnnnnnnnnnnnnnnnnnnnnnnnnnnnnnnnnnnnnnnnnnnnnnnnnnnnnnnnnnnnnnnnnnnnnnnnnnnnnnnnnnnnnnnnnnnnnnnnnnnnnnnnnnnnnnnnnnnnnnnnnnnnnnnnnnnnnnnnnnnnnnnnnnnnnnnnnnnnnnnnnnnnnnnnnnnnnnnnnnnnnnnnnnnnnnnnnnnnnnnnnnnnnnnnnnnnnnnnnnnnnnnnnnnnnnnnnnnnnnnnnnnnnnnnnnnnnnnnnnnnnnnnnnnnnnnnnnnnnnnnnnnnnnnnnnnnnnnnnnnnnnnnnnnnnnnnnnnnnnnnnnnnnnnnnnnnnnnnnnnnnnnnnnnnnnnnnnnnnnnnnnnnnnnnnnnnnnnnnnnnnnnnnnnnnnnnnnnnnnnnnnnnnnnnnnnnnnnnnnnnnnnnnnnnnnnnnnnnnnnnnnnnnnnnnnnnnnnnnnnnnnnnnnnnnnnnnnnnnnnnnnnnnnnnnnnnnnnnnnnnnnnnnnnnnnnnnnnnnnnnnnnnnnnnnnnnnnnnnnnnnnnnnnnnnnnnnnnnnnnnnnnnnnnnnnnnnnnnnnnnnnnnnnnnnnnnnnnnnnnnnnnnnnnnnnnnnnnnnnnnnnnnnnnnnnnnnnnnnnnnnnnnnnnnnnnnnnnnnnnnnnnnnnnnnnnnnnnnnnnnnnnnnnnnnnnnnnnnnnnnnnnnnnnnnnnnnnnnnnnnnnnnnnnnnnnnnnnnnnnnnnnnnnnnnnnnnnnnnnnnnnnnnnnnnnnnnnnnnnnnnnnnnnnnnnnnnnnnnnnnnnnnnnnnnnnnnnnnnnnnnnnnnnnnnnnnnnnnnnnnnnnnnnnnnnnnnnnnnnnnnnnnnnnnnnnnnnnnnnnnnnnnnnnnnnnnnnnnnnnnnnnnnnnnnnnnnnnnnnnnnnnnnnnnnnnnnnnnnnnnnnnnnnnnnnnnnnnnnnnnnnnnnnnnnnnnnnnnnnnnnnnnnnnnnnnnnnnnnnnnnnnnnnnnnnnnnnnnnnnnnnnnnnnnnnnnnnnnnnnnnnnnnnnnnnnnnnnnnnnnnnnnnnnnnnnnnnnnnnnnnnnnnnnnnnnnnnnnnnnnnnnnnnnnnnnnnnnnnnnnnnnnnnnnnnnnnnnnnnnnnnnnnnnnnnnnnnnnnnnnnnnnnnnnnnnnnnnnnnnnnnnnnnnnnnnnnnnnnnnnnnnnnnnnnnnnnnnnnnnnnnnnnnnnnnnnnnnnnnnnnnnnnnnnnnnnnnnnnnnnnnnnnnnnnnnnnnnnnnnnnnnnnnnnnnnnnnnnnnnnnnnnnnnnnnnnnnnnnnnnnnnnnnnnnnnnnnnnnnnnnnnnnnnnnnnnnnnnnnnnnnnnnnnnnnnnnnnnnnnnnnnnnnnnnnnnnnnnnnnnnnnnnnnnnnnnnnnnnnnnnnnnnnnnnnnnnnnnnnnnnnnnnnnnnnnnnnnnnnnnnnnnnnnnnnnnnnnnnnnnnnnnnnnnnnnnnnnnnnnnnnnnnnnnnnnnnnnnnnnnnnnnnnnnnnnnnnnnnnnnnnnnnnnnnnnnnnnnnnnnnnnnnnnnnnnnnnnnnnnnnnnnnnnnnnnnnnnnnnnnnnnnnnnnnnnnnnnnnnnnnnnnnnnnnnnnnnnnnnnnnnnnnnnnnnnnnnnnnnnnnnnnnnnnnnnnnnnnnnnnnnnnnnnnnnnnnnnnnnnnnnnnnnnnnnnnnnnnnnnnnnnnnnnnnnnnnnnnnnnnnnnnnnnnnnnnnnnnnnnnnnnnnnnnnnnnnnnnnnnnnnnnnnnnnnnnnnnnnnnnnnnnnnnnnnnnnnnnnnnnnnnnnnnnnnnnnnnnnnnnnnnnnnnnnnnnnnnnnnnnnnnnnnnnnnnnnnnnnnnnnnnnnnnnnnnnnnnnnnnnnnnnnnnnnnnnnnnnnnnnnnnnnnnnnnnnnnnnnnnnnnnnnnnnnnnnnnnnnnnnnnnnnnnnnnnnnnnnnnnnnnnnnnnnnnnnnnnnnnnnnnnnnnnnnnnnnnnnnnnnnnnnnnnnnnnnnnnnnnnnnnnnnnnnnnnnnnnnnnnnnnnnnnnnnnnnnnnnnnnnnnnnnnnnnnnnnnnnnnnnnnnnnnnnnnnnnnnnnnnnnnnnnnnnnnnnnnnnnnnnnnnnnnnnnnnnnnnnnnnnnnnnnnnnnnnnnnnnnnnnnnnnnnnnnnnnnnnnnnnnnnnnnnnnnnnnnnnnnnnnnnnnnnnnnnnnnnnnnnnnnnnnnnnnnnnnnnnnnnnnnnnnnnnnnnnnnnnnnnnnnnnnnnnnnnnnnnnnnnnnnnnnnnnnnnnnnnnnnnnnnnnnnnnnnnnnnnnnnnnnnnnnnnnnnnnnnnnnnnnnnnnnnnnnnnnnnnnnnnnnnnnnnnnnnnnnnnnnnnnnnnnnnnnnnnnnnnnnnnnnnnnnnnnnnnnnnnnnnnnnnnnnnnnnnnnnnnnnnnnnnnnnnnnnnnnnnnnnnnnnnnnnnnnnnnnnnnnnnnnnnnnnnnnnnnnnnnnnnnnnnnnnnnnnnnnnnnnnnnnnnnnnnnnnnnnnnnnnnnnnnnnnnnnnnnnnnnnnnnnnnnnnnnnnnnnnnnnnnnnnnnnnnnnnnnnnnnnnnnnnnnnnnnnnnnnnnnnnnnnnnnnnnnnnnnnnnnnnnnnnnnnnnnnnnnnnnnnnnnnnnnnnnnnnnnnnnnnnnnnnnnnnnnnnnnnnnnnnnnnnnnnnnnnnnnnnnnnnnnnnnnnnnnnnnnnnnnnnnnnnnnnnnnnnnnnnnnnnnnnnnnnnnnnnnnnnnnnnnnnnnnnnnnnnnnnnnnnnnnnnnnnnnnnnnnnnnnnnnnnnnnnnnnnnnnnnnnnnnnnnnnnnnnnnnnnnnnnnnnnnnnnnnnnnnnnnnnnnnnnnnnnnnnnnnnnnnnnnnnnnnnnnnnnnnnnnnnnnnnnnnnnnnnnnnnnnnnnnnnnnnnnnnnnnnnnnnnnnnnnnnnnnnnnnnnnnnnnnnnnnnnnnnnnnnnnnnnnnnnnnnnnnnnnnnnnnnnnnnnnnnnnnnnnnnnnnnnnnnnnnnnnnnnnnnnnnnnnnnnnnnnnnnnnnnnnnnnnnnnnnnnnnnnnnnnnnnnnnnnnnnnnnnnnnnnnnnnnnnnntagtagatgcaagaatcgttccgaatctgccacaataactgcggattcctttcccaaagcctttttcgcccacggacaggccgtttgccccttcccactaacatcccgtaaacctccccttaaattcccgcccggccaatgggaactcagcgggaagtattttagatgtgtatgggatggggcaaatggggcttctattgatagtgggtatcaaaatgggaggaagtccacaaattgcgcgaattcatacgaattgcttttccagttacgctaccaactgtggtagataacctaaaataaaggacttacttcccaatcgggcaagtaatccatatgtttggagcccgaaggtcccagaacgattggccgacggggacatcgaccttcctgacgctggcgtcgagcgaggcacgagcatggacgccagcaacatctcctgtagtccatactcgcaagctcgctgcactccaggctcaccaacgttggaaggcaaattcacaaattcacaaccggtaaatatggcttgtgaatttgcaacctgctgatagacgggtaattatgaggctaattcacaaaaaaggggtctcttatacatccgcggaagccgattgtaaacaggatatgatgtatccacgctaccagtctataatacatatagaaatagtatatataatatataatagtattatatattattatatattgatattatatcatctctaccttcccttcatctcttgtttgcggcatgagccactgcaaaccggcattctcccctggtccggctggatataagagataagcgtattttgtgaatttgtcccccaactcactgtgccacaataacacacggattcacaagccatatttaccggttgtgaatttgtgaatctgaccttgccggccttaaggaagtttgaaattagagccctattttggacttgacaaattattccttggtaaatttggtgtataatagctatggggcataatgatgttagcctgtggaacggcctctgtaaaggatcaacaagctatcaaccctccccatgcgacaggagcttcaatgtattataatttgacagacaaaccctggatcagtgtgctacagcttgacgggcattctgccaggctcggcctggctgaggtcctgcgaaaagcacacacactgcgtttggcttacggcaatccgatggaccgcatgtccgttttccgtttcctcctcgccctgggctattggtgttttgccaatacaaaacaagcgccggtatcagataagccactgcctcaggcatggacggactggcttgaacaaaaccaagaatatttcgaattgttcggtgatggccccagattctaccaatccccaggaacatccagaatacgccccagcacggaccttatccacgagcttcccacggcaaacaatttctggcacttccgccatgtgaccgatttcatcgatggcatttgcccagcttgctgcgttaccggtctgctgcgcctgccactctttaccaccgtaggcggcagcggaatcggagccggcatcaacagaactcctcccttctatgccatctggcagggtgatagtctgtcggaatcgatattcctgaattgggaacccacttcccggttgggtgttcctgcctggctgaacccgtttggatcccaaaacgagaaggatgtagccttgctgactggcctcacctggctgccccgcaaggtattcctgcttggcccggtgtcagacggagcaaaatgcagcgcctgcggagaagagcatgagcctctggtctatgcctgcaacaatgaggcggtgaaagtgcctccgaaccttgtctggaacgaccctcacgcgatttaccgggatgacaataatggcctgactgcccaggtggctctgatgtccggggacaaatacactttcgctaacagggattggcataaacccctggtcggcttcttacgggcgaaaggcatgtctcggaccgccacgctgtttttagtgggcttcacaagcgttcaagccaaatgtgtggacgtttgggaaaagaccattgccctatccggaaaaacaagctccgaggaactgctggaccagatatccgaaagagcctactccctgcacaggatgaggaaacaagaccgccggggcgattacaaggaatccgtgggaatcaccgccgtggcggacatcatcccgcacgtagagcatcgggttgacgtccattcgggcgagatggtggaaaacagcggcaatgtctggcaggaagcggatgaagattacggattcttcatgaagcgttttgccgtttctctagtgccggaaattacggttgccgccaagcttgaacgagaacaactggctcggcgcaagccctggcccctaaaaccaaaatcaattaaaaaaccttcatccggaggcgataatgaatgagagcaccgtgaaatttgttcggagcctgggcgaactcaaagagggcgacctgggcttgctcagaaagctcaggggtcgccgtctggatgaatccctgccgggtttcgacctgttttccggcctgtggtggccactccgcagtataagccccaaaacccccaggcggaaggtggtctggctagtcaccaagcttttcgcggaattccgctttgagcaaaagaaaggcgccagcctgccttggctcatgggcagaatatgccgtggacttaaagaagaaaaagagttcccacgtgttttagccaggttcgaccgcttgctcacgctcgagttgaaccaactggaggaaccgctggcgcaagtgctcgcgattttaaaaagacatgacattgccagtctggactgggttgccctcatcgatgacctctccgcttgggaacgggaatcaaacagagcgatatggtcagacacatttatttcagcatttaataatcagcaaggaggaatcaaatgttgattgaaatacacatgatccaaaaccacagcccggccaacctgaaccgggacgacctgggcgcgcccaagacctgttatttcggtggggtgttgcggtcccgcatctccagccagtgcctaaagcggagcatcaggatgagcgatgaattcaaaaacttgctcgggggtatccgtacccgtcggttggccgagttgattacaaaagctacaggacaggactgcaggaatcaggcagaggaagttctgaacaaagccggtttgaaacacgaaaacggacatagtaagatgctggtgttcatgacccggaacaagatcgatgcccttgctcaaattgtcaccagcgaaggcctgagtgttgcagagaaagccaagaaagcggcagatgtaatatcgggggcaatacattcccctgacatcgctctgtgcggaagaatgctcgagcccgataccaaggacaagaacacagacaaggtcaagtgggaaaataccactgttgaagcagccctgcaggtgtcgcacgccatttcaacccacatcgcccgcccagaaatagattactatgtagcagctgatgacgagcctggcgacgacacaggtgctggattcatagacgaggcgatgtttgcttcggcctgtttctacaaatattactcaattgattggaataccttgataatcaacctccagggtaatgaaaagttggcagctcatactgtcggagcctttatccaggccgctgcactcactaatcccagcggaaagcagaacagctttgccgcacataaccttcccgatggaatattggtagaaataaaagagacacctgtcagctatgcaaatgcctttgtgcgaccggtgggaatcgttaaggattctgacttggtagaacaaagcattggccaactggccaactatgtgaaggatataagtgccggtttcttccctggacagatgaaaggcaacgctctgtggttctcgcccaatggacgttatcccctaaagcctcaacagggcacgctggacataaagccagtttgcaacctgctagaacttgttcgcgaagcagttgagatgttgggttttgaatgggatgatgtaaaaaacgagaaagtagagagttgaaatgtcttctccgcctaataccctgttcctgagattggaggctccccttcaggcctggggaagcaatgaggccaaattcgccgtgcgcaggacagccgacgcgcccaccaaatccggagtggcaggcctgctctgcgctgccctgggaatcagccgggccgaagccggacagtattggctgggtgaaattgccaaattgcgcatgggggtgcggatagaccgcccgggcatccgctggtgggattaccatactgtgggagcggagcagaagctgcgcatttctgacctgaaaatgcccaacggcctagttctggttggcactgccctggccaaaaacctgggcgcggacaagatcaaatccaaacccggggctttgctctcccgacgcgagtatttggctgatgccagcttcctggttgcgctccagggtgaaccggatatcgtggcacaactggctgaagcgctgaaaaaaccagtctggacgctttatctggggcgaaaatcctgtcccccctcccgtccggtggatgaacacccgccagggttttatgccagtctgaaagaggctttgcggtcgatcccggcgcaactgagggaaaaaggcgaaccgatacctgacagtgttccctgtgtgctcgactgggttccggcccatgatgacgtgcacgctccgccgaacgccgaagcgcattacgacgtgccggtgtcctttgagcctccccaccacttgccccggctggtgatccgctgtaacctgccattggaccgcaacttcgaggcagagaccgtgctttccggcaaagcctggcaaccgccccgcaaccgggcaaattacgacaatcctgaatacaaaagggtccgcgctgagcgtttggtgatggacaatgccgcctgcatgttctgcaaggcacccgccactactgtgcagcacgtgaattaccgacgcgccggaggcagcgagaagccggaggacttgcgcgccctctgccgcctctgccacgatgcctgcaccatgctggaatatggcagcggcatgaccatggaccgcatagatccctgtgaccccgcctggcgtgagcgcatcttggccaaacgcgaggaaataatcaaattccgctcgctggagcagcgcaggcgcaaactcgatccgaaggaggagaacggatgatgtatctatcccaactgctcatcgacacaggcggcaaccctgaccggccaaggcccgggcgcttgtggctgaacaatatctataatgtccaccggcggctcagcatggctttccccatgcgcaagcgcaaggaaggagacccgaggtttctgcagccctttgaccccgcagattttgaaaagcgccagttcctctttcgggtggacaacaacaccgatggagaaaatcaaagggcgatggttttggtgcagtcgtccctgccgccggattgggactgggctttccagaatgccacgggatttttggcagcccctccccaggttaaggaatacgatccccagttctcagcaggtcagcggctgcgcttccgcatcctcgtgaatgccagtgtcaaacgcaaaatcgacgagttgcgggaaggacccggaggaaaggaaaaaacgggaagggttctgcacaaacgggtcgcccttacctgggacacaaattccaacccaaaggatgcggtggcgcaatggtttgccgccaaggctggcagactgggcttcacgcccggggagaccgaactggtaagcctgggctgggtatacggttccaaaccggagccccggggaaattcgccccggcgtgagaacgaataccgtcccctgagataccgttccgccctgctggaaggttatctgacagtggatgatgcctttctgttccgggaagccttggaaaaaggtatcggcagcgccaaaggaatgggcttcggcctcctttccgtggttccggcaagtgatgcgtaacagagaccttcacctaatgccaaaaatgcgggaccgcttcacctatctctatgtggagcatgccaaaatagacaaagaacaacaggcaatcgcctttcacgatgccatgggctccactcctgttccctgcgctggactggccctgctgatgctggggccaggcgtatccatcacccatgcggccatccttgttttagcagaatgcggctgtttggtggcttgggtgggggaacagggagtccgcttttactcatccgggacagggaccacccgtagttccgccaaccttatgcgtcaggctgccgcctggtcaaatcgagatacgcatctgcggatagttcgcagaatgtatgaattgaggttcaaggaaaaactggacccaaccctctctcttgaacagataaggggaaaagagggagcgagagtacgggatacctatttcagactttcaaaagaattcgatgtgcccatgagtgcgaggaattacgacaggagcaactggaataaaaccgaccccatcaacagagccctgtccgttgccaattcctgtctctatggcatctgccacgccgcgatagtggccgctggctattcacctgccctgggtttcgttcatactggcaaacaactgtcatttgtttatgacattgccgatctttataaaatggaaacctccgtgcccgcggctttcatagccacagccgcaggggtcgataacctggacagaaggacacgcattgcctgccgtgaccagttctatcaatttggtctgctaaagaagatagtggccgacattcacgcccttttcggtattctggaaacttcggacgatgagccagaccttgctgatgtcgatccagccgtgccaggcgggctttggaacccagatgataaagtgagccccggcggcttgtcatggggtctggatgatcctggaggccatgatgatggttctggtgcttgaaaaagttccctctggcctgagaggagaaattacacgctggctcctcgaaatcaaggctggagtatttgtcggtcaggtatcggccatgataagggaaaagctgtgggacaaggccaggtctggttgtgccggtggaacttgtatcatgatttacagcaagcattgcgaacaaggctttggaattgagttttggggtgccgcggaaaggatagtgacagaatgggaaggattgaaattgatgaccaagcatccgtgatccatacttgaagcctgttcaatggcctcaaagcgtctactttcgaagtgtgttccccacctgcgtgggggtgaaccggtcagccctgcgaaggttagccctgcgaaggtgtgttccccacctgcgtgggggtgaaccgttctcggcaccacttattctggtggcatcggtgtgttccccacctgcgtgggggtgaaccgag

SEQ ID NO: 1106 - DNA, 103386 bp, Artificial Sequence
  Synthetic Oligonucleotide
  misc_feature (1)..(95991): n is a, c, g, or t
nnnnnnnnnnnnnnnnnnnnnnnnnnnnnnnnnnnnnnnnnnnnnnnnnnnnnnnnnnnnnnnnnnnnnnnnnnnnnnnnnnnnnnnnnnnnnnnnnnnnnnnnnnnnnnnnnnnnnnnnnnnnnnnnnnnnnnnnnnnnnnnnnnnnnnnnnnnnnnnnnnnnnnnnnnnnnnnnnnnnnnnnnnnnnnnnnnnnnnnnnnnnnnnnnnnnnnnnnnnnnnnnnnnnnnnnnnnnnnnnnnnnnnnnnnnnnnnnnnnnnnnnnnnnnnnnnnnnnnnnnnnnnnnnnnnnnnnnnnnnnnnnnnnnnnnnnnnnnnnnnnnnnnnnnnnnnnnnnnnnnnnnnnnnnnnnnnnnnnnnnnnnnnnnnnnnnnnnnnnnnnnnnnnnnnnnnnnnnnnnnnnnnnnnnnnnnnnnnnnnnnnnnnnnnnnnnnnnnnnnnnnnnnnnnnnnnnnnnnnnnnnnnnnnnnnnnnnnnnnnnnnnnnnnnnnnnnnnnnnnnnnnnnnnnnnnnnnnnnnnnnnnnnnnnnnnnnnnnnnnnnnnnnnnnnnnnnnnnnnnnnnnnnnnnnnnnnnnnnnnnnnnnnnnnnnnnnnnnnnnnnnnnnnnnnnnnnnnnnnnnnnnnnnnnnnnnnnnnnnnnnnnnnnnnnnnnnnnnnnnnnnnnnnnnnnnnnnnnnnnnnnnnnnnnnnnnnnnnnnnnnnnnnnnnnnnnnnnnnnnnnnnnnnnnnnnnnnnnnnnnnnnnnnnnnnnnnnnnnnnnnnnnnnnnnnnnnnnnnnnnnnnnnnnnnnnnnnnnnnnnnnnnnnnnnnnnnnnnnnnnnnnnnnnnnnnnnnnnnnnnnnnnnnnnnnnnnnnnnnnnnnnnnnnnnnnnnnnnnnnnnnnnnnnnnnnnnnnnnnnnnnnnnnnnnnnnnnnnnnnnnnnnnnnnnnnnnnnnnnnnnnnnnnnnnnnnnnnnnnnnnnnnnnnnnnnnnnnnnnnnnnnnnnnnnnnnnnnnnnnnnnnnnnnnnnnnnnnnnnnnnnnnnnnnnnnnnnnnnnnnnnnnnnnnnnnnnnnnnnnnnnnnnnnnnnnnnnnnnnnnnnnnnnnnnnnnnnnnnnnnnnnnnnnnnnnnnnnnnnnnnnnnnnnnnnnnnnnnnnnnnnnnnnnnnnnnnnnnnnnnnnnnnnnnnnnnnnnnnnnnnnnnnnnnnnnnnnnnnnnnnnnnnnnnnnnnnnnnnnnnnnnnnnnnnnnnnnnnnnnnnnnnnnnnnnnnnnnnnnnnnnnnnnnnnnnnnnnnnnnnnnnnnnnnnnnnnnnnnnnnnnnnnnnnnnnnnnnnnnnnnnnnnnnnnnnnnnnnnnnnnnnnnnnnnnnnnnnnnnnnnnnnnnnnnnnnnnnnnnnnnnnnnnnnnnnnnnnnnnnnnnnnnnnnnnnnnnnnnnnnnnnnnnnnnnnnnnnnnnnnnnnnnnnnnnnnnnnnnnnnnnnnnnnnnnnnnnnnnnnnnnnnnnnnnnnnnnnnnnnnnnnnnnnnnnnnnnnnnnnnnnnnnnnnnnnnnnnnnnnnnnnnnnnnnnnnnnnnnnnnnnnnnnnnnnnnnnnnnnnnnnnnnnnnnnnnnnnnnnnnnnnnnnnnnnnnnnnnnnnnnnnnnnnnnnnnnnnnnnnnnnnnnnnnnnnnnnnnnnnnnnnnnnnnnnnnnnnnnnnnnnnnnnnnnnnnnnnnnnnnnnnnnnnnnnnnnnnnnnnnnnnnnnnnnnnnnnnnnnnnnnnnnnnnnnnnnnnnnnnnnnnnnnnnnnnnnnnnnnnnnnnnnnnnnnnnnnnnnnnnnnnnnnnnnnnnnnnnnnnnnnnnnnnnnnnnnnnnnnnnnnnnnnnnnnnnnnnnnnnnnnnnnnnnnnnnnnnnnnnnnnnnnnnnnnnnnnnnnnnnnnnnnnnnnnnnnnnnnnnnnnnnnnnnnnnnnnnnnnnnnnnnnnnnnnnnnnnnnnnnnnnnnnnnnnnnnnnnnnnnnnnnnnnnnnnnnnnnnnnnnnnnnnnnnnnnnnnnnnnnnnnnnnnnnnnnnnnnnnnnnnnnnnnnnnnnnnnnnnnnnnnnnnnnnnnnnnnnnnnnnnnnnnnnnnnnnnnnnnnnnnnnnnnnnnnnnnnnnnnnnnnnnnnnnnnnnnnnnnnnnnnnnnnnnnnnnnnnnnnnnnnnnnnnnnnnnnnnnnnnnnnnnnnnnnnnnnnnnnnnnnnnnnnnnnnnnnnnnnnnnnnnnnnnnnnnnnnnnnnnnnnnnnnnnnnnnnnnnnnnnnnnnnnnnnnnnnnnnnnnnnnnnnnnnnnnnnnnnnnnnnnnnnnnnnnnnnnnnnnnnnnnnnnnnnnnnnnnnnnnnnnnnnnnnnnnnnnnnnnnnnnnnnnnnnnnnnnnnnnnnnnnnnnnnnnnnnnnnnnnnnnnnnnnnnnnnnnnnnnnnnnnnnnnnnnnnnnnnnnnnnnnnnnnnnnnnnnnnnnnnnnnnnnnnnnnnnnnnnnnnnnnnnnnnnnnnnnnnnnnnnnnnnnnnnnnnnnnnnnnnnnnnnnnnnnnnnnnnnnnnnnnnnnnnnnnnnnnnnnnnnnnnnnnnnnnnnnnnnnnnnnnnnnnnnnnnnnnnnnnnnnnnnnnnnnnnnnnnnnnnnnnnnnnnnnnnnnnnnnnnnnnnnnnnnnnnnnnnnnnnnnnnnnnnnnnnnnnnnnnnnnnnnnnnnnnnnnnnnnnnnnnnnnnnnnnnnnnnnnnnnnnnnnnnnnnnnnnnnnnnnnnnnnnnnnnnnnnnnnnnnnnnnnnnnnnnnnnnnnnnnnnnnnnnnnnnnnnnnnnnnnnnnnnnnnnnnnnnnnnnnnnnnnnnnnnnnnnnnnnnnnnnnnnnnnnnnnnnnnnnnnnnnnnnnnnnnnnnnnnnnnnnnnnnnnnnnnnnnnnnnnnnnnnnnnnnnnnnnnnnnnnnnnnnnnnnnnnnnnnnnnnnnnnnnnnnnnnnnnnnnnnnnnnnnnnnnnnnnnnnnnnnnnnnnnnnnnnnnnnnnnnnnnnnnnnnnnnnnnnnnnnnnnnnnnnnnnnnnnnnnnnnnnnnnnnnnnnnnnnnnnnnnnnnnnnnnnnnnnnnnnnnnnnnnnnnnnnnnnnnnnnnnnnnnnnnnnnnnnnnnnnnnnnnnnnnnnnnnnnnnnnnnnnnnnnnnnnnnnnnnnnnnnnnnnnnnnnnnnnnnnnnnnnnnnnnnnnnnnnnnnnnnnnnnnnnnnnnnnnnnnnnnnnnnnnnnnnnnnnnnnnnnnnnnnnnnnnnnnnnnnnnnnnnnnnnnnnnnnnnnnnnnnnnnnnnnnnnnnnnnnnnnnnnnnnnnnnnnnnnnnnnnnnnnnnnnnnnnnnnnnnnnnnnnnnnnnnnnnnnnnnnnnnnnnnnnnnnnnnnnnnnnnnnnnnnnnnnnnnnnnnnnnnnnnnnnnnnnnnnnnnnnnnnnnnnnnnnnnnnnnnnnnnnnnnnnnnnnnnnnnnnnnnnnnnnnnnnnnnnnnnnnnnnnnnnnnnnnnnnnnnnnnnnnnnnnnnnnnnnnnnnnnnnnnnnnnnnnnnnnnnnnnnnnnnnnnnnnnnnnnnnnnnnnnnnnnnnnnnnnnnnnnnnnnnnnnnnnnnnnnnnnnnnnnnnnnnnnnnnnnnnnnnnnnnnnnnnnnnnnnnnnnnnnnnnnnnnnnnnnnnnnnnnnnnnnnnnnnnnnnnnnnnnnnnnnnnnnnnnnnnnnnnnnnnnnnnnnnnnnnnnnnnnnnnnnnnnnnnnnnnnnnnnnnnnnnnnnnnnnnnnnnnnnnnnnnnnnnnnnnnnnnnnnnnnnnnnnnnnnnnnnnnnnnnnnnnnnnnnnnnnnnnnnnnnnnnnnnnnnnnnnnnnnnnnnnnnnnnnnnnnnnnnnnnnnnnnnnnnnnnnnnnnnnnnnnnnnnnnnnnnnnnnnnnnnnnnnnnnnnnnnnnnnnnnnnnnnnnnnnnnnnnnnnnnnnnnnnnnnnnnnnnnnnnnnnnnnnnnnnnnnnnnnnnnnnnnnnnnnnnnnnnnnnnnnnnnnnnnnnnnnnnnnnnnnnnnnnnnnnnnnnnnnnnnnnnnnnnnnnnnnnnnnnnnnnnnnnnnnnnnnnnnnnnnnnnnnnnnnnnnnnnnnnnnnnnnnnnnnnnnnnnnnnnnnnnnnnnnnnnnnnnnnnnnnnnnnnnnnnnnnnnnnnnnnnnnnnnnnnnnnnnnnnnnnnnnnnnnnnnnnnnnnnnnnnnnnnnnnnnnnnnnnnnnnnnnnnnnnnnnnnnnnnnnnnnnnnnnnnnnnnnnnnnnnnnnnnnnnnnnnnnnnnnnnnnnnnnnnnnnnnnnnnnnnnnnnnnnnnnnnnnnnnnnnnnnnnnnnnnnnnnnnnnnnnnnnnnnnnnnnnnnnnnnnnnnnnnnnnnnnnnnnnnnnnnnnnnnnnnnnnnnnnnnnnnnnnnnnnnnnnnnnnnnnnnnnnnnnnnnnnnnnnnnnnnnnnnnnnnnnnnnnnnnnnnnnnnnnnnnnnnnnnnnnnnnnnnnnnnnnnnnnnnnnnnnnnnnnnnnnnnnnnnnnnnnnnnnnnnnnnnnnnnnnnnnnnnnnnnnnnnnnnnnnnnnnnnnnnnnnnnnnnnnnnnnnnnnnnnnnnnnnnnnnnnnnnnnnnnnnnnnnnnnnnnnnnnnnnnnnnnnnnnnnnnnnnnnnnnnnnnnnnnnnnnnnnnnnnnnnnnnnnnnnnnnnnnnnnnnnnnnnnnnnnnnnnnnnnnnnnnnnnnnnnnnnnnnnnnnnnnnnnnnnnnnnnnnnnnnnnnnnnnnnnnnnnnnnnnnnnnnnnnnnnnnnnnnnnnnnnnnnnnnnnnnnnnnnnnnnnnnnnnnnnnnnnnnnnnnnnnnnnnnnnnnnnnnnnnnnnnnnnnnnnnnnnnnnnnnnnnnnnnnnnnnnnnnnnnnnnnnnnnnnnnnnnnnnnnnnnnnnnnnnnnnnnnnnnnnnnnnnnnnnnnnnnnnnnnnnnnnnnnnnnnnnnnnnnnnnnnnnnnnnnnnnnnnnnnnnnnnnnnnnnnnnnnnnnnnnnnnnnnnnnnnnnnnnnnnnnnnnnnnnnnnnnnnnnnnnnnnnnnnnnnnnnnnnnnnnnnnnnnnnnnnnnnnnnnnnnnnnnnnnnnnnnnnnnnnnnnnnnnnnnnnnnnnnnnnnnnnnnnnnnnnnnnnnnnnnnnnnnnnnnnnnnnnnnnnnnnnnnnnnnnnnnnnnnnnnnnnnnnnnnnnnnnnnnnnnnnnnnnnnnnnnnnnnnnnnnnnnnnnnnnnnnnnnnnnnnnnnnnnnnnnnnnnnnnnnnnnnnnnnnnnnnnnnnnnnnnnnnnnnnnnnnnnnnnnnnnnnnnnnnnnnnnnnnnnnnnnnnnnnnnnnnnnnnnnnnnnnnnnnnnnnnnnnnnnnnnnnnnnnnnnnnnnnnnnnnnnnnnnnnnnnnnnnnnnnnnnnnnnnnnnnnnnnnnnnnnnnnnnnnnnnnnnnnnnnnnnnnnnnnnnnnnnnnnnnnnnnnnnnnnnnnnnnnnnnnnnnnnnnnnnnnnnnnnnnnnnnnnnnnnnnnnnnnnnnnnnnnnnnnnnnnnnnnnnnnnnnnnnnnnnnnnnnnnnnnnnnnnnnnnnnnnnnnnnnnnnnnnnnnnnnnnnnnnnnnnnnnnnnnnnnnnnnnnnnnnnnnnnnnnnnnnnnnnnnnnnnnnnnnnnnnnnnnnnnnnnnnnnnnnnnnnnnnnnnnnnnnnnnnnnnnnnnnnnnnnnnnnnnnnnnnnnnnnnnnnnnnnnnnnnnnnnnnnnnnnnnnnnnnnnnnnnnnnnnnnnnnnnnnnnnnnnnnnnnnnnnnnnnnnnnnnnnnnnnnnnnnnnnnnnnnnnnnnnnnnnnnnnnnnnnnnnnnnnnnnnnnnnnnnnnnnnnnnnnnnnnnnnnnnnnnnnnnnnnnnnnnnnnnnnnnnnnnnnnnnnnnnnnnnnnnnnnnnnnnnnnnnnnnnnnnnnnnnnnnnnnnnnnnnnnnnnnnnnnnnnnnnnnnnnnnnnnnnnnnnnnnnnnnnnnnnnnnnnnnnnnnnnnnnnnnnnnnnnnnnnnnnnnnnnnnnnnnnnnnnnnnnnnnnnnnnnnnnnnnnnnnnnnnnnnnnnnnnnnnnnnnnnnnnnnnnnnnnnnnnnnnnnnnnnnnnnnnnnnnnnnnnnnnnnnnnnnnnnnnnnnnnnnnnnnnnnnnnnnnnnnnnnnnnnnnnnnnnnnnnnnnnnnnnnnnnnnnnnnnnnnnnnnnnnnnnnnnnnnnnnnnnnnnnnnnnnnnnnnnnnnnnnnnnnnnnnnnnnnnnnnnnnnnnnnnnnnnnnnnnnnnnnnnnnnnnnnnnnnnnnnnnnnnnnnnnnnnnnnnnnnnnnnnnnnnnnnnnnnnnnnnnnnnnnnnnnnnnnnnnnnnnnnnnnnnnnnnnnnnnnnnnnnnnnnnnnnnnnnnnnnnnnnnnnnnnnnnnnnnnnnnnnnnnnnnnnnnnnnnnnnnnnnnnnnnnnnnnnnnnnnnnnnnnnnnnnnnnnnnnnnnnnnnnnnnnnnnnnnnnnnnnnnnnnnnnnnnnnnnnnnnnnnnnnnnnnnnnnnnnnnnnnnnnnnnnnnnnnnnnnnnnnnnnnnnnnnnnnnnnnnnnnnnnnnnnnnnnnnnnnnnnnnnnnnnnnnnnnnnnnnnnnnnnnnnnnnnnnnnnnnnnnnnnnnnnnnnnnnnnnnnnnnnnnnnnnnnnnnnnnnnnnnnnnnnnnnnnnnnnnnnnnnnnnnnnnnnnnnnnnnnnnnnnnnnnnnnnnnnnnnnnnnnnnnnnnnnnnnnnnnnnnnnnnnnnnnnnnnnnnnnnnnnnnnnnnnnnnnnnnnnnnnnnnnnnnnnnnnnnnnnnnnnnnnnnnnnnnnnnnnnnnnnnnnnnnnnnnnnnnnnnnnnnnnnnnnnnnnnnnnnnnnnnnnnnnnnnnnnnnnnnnnnnnnnnnnnnnnnnnnnnnnnnnnnnnnnnnnnnnnnnnnnnnnnnnnnnnnnnnnnnnnnnnnnnnnnnnnnnnnnnnnnnnnnnnnnnnnnnnnnnnnnnnnnnnnnnnnnnnnnnnnnnnnnnnnnnnnnnnnnnnnnnnnnnnnnnnnnnnnnnnnnnnnnnnnnnnnnnnnnnnnnnnnnnnnnnnnnnnnnnnnnnnnnnnnnnnnnnnnnnnnnnnnnnnnnnnnnnnnnnnnnnnnnnnnnnnnnnnnnnnnnnnnnnnnnnnnnnnnnnnnnnnnnnnnnnnnnnnnnnnnnnnnnnnnnnnnnnnnnnnnnnnnnnnnnnnnnnnnnnnnnnnnnnnnnnnnnnnnnnnnnnnnnnnnnnnnnnnnnnnnnnnnnnnnnnnnnnnnnnnnnnnnnnnnnnnnnnnnnnnnnnnnnnnnnnnnnnnnnnnnnnnnnnnnnnnnnnnnnnnnnnnnnnnnnnnnnnnnnnnnnnnnnnnnnnnnnnnnnnnnnnnnnnnnnnnnnnnnnnnnnnnnnnnnnnnnnnnnnnnnnnnnnnnnnnnnnnnnnnnnnnnnnnnnnnnnnnnnnnnnnnnnnnnnnnnnnnnnnnnnnnnnnnnnnnnnnnnnnnnnnnnnnnnnnnnnnnnnnnnnnnnnnnnnnnnnnnnnnnnnnnnnnnnnnnnnnnnnnnnnnnnnnnnnnnnnnnnnnnnnnnnnnnnnnnnnnnnnnnnnnnnnnnnnnnnnnnnnnnnnnnnnnnnnnnnnnnnnnnnnnnnnnnnnnnnnnnnnnnnnnnnnnnnnnnnnnnnnnnnnnnnnnnnnnnnnnnnnnnnnnnnnnnnnnnnnnnnnnnnnnnnnnnnnnnnnnnnnnnnnnnnnnnnnnnnnnnnnnnnnnnnnnnnnnnnnnnnnnnnnnnnnnnnnnnnnnnnnnnnnnnnnnnnnnnnnnnnnnnnnnnnnnnnnnnnnnnnnnnnnnnnnnnnnnnnnnnnnnnnnnnnnnnnnnnnnnnnnnnnnnnnnnnnnnnnnnnnnnnnnnnnnnnnnnnnnnnnnnnnnnnnnnnnnnnnnnnnnnnnnnnnnnnnnnnnnnnnnnnnnnnnnnnnnnnnnnnnnnnnnnnnnnnnnnnnnnnnnnnnnnnnnnnnnnnnnnnnnnnnnnnnnnnnnnnnnnnnnnnnnnnnnnnnnnnnnnnnnnnnnnnnnnnnnnnnnnnnnnnnnnnnnnnnnnnnnnnnnnnnnnnnnnnnnnnnnnnnnnnnnnnnnnnnnnnnnnnnnnnnnnnnnnnnnnnnnnnnnnnnnnnnnnnnnnnnnnnnnnnnnnnnnnnnnnnnnnnnnnnnnnnnnnnnnnnnnnnnnnnnnnnnnnnnnnnnnnnnnnnnnnnnnnnnnnnnnnnnnnnnnnnnnnnnnnnnnnnnnnnnnnnnnnnnnnnnnnnnnnnnnnnnnnnnnnnnnnnnnnnnnnnnnnnnnnnnnnnnnnnnnnnnnnnnnnnnnnnnnnnnnnnnnnnnnnnnnnnnnnnnnnnnnnnnnnnnnnnnnnnnnnnnnnnnnnnnnnnnnnnnnnnnnnnnnnnnnnnnnnnnnnnnnnnnnnnnnnnnnnnnnnnnnnnnnnnnnnnnnnnnnnnnnnnnnnnnnnnnnnnnnnnnnnnnnnnnnnnnnnnnnnnnnnnnnnnnnnnnnnnnnnnnnnnnnnnnnnnnnnnnnnnnnnnnnnnnnnnnnnnnnnnnnnnnnnnnnnnnnnnnnnnnnnnnnnnnnnnnnnnnnnnnnnnnnnnnnnnnnnnnnnnnnnnnnnnnnnnnnnnnnnnnnnnnnnnnnnnnnnnnnnnnnnnnnnnnnnnnnnnnnnnnnnnnnnnnnnnnnnnnnnnnnnnnnnnnnnnnnnnnnnnnnnnnnnnnnnnnnnnnnnnnnnnnnnnnnnnnnnnnnnnnnnnnnnnnnnnnnnnnnnnnnnnnnnnnnnnnnnnnnnnnnnnnnnnnnnnnnnnnnnnnnnnnnnnnnnnnnnnnnnnnnnnnnnnnnnnnnnnnnnnnnnnnnnnnnnnnnnnnnnnnnnnnnnnnnnnnnnnnnnnnnnnnnnnnnnnnnnnnnnnnnnnnnnnnnnnnnnnnnnnnnnnnnnnnnnnnnnnnnnnnnnnnnnnnnnnnnnnnnnnnnnnnnnnnnnnnnnnnnnnnnnnnnnnnnnnnnnnnnnnnnnnnnnnnnnnnnnnnnnnnnnnnnnnnnnnnnnnnnnnnnnnnnnnnnnnnnnnnnnnnnnnnnnnnnnnnnnnnnnnnnnnnnnnnnnnnnnnnnnnnnnnnnnnnnnnnnnnnnnnnnnnnnnnnnnnnnnnnnnnnnnnnnnnnnnnnnnnnnnnnnnnnnnnnnnnnnnnnnnnnnnnnnnnnnnnnnnnnnnnnnnnnnnnnnnnnnnnnnnnnnnnnnnnnnnnnnnnnnnnnnnnnnnnnnnnnnnnnnnnnnnnnnnnnnnnnnnnnnnnnnnnnnnnnnnnnnnnnnnnnnnnnnnnnnnnnnnnnnnnnnnnnnnnnnnnnnnnnnnnnnnnnnnnnnnnnnnnnnnnnnnnnnnnnnnnnnnnnnnnnnnnnnnnnnnnnnnnnnnnnnnnnnnnnnnnnnnnnnnnnnnnnnnnnnnnnnnnnnnnnnnnnnnnnnnnnnnnnnnnnnnnnnnnnnnnnnnnnnnnnnnnnnnnnnnnnnnnnnnnnnnnnnnnnnnnnnnnnnnnnnnnnnnnnnnnnnnnnnnnnnnnnnnnnnnnnnnnnnnnnnnnnnnnnnnnnnnnnnnnnnnnnnnnnnnnnnnnnnnnnnnnnnnnnnnnnnnnnnnnnnnnnnnnnnnnnnnnnnnnnnnnnnnnnnnnnnnnnnnnnnnnnnnnnnnnnnnnnnnnnnnnnnnnnnnnnnnnnnnnnnnnnnnnnnnnnnnnnnnnnnnnnnnnnnnnnnnnnnnnnnnnnnnnnnnnnnnnnnnnnnnnnnnnnnnnnnnnnnnnnnnnnnnnnnnnnnnnnnnnnnnnnnnnnnnnnnnnnnnnnnnnnnnnnnnnnnnnnnnnnnnnnnnnnnnnnnnnnnnnnnnnnnnnnnnnnnnnnnnnnnnnnnnnnnnnnnnnnnnnnnnnnnnnnnnnnnnnnnnnnnnnnnnnnnnnnnnnnnnnnnnnnnnnnnnnnnnnnnnnnnnnnnnnnnnnnnnnnnnnnnnnnnnnnnnnnnnnnnnnnnnnnnnnnnnnnnnnnnnnnnnnnnnnnnnnnnnnnnnnnnnnnnnnnnnnnnnnnnnnnnnnnnnnnnnnnnnnnnnnnnnnnnnnnnnnnnnnnnnnnnnnnnnnnnnnnnnnnnnnnnnnnnnnnnnnnnnnnnnnnnnnnnnnnnnnnnnnnnnnnnnnnnnnnnnnnnnnnnnnnnnnnnnnnnnnnnnnnnnnnnnnnnnnnnnnnnnnnnnnnnnnnnnnnnnnnnnnnnnnnnnnnnnnnnnnnnnnnnnnnnnnnnnnnnnnnnnnnnnnnnnnnnnnnnnnnnnnnnnnnnnnnnnnnnnnnnnnnnnnnnnnnnnnnnnnnnnnnnnnnnnnnnnnnnnnnnnnnnnnnnnnnnnnnnnnnnnnnnnnnnnnnnnnnnnnnnnnnnnnnnnnnnnnnnnnnnnnnnnnnnnnnnnnnnnnnnnnnnnnnnnnnnnnnnnnnnnnnnnnnnnnnnnnnnnnnnnnnnnnnnnnnnnnnnnnnnnnnnnnnnnnnnnnnnnnnnnnnnnnnnnnnnnnnnnnnnnnnnnnnnnnnnnnnnnnnnnnnnnnnnnnnnnnnnnnnnnnnnnnnnnnnnnnnnnnnnnnnnnnnnnnnnnnnnnnnnnnnnnnnnnnnnnnnnnnnnnnnnnnnnnnnnnnnnnnnnnnnnnnnnnnnnnnnnnnnnnnnnnnnnnnnnnnnnnnnnnnnnnnnnnnnnnnnnnnnnnnnnnnnnnnnnnnnnnnnnnnnnnnnnnnnnnnnnnnnnnnnnnnnnnnnnnnnnnnnnnnnnnnnnnnnnnnnnnnnnnnnnnnnnnnnnnnnnnnnnnnnnnnnnnnnnnnnnnnnnnnnnnnnnnnnnnnnnnnnnnnnnnnnnnnnnnnnnnnnnnnnnnnnnnnnnnnnnnnnnnnnnnnnnnnnnnnnnnnnnnnnnnnnnnnnnnnnnnnnnnnnnnnnnnnnnnnnnnnnnnnnnnnnnnnnnnnnnnnnnnnnnnnnnnnnnnnnnnnnnnnnnnnnnnnnnnnnnnnnnnnnnnnnnnnnnnnnnnnnnnnnnnnnnnnnnnnnnnnnnnnnnnnnnnnnnnnnnnnnnnnnnnnnnnnnnnnnnnnnnnnnnnnnnnnnnnnnnnnnnnnnnnnnnnnnnnnnnnnnnnnnnnnnnnnnnnnnnnnnnnnnnnnnnnnnnnnnnnnnnnnnnnnnnnnnnnnnnnnnnnnnnnnnnnnnnnnnnnnnnnnnnnnnnnnnnnnnnnnnnnnnnnnnnnnnnnnnnnnnnnnnnnnnnnnnnnnnnnnnnnnnnnnnnnnnnnnnnnnnnnnnnnnnnnnnnnnnnnnnnnnnnnnnnnnnnnnnnnnnnnnnnnnnnnnnnnnnnnnnnnnnnnnnnnnnnnnnnnnnnnnnnnnnnnnnnnnnnnnnnnnnnnnnnnnnnnnnnnnnnnnnnnnnnnnnnnnnnnnnnnnnnnnnnnnnnnnnnnnnnnnnnnnnnnnnnnnnnnnnnnnnnnnnnnnnnnnnnnnnnnnnnnnnnnnnnnnnnnnnnnnnnnnnnnnnnnnnnnnnnnnnnnnnnnnnnnnnnnnnnnnnnnnnnnnnnnnnnnnnnnnnnnnnnnnnnnnnnnnnnnnnnnnnnnnnnnnnnnnnnnnnnnnnnnnnnnnnnnnnnnnnnnnnnnnnnnnnnnnnnnnnnnnnnnnnnnnnnnnnnnnnnnnnnnnnnnnnnnnnnnnnnnnnnnnnnnnnnnnnnnnnnnnnnnnnnnnnnnnnnnnnnnnnnnnnnnnnnnnnnnnnnnnnnnnnnnnnnnnnnnnnnnnnnnnnnnnnnnnnnnnnnnnnnnnnnnnnnnnnnnnnnnnnnnnnnnnnnnnnnnnnnnnnnnnnnnnnnnnnnnnnnnnnnnnnnnnnnnnnnnnnnnnnnnnnnnnnnnnnnnnnnnnnnnnnnnnnnnnnnnnnnnnnnnnnnnnnnnnnnnnnnnnnnnnnnnnnnnnnnnnnnnnnnnnnnnnnnnnnnnnnnnnnnnnnnnnnnnnnnnnnnnnnnnnnnnnnnnnnnnnnnnnnnnnnnnnnnnnnnnnnnnnnnnnnnnnnnnnnnnnnnnnnnnnnnnnnnnnnnnnnnnnnnnnnnnnnnnnnnnnnnnnnnnnnnnnnnnnnnnnnnnnnnnnnnnnnnnnnnnnnnnnnnnnnnnnnnnnnnnnnnnnnnnnnnnnnnnnnnnnnnnnnnnnnnnnnnnnnnnnnnnnnnnnnnnnnnnnnnnnnnnnnnnnnnnnnnnnnnnnnnnnnnnnnnnnnnnnnnnnnnnnnnnnnnnnnnnnnnnnnnnnnnnnnnnnnnnnnnnnnnnnnnnnnnnnnnnnnnnnnnnnnnnnnnnnnnnnnnnnnnnnnnnnnnnnnnnnnnnnnnnnnnnnnnnnnnnnnnnnnnnnnnnnnnnnnnnnnnnnnnnnnnnnnnnnnnnnnnnnnnnnnnnnnnnnnnnnnnnnnnnnnnnnnnnnnnnnnnnnnnnnnnnnnnnnnnnnnnnnnnnnnnnnnnnnnnnnnnnnnnnnnnnnnnnnnnnnnnnnnnnnnnnnnnnnnnnnnnnnnnnnnnnnnnnnnnnnnnnnnnnnnnnnnnnnnnnnnnnnnnnnnnnnnnnnnnnnnnnnnnnnnnnnnnnnnnnnnnnnnnnnnnnnnnnnnnnnnnnnnnnnnnnnnnnnnnnnnnnnnnnnnnnnnnnnnnnnnnnnnnnnnnnnnnnnnnnnnnnnnnnnnnnnnnnnnnnnnnnnnnnnnnnnnnnnnnnnnnnnnnnnnnnnnnnnnnnnnnnnnnnnnnnnnnnnnnnnnnnnnnnnnnnnnnnnnnnnnnnnnnnnnnnnnnnnnnnnnnnnnnnnnnnnnnnnnnnnnnnnnnnnnnnnnnnnnnnnnnnnnnnnnnnnnnnnnnnnnnnnnnnnnnnnnnnnnnnnnnnnnnnnnnnnnnnnnnnnnnnnnnnnnnnnnnnnnnnnnnnnnnnnnnnnnnnnnnnnnnnnnnnnnnnnnnnnnnnnnnnnnnnnnnnnnnnnnnnnnnnnnnnnnnnnnnnnnnnnnnnnnnnnnnnnnnnnnnnnnnnnnnnnnnnnnnnnnnnnnnnnnnnnnnnnnnnnnnnnnnnnnnnnnnnnnnnnnnnnnnnnnnnnnnnnnnnnnnnnnnnnnnnnnnnnnnnnnnnnnnnnnnnnnnnnnnnnnnnnnnnnnnnnnnnnnnnnnnnnnnnnnnnnnnnnnnnnnnnnnnnnnnnnnnnnnnnnnnnnnnnnnnnnnnnnnnnnnnnnnnnnnnnnnnnnnnnnnnnnnnnnnnnnnnnnnnnnnnnnnnnnnnnnnnnnnnnnnnnnnnnnnnnnnnnnnnnnnnnnnnnnnnnnnnnnnnnnnnnnnnnnnnnnnnnnnnnnnnnnnnnnnnnnnnnnnnnnnnnnnnnnnnnnnnnnnnnnnnnnnnnnnnnnnnnnnnnnnnnnnnnnnnnnnnnnnnnnnnnnnnnnnnnnnnnnnnnnnnnnnnnnnnnnnnnnnnnnnnnnnnnnnnnnnnnnnnnnnnnnnnnnnnnnnnnnnnnnnnnnnnnnnnnnnnnnnnnnnnnnnnnnnnnnnnnnnnnnnnnnnnnnnnnnnnnnnnnnnnnnnnnnnnnnnnnnnnnnnnnnnnnnnnnnnnnnnnnnnnnnnnnnnnnnnnnnnnnnnnnnnnnnnnnnnnnnnnnnnnnnnnnnnnnnnnnnnnnnnnnnnnnnnnnnnnnnnnnnnnnnnnnnnnnnnnnnnnnnnnnnnnnnnnnnnnnnnnnnnnnnnnnnnnnnnnnnnnnnnnnnnnnnnnnnnnnnnnnnnnnnnnnnnnnnnnnnnnnnnnnnnnnnnnnnnnnnnnnnnnnnnnnnnnnnnnnnnnnnnnnnnnnnnnnnnnnnnnnnnnnnnnnnnnnnnnnnnnnnnnnnnnnnnnnnnnnnnnnnnnnnnnnnnnnnnnnnnnnnnnnnnnnnnnnnnnnnnnnnnnnnnnnnnnnnnnnnnnnnnnnnnnnnnnnnnnnnnnnnnnnnnnnnnnnnnnnnnnnnnnnnnnnnnnnnnnnnnnnnnnnnnnnnnnnnnnnnnnnnnnnnnnnnnnnnnnnnnnnnnnnnnnnnnnnnnnnnnnnnnnnnnnnnnnnnnnnnnnnnnnnnnnnnnnnnnnnnnnnnnnnnnnnnnnnnnnnnnnnnnnnnnnnnnnnnnnnnnnnnnnnnnnnnnnnnnnnnnnnnnnnnnnnnnnnnnnnnnnnnnnnnnnnnnnnnnnnnnnnnnnnnnnnnnnnnnnnnnnnnnnnnnnnnnnnnnnnnnnnnnnnnnnnnnnnnnnnnnnnnnnnnnnnnnnnnnnnnnnnnnnnnnnnnnnnnnnnnnnnnnnnnnnnnnnnnnnnnnnnnnnnnnnnnnnnnnnnnnnnnnnnnnnnnnnnnnnnnnnnnnnnnnnnnnnnnnnnnnnnnnnnnnnnnnnnnnnnnnnnnnnnnnnnnnnnnnnnnnnnnnnnnnnnnnnnnnnnnnnnnnnnnnnnnnnnnnnnnnnnnnnnnnnnnnnnnnnnnnnnnnnnnnnnnnnnnnnnnnnnnnnnnnnnnnnnnnnnnnnnnnnnnnnnnnnnnnnnnnnnnnnnnnnnnnnnnnnnnnnnnnnnnnnnnnnnnnnnnnnnnnnnnnnnnnnnnnnnnnnnnnnnnnnnnnnnnnnnnnnnnnnnnnnnnnnnnnnnnnnnnnnnnnnnnnnnnnnnnnnnnnnnnnnnnnnnnnnnnnnnnnnnnnnnnnnnnnnnnnnnnnnnnnnnnnnnnnnnnnnnnnnnnnnnnnnnnnnnnnnnnnnnnnnnnnnnnnnnnnnnnnnnnnnnnnnnnnnnnnnnnnnnnnnnnnnnnnnnnnnnnnnnnnnnnnnnnnnnnnnnnnnnnnnnnnnnnnnnnnnnnnnnnnnnnnnnnnnnnnnnnnnnnnnnnnnnnnnnnnnnnnnnnnnnnnnnnnnnnnnnnnnnnnnnnnnnnnnnnnnnnnnnnnnnnnnnnnnnnnnnnnnnnnnnnnnnnnnnnnnnnnnnnnnnnnnnnnnnnnnnnnnnnnnnnnnnnnnnnnnnnnnnnnnnnnnnnnnnnnnnnnnnnnnnnnnnnnnnnnnnnnnnnnnnnnnnnnnnnnnnnnnnnnnnnnnnnnnnnnnnnnnnnnnnnnnnnnnnnnnnnnnnnnnnnnnnnnnnnnnnnnnnnnnnnnnnnnnnnnnnnnnnnnnnnnnnnnnnnnnnnnnnnnnnnnnnnnnnnnnnnnnnnnnnnnnnnnnnnnnnnnnnnnnnnnnnnnnnnnnnnnnnnnnnnnnnnnnnnnnnnnnnnnnnnnnnnnnnnnnnnnnnnnnnnnnnnnnnnnnnnnnnnnnnnnnnnnnnnnnnnnnnnnnnnnnnnnnnnnnnnnnnnnnnnnnnnnnnnnnnnnnnnnnnnnnnnnnnnnnnnnnnnnnnnnnnnnnnnnnnnnnnnnnnnnnnnnnnnnnnnnnnnnnnnnnnnnnnnnnnnnnnnnnnnnnnnnnnnnnnnnnnnnnnnnnnnnnnnnnnnnnnnnnnnnnnnnnnnnnnnnnnnnnnnnnnnnnnnnnnnnnnnnnnnnnnnnnnnnnnnnnnnnnnnnnnnnnnnnnnnnnnnnnnnnnnnnnnnnnnnnnnnnnnnnnnnnnnnnnnnnnnnnnnnnnnnnnnnnnnnnnnnnnnnnnnnnnnnnnnnnnnnnnnnnnnnnnnnnnnnnnnnnnnnnnnnnnnnnnnnnnnnnnnnnnnnnnnnnnnnnnnnnnnnnnnnnnnnnnnnnnnnnnnnnnnnnnnnnnnnnnnnnnnnnnnnnnnnnnnnnnnnnnnnnnnnnnnnnnnnnnnnnnnnnnnnnnnnnnnnnnnnnnnnnnnnnnnnnnnnnnnnnnnnnnnnnnnnnnnnnnnnnnnnnnnnnnnnnnnnnnnnnnnnnnnnnnnnnnnnnnnnnnnnnnnnnnnnnnnnnnnnnnnnnnnnnnnnnnnnnnnnnnnnnnnnnnnnnnnnnnnnnnnnnnnnnnnnnnnnnnnnnnnnnnnnnnnnnnnnnnnnnnnnnnnnnnnnnnnnnnnnnnnnnnnnnnnnnnnnnnnnnnnnnnnnnnnnnnnnnnnnnnnnnnnnnnnnnnnnnnnnnnnnnnnnnnnnnnnnnnnnnnnnnnnnnnnnnnnnnnnnnnnnnnnnnnnnnnnnnnnnnnnnnnnnnnnnnnnnnnnnnnnnnnnnnnnnnnnnnnnnnnnnnnnnnnnnnnnnnnnnnnnnnnnnnnnnnnnnnnnnnnnnnnnnnnnnnnnnnnnnnnnnnnnnnnnnnnnnnnnnnnnnnnnnnnnnnnnnnnnnnnnnnnnnnnnnnnnnnnnnnnnnnnnnnnnnnnnnnnnnnnnnnnnnnnnnnnnnnnnnnnnnnnnnnnnnnnnnnnnnnnnnnnnnnnnnnnnnnnnnnnnnnnnnnnnnnnnnnnnnnnnnnnnnnnnnnnnnnnnnnnnnnnnnnnnnnnnnnnnnnnnnnnnnnnnnnnnnnnnnnnnnnnnnnnnnnnnnnnnnnnnnnnnnnnnnnnnnnnnnnnnnnnnnnnnnnnnnnnnnnnnnnnnnnnnnnnnnnnnnnnnnnnnnnnnnnnnnnnnnnnnnnnnnnnnnnnnnnnnnnnnnnnnnnnnnnnnnnnnnnnnnnnnnnnnnnnnnnnnnnnnnnnnnnnnnnnnnnnnnnnnnnnnnnnnnnnnnnnnnnnnnnnnnnnnnnnnnnnnnnnnnnnnnnnnnnnnnnnnnnnnnnnnnnnnnnnnnnnnnnnnnnnnnnnnnnnnnnnnnnnnnnnnnnnnnnnnnnnnnnnnnnnnnnnnnnnnnnnnnnnnnnnnnnnnnnnnnnnnnnnnnnnnnnnnnnnnnnnnnnnnnnnnnnnnnnnnnnnnnnnnnnnnnnnnnnnnnnnnnnnnnnnnnnnnnnnnnnnnnnnnnnnnnnnnnnnnnnnnnnnnnnnnnnnnnnnnnnnnnnnnnnnnnnnnnnnnnnnnnnnnnnnnnnnnnnnnnnnnnnnnnnnnnnnnnnnnnnnnnnnnnnnnnnnnnnnnnnnnnnnnnnnnnnnnnnnnnnnnnnnnnnnnnnnnnnnnnnnnnnnnnnnnnnnnnnnnnnnnnnnnnnnnnnnnnnnnnnnnnnnnnnnnnnnnnnnnnnnnnnnnnnnnnnnnnnnnnnnnnnnnnnnnnnnnnnnnnnnnnnnnnnnnnnnnnnnnnnnnnnnnnnnnnnnnnnnnnnnnnnnnnnnnnnnnnnnnnnnnnnnnnnnnnnnnnnnnnnnnnnnnnnnnnnnnnnnnnnnnnnnnnnnnnnnnnnnnnnnnnnnnnnnnnnnnnnnnnnnnnnnnnnnnnnnnnnnnnnnnnnnnnnnnnnnnnnnnnnnnnnnnnnnnnnnnnnnnnnnnnnnnnnnnnnnnnnnnnnnnnnnnnnnnnnnnnnnnnnnnnnnnnnnnnnnnnnnnnnnnnnnnnnnnnnnnnnnnnnnnnnnnnnnnnnnnnnnnnnnnnnnnnnnnnnnnnnnnnnnnnnnnnnnnnnnnnnnnnnnnnnnnnnnnnnnnnnnnnnnnnnnnnnnnnnnnnnnnnnnnnnnnnnnnnnnnnnnnnnnnnnnnnnnnnnnnnnnnnnnnnnnnnnnnnnnnnnnnnnnnnnnnnnnnnnnnnnnnnnnnnnnnnnnnnnnnnnnnnnnnnnnnnnnnnnnnnnnnnnnnnnnnnnnnnnnnnnnnnnnnnnnnnnnnnnnnnnnnnnnnnnnnnnnnnnnnnnnnnnnnnnnnnnnnnnnnnnnnnnnnnnnnnnnnnnnnnnnnnnnnnnnnnnnnnnnnnnnnnnnnnnnnnnnnnnnnnnnnnnnnnnnnnnnnnnnnnnnnnnnnnnnnnnnnnnnnnnnnnnnnnnnnnnnnnnnnnnnnnnnnnnnnnnnnnnnnnnnnnnnnnnnnnnnnnnnnnnnnnnnnnnnnnnnnnnnnnnnnnnnnnnnnnnnnnnnnnnnnnnnnnnnnnnnnnnnnnnnnnnnnnnnnnnnnnnnnnnnnnnnnnnnnnnnnnnnnnnnnnnnnnnnnnnnnnnnnnnnnnnnnnnnnnnnnnnnnnnnnnnnnnnnnnnnnnnnnnnnnnnnnnnnnnnnnnnnnnnnnnnnnnnnnnnnnnnnnnnnnnnnnnnnnnnnnnnnnnnnnnnnnnnnnnnnnnnnnnnnnnnnnnnnnnnnnnnnnnnnnnnnnnnnnnnnnnnnnnnnnnnnnnnnnnnnnnnnnnnnnnnnnnnnnnnnnnnnnnnnnnnnnnnnnnnnnnnnnnnnnnnnnnnnnnnnnnnnnnnnnnnnnnnnnnnnnnnnnnnnnnnnnnnnnnnnnnnnnnnnnnnnnnnnnnnnnnnnnnnnnnnnnnnnnnnnnnnnnnnnnnnnnnnnnnnnnnnnnnnnnnnnnnnnnnnnnnnnnnnnnnnnnnnnnnnnnnnnnnnnnnnnnnnnnnnnnnnnnnnnnnnnnnnnnnnnnnnnnnnnnnnnnnnnnnnnnnnnnnnnnnnnnnnnnnnnnnnnnnnnnnnnnnnnnnnnnnnnnnnnnnnnnnnnnnnnnnnnnnnnnnnnnnnnnnnnnnnnnnnnnnnnnnnnnnnnnnnnnnnnnnnnnnnnnnnnnnnnnnnnnnnnnnnnnnnnnnnnnnnnnnnnnnnnnnnnnnnnnnnnnnnnnnnnnnnnnnnnnnnnnnnnnnnnnnnnnnnnnnnnnnnnnnnnnnnnnnnnnnnnnnnnnnnnnnnnnnnnnnnnnnnnnnnnnnnnnnnnnnnnnnnnnnnnnnnnnnnnnnnnnnnnnnnnnnnnnnnnnnnnnnnnnnnnnnnnnnnnnnnnnnnnnnnnnnnnnnnnnnnnnnnnnnnnnnnnnnnnnnnnnnnnnnnnnnnnnnnnnnnnnnnnnnnnnnnnnnnnnnnnnnnnnnnnnnnnnnnnnnnnnnnnnnnnnnnnnnnnnnnnnnnnnnnnnnnnnnnnnnnnnnnnnnnnnnnnnnnnnnnnnnnnnnnnnnnnnnnnnnnnnnnnnnnnnnnnnnnnnnnnnnnnnnnnnnnnnnnnnnnnnnnnnnnnnnnnnnnnnnnnnnnnnnnnnnnnnnnnnnnnnnnnnnnnnnnnnnnnnnnnnnnnnnnnnnnnnnnnnnnnnnnnnnnnnnnnnnnnnnnnnnnnnnnnnnnnnnnnnnnnnnnnnnnnnnnnnnnnnnnnnnnnnnnnnnnnnnnnnnnnnnnnnnnnnnnnnnnnnnnnnnnnnnnnnnnnnnnnnnnnnnnnnnnnnnnnnnnnnnnnnnnnnnnnnnnnnnnnnnnnnnnnnnnnnnnnnnnnnnnnnnnnnnnnnnnnnnnnnnnnnnnnnnnnnnnnnnnnnnnnnnnnnnnnnnnnnnnnnnnnnnnnnnnnnnnnnnnnnnnnnnnnnnnnnnnnnnnnnnnnnnnnnnnnnnnnnnnnnnnnnnnnnnnnnnnnnnnnnnnnnnnnnnnnnnnnnnnnnnnnnnnnnnnnnnnnnnnnnnnnnnnnnnnnnnnnnnnnnnnnnnnnnnnnnnnnnnnnnnnnnnnnnnnnnnnnnnnnnnnnnnnnnnnnnnnnnnnnnnnnnnnnnnnnnnnnnnnnnnnnnnnnnnnnnnnnnnnnnnnnnnnnnnnnnnnnnnnnnnnnnnnnnnnnnnnnnnnnnnnnnnnnnnnnnnnnnnnnnnnnnnnnnnnnnnnnnnnnnnnnnnnnnnnnnnnnnnnnnnnnnnnnnnnnnnnnnnnnnnnnnnnnnnnnnnnnnnnnnnnnnnnnnnnnnnnnnnnnnnnnnnnnnnnnnnnnnnnnnnnnnnnnnnnnnnnnnnnnnnnnnnnnnnnnnnnnnnnnnnnnnnnnnnnnnnnnnnnnnnnnnnnnnnnnnnnnnnnnnnnnnnnnnnnnnnnnnnnnnnnnnnnnnnnnnnnnnnnnnnnnnnnnnnnnnnnnnnnnnnnnnnnnnnnnnnnnnnnnnnnnnnnnnnnnnnnnnnnnnnnnnnnnnnnnnnnnnnnnnnnnnnnnnnnnnnnnnnnnnnnnnnnnnnnnnnnnnnnnnnnnnnnnnnnnnnnnnnnnnnnnnnnnnnnnnnnnnnnnnnnnnnnnnnnnnnnnnnnnnnnnnnnnnnnnnnnnnnnnnnnnnnnnnnnnnnnnnnnnnnnnnnnnnnnnnnnnnnnnnnnnnnnnnnnnnnnnnnnnnnnnnnnnnnnnnnnnnnnnnnnnnnnnnnnnnnnnnnnnnnnnnnnnnnnnnnnnnnnnnnnnnnnnnnnnnnnnnnnnnnnnnnnnnnnnnnnnnnnnnnnnnnnnnnnnnnnnnnnnnnnnnnnnnnnnnnnnnnnnnnnnnnnnnnnnnnnnnnnnnnnnnnnnnnnnnnnnnnnnnnnnnnnnnnnnnnnnnnnnnnnnnnnnnnnnnnnnnnnnnnnnnnnnnnnnnnnnnnnnnnnnnnnnnnnnnnnnnnnnnnnnnnnnnnnnnnnnnnnnnnnnnnnnnnnnnnnnnnnnnnnnnnnnnnnnnnnnnnnnnnnnnnnnnnnnnnnnnnnnnnnnnnnnnnnnnnnnnnnnnnnnnnnnnnnnnnnnnnnnnnnnnnnnnnnnnnnnnnnnnnnnnnnnnnnnnnnnnnnnnnnnnnnnnnnnnnnnnnnnnnnnnnnnnnnnnnnnnnnnnnnnnnnnnnnnnnnnnnnnnnnnnnnnnnnnnnnnnnnnnnnnnnnnnnnnnnnnnnnnnnnnnnnnnnnnnnnnnnnnnnnnnnnnnnnnnnnnnnnnnnnnnnnnnnnnnnnnnnnnnnnnnnnnnnnnnnnnnnnnnnnnnnnnnnnnnnnnnnnnnnnnnnnnnnnnnnnnnnnnnnnnnnnnnnnnnnnnnnnnnnnnnnnnnnnnnnnnnnnnnnnnnnnnnnnnnnnnnnnnnnnnnnnnnnnnnnnnnnnnnnnnnnnnnnnnnnnnnnnnnnnnnnnnnnnnnnnnnnnnnnnnnnnnnnnnnnnnnnnnnnnnnnnnnnnnnnnnnnnnnnnnnnnnnnnnnnnnnnnnnnnnnnnnnnnnnnnnnnnnnnnnnnnnnnnnnnnnnnnnnnnnnnnnnnnnnnnnnnnnnnnnnnnnnnnnnnnnnnnnnnnnnnnnnnnnnnnnnnnnnnnnnnnnnnnnnnnnnnnnnnnnnnnnnnnnnnnnnnnnnnnnnnnnnnnnnnnnnnnnnnnnnnnnnnnnnnnnnnnnnnnnnnnnnnnnnnnnnnnnnnnnnnnnnnnnnnnnnnnnnnnnnnnnnnnnnnnnnnnnnnnnnnnnnnnnnnnnnnnnnnnnnnnnnnnnnnnnnnnnnnnnnnnnnnnnnnnnnnnnnnnnnnnnnnnnnnnnnnnnnnnnnnnnnnnnnnnnnnnnnnnnnnnnnnnnnnnnnnnnnnnnnnnnnnnnnnnnnnnnnnnnnnnnnnnnnnnnnnnnnnnnnnnnnnnnnnnnnnnnnnnnnnnnnnnnnnnnnnnnnnnnnnnnnnnnnnnnnnnnnnnnnnnnnnnnnnnnnnnnnnnnnnnnnnnnnnnnnnnnnnnnnnnnnnnnnnnnnnnnnnnnnnnnnnnnnnnnnnnnnnnnnnnnnnnnnnnnnnnnnnnnnnnnnnnnnnnnnnnnnnnnnnnnnnnnnnnnnnnnnnnnnnnnnnnnnnnnnnnnnnnnnnnnnnnnnnnnnnnnnnnnnnnnnnnnnnnnnnnnnnnnnnnnnnnnnnnnnnnnnnnnnnnnnnnnnnnnnnnnnnnnnnnnnnnnnnnnnnnnnnnnnnnnnnnnnnnnnnnnnnnnnnnnnnnnnnnnnnnnnnnnnnnnnnnnnnnnnnnnnnnnnnnnnnnnnnnnnnnnnnnnnnnnnnnnnnnnnnnnnnnnnnnnnnnnnnnnnnnnnnnnnnnnnnnnnnnnnnnnnnnnnnnnnnnnnnnnnnnnnnnnnnnnnnnnnnnnnnnnnnnnnnnnnnnnnnnnnnnnnnnnnnnnnnnnnnnnnnnnnnnnnnnnnnnnnnnnnnnnnnnnnnnnnnnnnnnnnnnnnnnnnnnnnnnnnnnnnnnnnnnnnnnnnnnnnnnnnnnnnnnnnnnnnnnnnnnnnnnnnnnnnnnnnnnnnnnnnnnnnnnnnnnnnnnnnnnnnnnnnnnnnnnnnnnnnnnnnnnnnnnnnnnnnnnnnnnnnnnnnnnnnnnnnnnnnnnnnnnnnnnnnnnnnnnnnnnnnnnnnnnnnnnnnnnnnnnnnnnnnnnnnnnnnnnnnnnnnnnnnnnnnnnnnnnnnnnnnnnnnnnnnnnnnnnnnnnnnnnnnnnnnnnnnnnnnnnnnnnnnnnnnnnnnnnnnnnnnnnnnnnnnnnnnnnnnnnnnnnnnnnnnnnnnnnnnnnnnnnnnnnnnnnnnnnnnnnnnnnnnnnnnnnnnnnnnnnnnnnnnnnnnnnnnnnnnnnnnnnnnnnnnnnnnnnnnnnnnnnnnnnnnnnnnnnnnnnnnnnnnnnnnnnnnnnnnnnnnnnnnnnnnnnnnnnnnnnnnnnnnnnnnnnnnnnnnnnnnnnnnnnnnnnnnnnnnnnnnnnnnnnnnnnnnnnnnnnnnnnnnnnnnnnnnnnnnnnnnnnnnnnnnnnnnnnnnnnnnnnnnnnnnnnnnnnnnnnnnnnnnnnnnnnnnnnnnnnnnnnnnnnnnnnnnnnnnnnnnnnnnnnnnnnnnnnnnnnnnnnnnnnnnnnnnnnnnnnnnnnnnnnnnnnnnnnnnnnnnnnnnnnnnnnnnnnnnnnnnnnnnnnnnnnnnnnnnnnnnnnnnnnnnnnnnnnnnnnnnnnnnnnnnnnnnnnnnnnnnnnnnnnnnnnnnnnnnnnnnnnnnnnnnnnnnnnnnnnnnnnnnnnnnnnnnnnnnnnnnnnnnnnnnnnnnnnnnnnnnnnnnnnnnnnnnnnnnnnnnnnnnnnnnnnnnnnnnnnnnnnnnnnnnnnnnnnnnnnnnnnnnnnnnnnnnnnnnnnnnnnnnnnnnnnnnnnnnnnnnnnnnnnnnnnnnnnnnnnnnnnnnnnnnnnnnnnnnnnnnnnnnnnnnnnnnnnnnnnnnnnnnnnnnnnnnnnnnnnnnnnnnnnnnnnnnnnnnnnnnnnnnnnnnnnnnnnnnnnnnnnnnnnnnnnnnnnnnnnnnnnnnnnnnnnnnnnnnnnnnnnnnnnnnnnnnnnnnnnnnnnnnnnnnnnnnnnnnnnnnnnnnnnnnnnnnnnnnnnnnnnnnnnnnnnnnnnnnnnnnnnnnnnnnnnnnnnnnnnnnnnnnnnnnnnnnnnnnnnnnnnnnnnnnnnnnnnnnnnnnnnnnnnnnnnnnnnnnnnnnnnnnnnnnnnnnnnnnnnnnnnnnnnnnnnnnnnnnnnnnnnnnnnnnnnnnnnnnnnnnnnnnnnnnnnnnnnnnnnnnnnnnnnnnnnnnnnnnnnnnnnnnnnnnnnnnnnnnnnnnnnnnnnnnnnnnnnnnnnnnnnnnnnnnnnnnnnnnnnnnnnnnnnnnnnnnnnnnnnnnnnnnnnnnnnnnnnnnnnnnnnnnnnnnnnnnnnnnnnnnnnnnnnnnnnnnnnnnnnnnnnnnnnnnnnnnnnnnnnnnnnnnnnnnnnnnnnnnnnnnnnnnnnnnnnnnnnnnnnnnnnnnnnnnnnnnnnnnnnnnnnnnnnnnnnnnnnnnnnnnnnnnnnnnnnnnnnnnnnnnnnnnnnnnnnnnnnnnnnnnnnnnnnnnnnnnnnnnnnnnnnnnnnnnnnnnnnnnnnnnnnnnnnnnnnnnnnnnnnnnnnnnnnnnnnnnnnnnnnnnnnnnnnnnnnnnnnnnnnnnnnnnnnnnnnnnnnnnnnnnnnnnnnnnnnnnnnnnnnnnnnnnnnnnnnnnnnnnnnnnnnnnnnnnnnnnnnnnnnnnnnnnnnnnnnnnnnnnnnnnnnnnnnnnnnnnnnnnnnnnnnnnnnnnnnnnnnnnnnnnnnnnnnnnnnnnnnnnnnnnnnnnnnnnnnnnnnnnnnnnnnnnnnnnnnnnnnnnnnnnnnnnnnnnnnnnnnnnnnnnnnnnnnnnnnnnnnnnnnnnnnnnnnnnnnnnnnnnnnnnnnnnnnnnnnnnnnnnnnnnnnnnnnnnnnnnnnnnnnnnnnnnnnnnnnnnnnnnnnnnnnnnnnnnnnnnnnnnnnnnnnnnnnnnnnnnnnnnnnnnnnnnnnnnnnnnnnnnnnnnnnnnnnnnnnnnnnnnnnnnnnnnnnnnnnnnnnnnnnnnnnnnnnnnnnnnnnnnnnnnnnnnnnnnnnnnnnnnnnnnnnnnnnnnnnnnnnnnnnnnnnnnnnnnnnnnnnnnnnnnnnnnnnnnnnnnnnnnnnnnnnnnnnnnnnnnnnnnnnnnnnnnnnnnnnnnnnnnnnnnnnnnnnnnnnnnnnnnnnnnnnnnnnnnnnnnnnnnnnnnnnnnnnnnnnnnnnnnnnnnnnnnnnnnnnnnnnnnnnnnnnnnnnnnnnnnnnnnnnnnnnnnnnnnnnnnnnnnnnnnnnnnnnnnnnnnnnnnnnnnnnnnnnnnnnnnnnnnnnnnnnnnnnnnnnnnnnnnnnnnnnnnnnnnnnnnnnnnnnnnnnnnnnnnnnnnnnnnnnnnnnnnnnnnnnnnnnnnnnnnnnnnnnnnnnnnnnnnnnnnnnnnnnnnnnnnnnnnnnnnnnnnnnnnnnnnnnnnnnnnnnnnnnnnnnnnnnnnnnnnnnnnnnnnnnnnnnnnnnnnnnnnnnnnnnnnnnnnnnnnnnnnnnnnnnnnnnnnnnnnnnnnnnnnnnnnnnnnnnnnnnnnnnnnnnnnnnnnnnnnnnnnnnnnnnnnnnnnnnnnnnnnnnnnnnnnnnnnnnnnnnnnnnnnnnnnnnnnnnnnnnnnnnnnnnnnnnnnnnnnnnnnnnnnnnnnnnnnnnnnnnnnnnnnnnnnnnnnnnnnnnnnnnnnnnnnnnnnnnnnnnnnnnnnnnnnnnnnnnnnnnnnnnnnnnnnnnnnnnnnnnnnnnnnnnnnnnnnnnnnnnnnnnnnnnnnnnnnnnnnnnnnnnnnnnnnnnnnnnnnnnnnnnnnnnnnnnnnnnnnnnnnnnnnnnnnnnnnnnnnnnnnnnnnnnnnnnnnnnnnnnnnnnnnnnnnnnnnnnnnnnnnnnnnnnnnnnnnnnnnnnnnnnnnnnnnnnnnnnnnnnnnnnnnnnnnnnnnnnnnnnnnnnnnnnnnnnnnnnnnnnnnnnnnnnnnnnnnnnnnnnnnnnnnnnnnnnnnnnnnnnnnnnnnnnnnnnnnnnnnnnnnnnnnnnnnnnnnnnnnnnnnnnnnnnnnnnnnnnnnnnnnnnnnnnnnnnnnnnnnnnnnnnnnnnnnnnnnnnnnnnnnnnnnnnnnnnnnnnnnnnnnnnnnnnnnnnnnnnnnnnnnnnnnnnnnnnnnnnnnnnnnnnnnnnnnnnnnnnnnnnnnnnnnnnnnnnnnnnnnnnnnnnnnnnnnnnnnnnnnnnnnnnnnnnnnnnnnnnnnnnnnnnnnnnnnnnnnnnnnnnnnnnnnnnnnnnnnnnnnnnnnnnnnnnnnnnnnnnnnnnnnnnnnnnnnnnnnnnnnnnnnnnnnnnnnnnnnnnnnnnnnnnnnnnnnnnnnnnnnnnnnnnnnnnnnnnnnnnnnnnnnnnnnnnnnnnnnnnnnnnnnnnnnnnnnnnnnnnnnnnnnnnnnnnnnnnnnnnnnnnnnnnnnnnnnnnnnnnnnnnnnnnnnnnnnnnnnnnnnnnnnnnnnnnnnnnnnnnnnnnnnnnnnnnnnnnnnnnnnnnnnnnnnnnnnnnnnnnnnnnnnnnnnnnnnnnnnnnnnnnnnnnnnnnnnnnnnnnnnnnnnnnnnnnnnnnnnnnnnnnnnnnnnnnnnnnnnnnnnnnnnnnnnnnnnnnnnnnnnnnnnnnnnnnnnnnnnnnnnnnnnnnnnnnnnnnnnnnnnnnnnnnnnnnnnnnnnnnnnnnnnnnnnnnnnnnnnnnnnnnnnnnnnnnnnnnnnnnnnnnnnnnnnnnnnnnnnnnnnnnnnnnnnnnnnnnnnnnnnnnnnnnnnnnnnnnnnnnnnnnnnnnnnnnnnnnnnnnnnnnnnnnnnnnnnnnnnnnnnnnnnnnnnnnnnnnnnnnnnnnnnnnnnnnnnnnnnnnnnnnnnnnnnnnnnnnnnnnnnnnnnnnnnnnnnnnnnnnnnnnnnnnnnnnnnnnnnnnnnnnnnnnnnnnnnnnnnnnnnnnnnnnnnnnnnnnnnnnnnnnnnnnnnnnnnnnnnnnnnnnnnnnnnnnnnnnnnnnnnnnnnnnnnnnnnnnnnnnnnnnnnnnnnnnnnnnnnnnnnnnnnnnnnnnnnnnnnnnnnnnnnnnnnnnnnnnnnnnnnnnnnnnnnnnnnnnnnnnnnnnnnnnnnnnnnnnnnnnnnnnnnnnnnnnnnnnnnnnnnnnnnnnnnnnnnnnnnnnnnnnnnnnnnnnnnnnnnnnnnnnnnnnnnnnnnnnnnnnnnnnnnnnnnnnnnnnnnnnnnnnnnnnnnnnnnnnnnnnnnnnnnnnnnnnnnnnnnnnnnnnnnnnnnnnnnnnnnnnnnnnnnnnnnnnnnnnnnnnnnnnnnnnnnnnnnnnnnnnnnnnnnnnnnnnnnnnnnnnnnnnnnnnnnnnnnnnnnnnnnnnnnnnnnnnnnnnnnnnnnnnnnnnnnnnnnnnnnnnnnnnnnnnnnnnnnnnnnnnnnnnnnnnnnnnnnnnnnnnnnnnnnnnnnnnnnnnnnnnnnnnnnnnnnnnnnnnnnnnnnnnnnnnnnnnnnnnnnnnnnnnnnnnnnnnnnnnnnnnnnnnnnnnnnnnnnnnnnnnnnnnnnnnnnnnnnnnnnnnnnnnnnnnnnnnnnnnnnnnnnnnnnnnnnnnnnnnnnnnnnnnnnnnnnnnnnnnnnnnnnnnnnnnnnnnnnnnnnnnnnnnnnnnnnnnnnnnnnnnnnnnnnnnnnnnnnnnnnnnnnnnnnnnnnnnnnnnnnnnnnnnnnnnnnnnnnnnnnnnnnnnnnnnnnnnnnnnnnnnnnnnnnnnnnnnnnnnnnnnnnnnnnnnnnnnnnnnnnnnnnnnnnnnnnnnnnnnnnnnnnnnnnnnnnnnnnnnnnnnnnnnnnnnnnnnnnnnnnnnnnnnnnnnnnnnnnnnnnnnnnnnnnnnnnnnnnnnnnnnnnnnnnnnnnnnnnnnnnnnnnnnnnnnnnnnnnnnnnnnnnnnnnnnnnnnnnnnnnnnnnnnnnnnnnnnnnnnnnnnnnnnnnnnnnnnnnnnnnnnnnnnnnnnnnnnnnnnnnnnnnnnnnnnnnnnnnnnnnnnnnnnnnnnnnnnnnnnnnnnnnnnnnnnnnnnnnnnnnnnnnnnnnnnnnnnnnnnnnnnnnnnnnnnnnnnnnnnnnnnnnnnnnnnnnnnnnnnnnnnnnnnnnnnnnnnnnnnnnnnnnnnnnnnnnnnnnnnnnnnnnnnnnnnnnnnnnnnnnnnnnnnnnnnnnnnnnnnnnnnnnnnnnnnnnnnnnnnnnnnnnnnnnnnnnnnnnnnnnnnnnnnnnnnnnnnnnnnnnnnnnnnnnnnnnnnnnnnnnnnnnnnnnnnnnnnnnnnnnnnnnnnnnnnnnnnnnnnnnnnnnnnnnnnnnnnnnnnnnnnnnnnnnnnnnnnnnnnnnnnnnnnnnnnnnnnnnnnnnnnnnnnnnnnnnnnnnnnnnnnnnnnnnnnnnnnnnnnnnnnnnnnnnnnnnnnnnnnnnnnnnnnnnnnnnnnnnnnnnnnnnnnnnnnnnnnnnnnnnnnnnnnnnnnnnnnnnnnnnnnnnnnnnnnnnnnnnnnnnnnnnnnnnnnnnnnnnnnnnnnnnnnnnnnnnnnnnnnnnnnnnnnnnnnnnnnnnnnnnnnnnnnnnnnnnnnnnnnnnnnnnnnnnnnnnnnnnnnnnnnnnnnnnnnnnnnnnnnnnnnnnnnnnnnnnnnnnnnnnnnnnnnnnnnnnnnnnnnnnnnnnnnnnnnnnnnnnnnnnnnnnnnnnnnnnnnnnnnnnnnnnnnnnnnnnnnnnnnnnnnnnnnnnnnnnnnnnnnnnnnnnnnnnnnnnnnnnnnnnnnnnnnnnnnnnnnnnnnnnnnnnnnnnnnnnnnnnnnnnnnnnnnnnnnnnnnnnnnnnnnnnnnnnnnnnnnnnnnnnnnnnnnnnnnnnnnnnnnnnnnnnnnnnnnnnnnnnnnnnnnnnnnnnnnnnnnnnnnnnnnnnnnnnnnnnnnnnnnnnnnnnnnnnnnnnnnnnnnnnnnnnnnnnnnnnnnnnnnnnnnnnnnnnnnnnnnnnnnnnnnnnnnnnnnnnnnnnnnnnnnnnnnnnnnnnnnnnnnnnnnnnnnnnnnnnnnnnnnnnnnnnnnnnnnnnnnnnnnnnnnnnnnnnnnnnnnnnnnnnnnnnnnnnnnnnnnnnnnnnnnnnnnnnnnnnnnnnnnnnnnnnnnnnnnnnnnnnnnnnnnnnnnnnnnnnnnnnnnnnnnnnnnnnnnnnnnnnnnnnnnnnnnnnnnnnnnnnnnnnnnnnnnnnnnnnnnnnnnnnnnnnnnnnnnnnnnnnnnnnnnnnnnnnnnnnnnnnnnnnnnnnnnnnnnnnnnnnnnnnnnnnnnnnnnnnnnnnnnnnnnnnnnnnnnnnnnnnnnnnnnnnnnnnnnnnnnnnnnnnnnnnnnnnnnnnnnnnnnnnnnnnnnnnnnnnnnnnnnnnnnnnnnnnnnnnnnnnnnnnnnnnnnnnnnnnnnnnnnnnnnnnnnnnnnnnnnnnnnnnnnnnnnnnnnnnnnnnnnnnnnnnnnnnnnnnnnnnnnnnnnnnnnnnnnnnnnnnnnnnnnnnnnnnnnnnnnnnnnnnnnnnnnnnnnnnnnnnnnnnnnnnnnnnnnnnnnnnnnnnnnnnnnnnnnnnnnnnnnnnnnnnnnnnnnnnnnnnnnnnnnnnnnnnnnnnnnnnnnnnnnnnnnnnnnnnnnnnnnnnnnnnnnnnnnnnnnnnnnnnnnnnnnnnnnnnnnnnnnnnnnnnnnnnnnnnnnnnnnnnnnnnnnnnnnnnnnnnnnnnnnnnnnnnnnnnnnnnnnnnnnnnnnnnnnnnnnnnnnnnnnnnnnnnnnnnnnnnnnnnnnnnnnnnnnnnnnnnnnnnnnnnnnnnnnnnnnnnnnnnnnnnnnnnnnnnnnnnnnnnnnnnnnnnnnnnnnnnnnnnnnnnnnnnnnnnnnnnnnnnnnnnnnnnnnnnnnnnnnnnnnnnnnnnnnnnnnnnnnnnnnnnnnnnnnnnnnnnnnnnnnnnnnnnnnnnnnnnnnnnnnnnnnnnnnnnnnnnnnnnnnnnnnnnnnnnnnnnnnnnnnnnnnnnnnnnnnnnnnnnnnnnnnnnnnnnnnnnnnnnnnnnnnnnnnnnnnnnnnnnnnnnnnnnnnnnnnnnnnnnnnnnnnnnnnnnnnnnnnnnnnnnnnnnnnnnnnnnnnnnnnnnnnnnnnnnnnnnnnnnnnnnnnnnnnnnnnnnnnnnnnnnnnnnnnnnnnnnnnnnnnnnnnnnnnnnnnnnnnnnnnnnnnnnnnnnnnnnnnnnnnnnnnnnnnnnnnnnnnnnnnnnnnnnnnnnnnnnnnnnnnnnnnnnnnnnnnnnnnnnnnnnnnnnnnnnnnnnnnnnnnnnnnnnnnnnnnnnnnnnnnnnnnnnnnnnnnnnnnnnnnnnnnnnnnnnnnnnnnnnnnnnnnnnnnnnnnnnnnnnnnnnnnnnnnnnnnnnnnnnnnnnnnnnnnnnnnnnnnnnnnnnnnnnnnnnnnnnnnnnnnnnnnnnnnnnnnnnnnnnnnnnnnnnnnnnnnnnnnnnnnnnnnnnnnnnnnnnnnnnnnnnnnnnnnnnnnnnnnnnnnnnnnnnnnnnnnnnnnnnnnnnnnnnnnnnnnnnnnnnnnnnnnnnnnnnnnnnnnnnnnnnnnnnnnnnnnnnnnnnnnnnnnnnnnnnnnnnnnnnnnnnnnnnnnnnnnnnnnnnnnnnnnnnnnnnnnnnnnnnnnnnnnnnnnnnnnnnnnnnnnnnnnnnnnnnnnnnnnnnnnnnnnnnnnnnnnnnnnnnnnnnnnnnnnnnnnnnnnnnnnnnnnnnnnnnnnnnnnnnnnnnnnnnnnnnnnnnnnnnnnnnnnnnnnnnnnnnnnnnnnnnnnnnnnnnnnnnnnnnnnnnnnnnnnnnnnnnnnnnnnnnnnnnnnnnnnnnnnnnnnnnnnnnnnnnnnnnnnnnnnnnnnnnnnnnnnnnnnnnnnnnnnnnnnnnnnnnnnnnnnnnnnnnnnnnnnnnnnnnnnnnnnnnnnnnnnnnnnnnnnnnnnnnnnnnnnnnnnnnnnnnnnnnnnnnnnnnnnnnnnnnnnnnnnnnnnnnnnnnnnnnnnnnnnnnnnnnnnnnnnnnnnnnnnnnnnnnnnnnnnnnnnnnnnnnnnnnnnnnnnnnnnnnnnnnnnnnnnnnnnnnnnnnnnnnnnnnnnnnnnnnnnnnnnnnnnnnnnnnnnnnnnnnnnnnnnnnnnnnnnnnnnnnnnnnnnnnnnnnnnnnnnnnnnnnnnnnnnnnnnnnnnnnnnnnnnnnnnnnnnnnnnnnnnnnnnnnnnnnnnnnnnnnnnnnnnnnnnnnnnnnnnnnnnnnnnnnnnnnnnnnnnnnnnnnnnnnnnnnnnnnnnnnnnnnnnnnnnnnnnnnnnnnnnnnnnnnnnnnnnnnnnnnnnnnnnnnnnnnnnnnnnnnnnnnnnnnnnnnnnnnnnnnnnnnnnnnnnnnnnnnnnnnnnnnnnnnnnnnnnnnnnnnnnnnnnnnnnnnnnnnnnnnnnnnnnnnnnnnnnnnnnnnnnnnnnnnnnnnnnnnnnnnnnnnnnnnnnnnnnnnnnnnnnnnnnnnnnnnnnnnnnnnnnnnnnnnnnnnnnnnnnnnnnnnnnnnnnnnnnnnnnnnnnnnnnnnnnnnnnnnnnnnnnnnnnnnnnnnnnnnnnnnnnnnnnnnnnnnnnnnnnnnnnnnnnnnnnnnnnnnnnnnnnnnnnnnnnnnnnnnnnnnnnnnnnnnnnnnnnnnnnnnnnnnnnnnnnnnnnnnnnnnnnnnnnnnnnnnnnnnnnnnnnnnnnnnnnnnnnnnnnnnnnnnnnnnnnnnnnnnnnnnnnnnnnnnnnnnnnnnnnnnnnnnnnnnnnnnnnnnnnnnnnnnnnnnnnnnnnnnnnnnnnnnnnnnnnnnnnnnnnnnnnnnnnnnnnnnnnnnnnnnnnnnnnnnnnnnnnnnnnnnnnnnnnnnnnnnnnnnnnnnnnnnnnnnnnnnnnnnnnnnnnnnnnnnnnnnnnnnnnnnnnnnnnnnnnnnnnnnnnnnnnnnnnnnnnnnnnnnnnnnnnnnnnnnnnnnnnnnnnnnnnnnnnnnnnnnnnnnnnnnnnnnnnnnnnnnnnnnnnnnnnnnnnnnnnnnnnnnnnnnnnnnnnnnnnnnnnnnnnnnnnnnnnnnnnnnnnnnnnnnnnnnnnnnnnnnnnnnnnnnnnnnnnnnnnnnnnnnnnnnnnnnnnnnnnnnnnnnnnnnnnnnnnnnnnnnnnnnnnnnnnnnnnnnnnnnnnnnnnnnnnnnnnnnnnnnnnnnnnnnnnnnnnnnnnnnnnnnnnnnnnnnnnnnnnnnnnnnnnnnnnnnnnnnnnnnnnnnnnnnnnnnnnnnnnnnnnnnnnnnnnnnnnnnnnnnnnnnnnnnnnnnnnnnnnnnnnnnnnnnnnnnnnnnnnnnnnnnnnnnnnnnnnnnnnnnnnnnnnnnnnnnnnnnnnnnnnnnnnnnnnnnnnnnnnnnnnnnnnnnnnnnnnnnnnnnnnnnnnnnnnnnnnnnnnnnnnnnnnnnnnnnnnnnnnnnnnnnnnnnnnnnnnnnnnnnnnnnnnnnnnnnnnnnnnnnnnnnnnnnnnnnnnnnnnnnnnnnnnnnnnnnnnnnnnnnnnnnnnnnnnnnnnnnnnnnnnnnnnnnnnnnnnnnnnnnnnnnnnnnnnnnnnnnnnnnnnnnnnnnnnnnnnnnnnnnnnnnnnnnnnnnnnnnnnnnnnnnnnnnnnnnnnnnnnnnnnnnnnnnnnnnnnnnnnnnnnnnnnnnnnnnnnnnnnnnnnnnnnnnnnnnnnnnnnnnnnnnnnnnnnnnnnnnnnnnnnnnnnnnnnnnnnnnnnnnnnnnnnnnnnnnnnnnnnnnnnnnnnnnnnnnnnnnnnnnnnnnnnnnnnnnnnnnnnnnnnnnnnnnnnnnnnnnnnnnnnnnnnnnnnnnnnnnnnnnnnnnnnnnnnnnnnnnnnnnnnnnnnnnnnnnnnnnnnnnnnnnnnnnnnnnnnnnnnnnnnnnnnnnnnnnnnnnnnnnnnnnnnnnnnnnnnnnnnnnnnnnnnnnnnnnnnnnnnnnnnnnnnnnnnnnnnnnnnnnnnnnnnnnnnnnnnnnnnnnnnnnnnnnnnnnnnnnnnnnnnnnnnnnnnnnnnnnnnnnnnnnnnnnnnnnnnnnnnnnnnnnnnnnnnnnnnnnnnnnnnnnnnnnnnnnnnnnnnnnnnnnnnnnnnnnnnnnnnnnnnnnnnnnnnnnnnnnnnnnnnnnnnnnnnnnnnnnnnnnnnnnnnnnnnnnnnnnnnnnnnnnnnnnnnnnnnnnnnnnnnnnnnnnnnnnnnnnnnnnnnnnnnnnnnnnnnnnnnnnnnnnnnnnnnnnnnnnnnnnnnnnnnnnnnnnnnnnnnnnnnnnnnnnnnnnnnnnnnnnnnnnnnnnnnnnnnnnnnnnnnnnnnnnnnnnnnnnnnnnnnnnnnnnnnnnnnnnnnnnnnnnnnnnnnnnnnnnnnnnnnnnnnnnnnnnnnnnnnnnnnnnnnnnnnnnnnnnnnnnnnnnnnnnnnnnnnnnnnnnnnnnnnnnnnnnnnnnnnnnnnnnnnnnnnnnnnnnnnnnnnnnnnnnnnnnnnnnnnnnnnnnnnnnnnnnnnnnnnnnnnnnnnnnnnnnnnnnnnnnnnnnnnnnnnnnnnnnnnnnnnnnnnnnnnnnnnnnnnnnnnnnnnnnnnnnnnnnnnnnnnnnnnnnnnnnnnnnnnnnnnnnnnnnnnnnnnnnnnnnnnnnnnnnnnnnnnnnnnnnnnnnnnnnnnnnnnnnnnnnnnnnnnnnnnnnnnnnnnnnnnnnnnnnnnnnnnnnnnnnnnnnnnnnnnnnnnnnnnnnnnnnnnnnnnnnnnnnnnnnnnnnnnnnnnnnnnnnnnnnnnnnnnnnnnnnnnnnnnnnnnnnnnnnnnnnnnnnnnnnnnnnnnnnnnnnnnnnnnnnnnnnnnnnnnnnnnnnnnnnnnnnnnnnnnnnnnnnnnnnnnnnnnnnnnnnnnnnnnnnnnnnnnnnnnnnnnnnnnnnnnnnnnnnnnnnnnnnnnnnnnnnnnnnnnnnnnnnnnnnnnnnnnnnnnnnnnnnnnnnnnnnnnnnnnnnnnnnnnnnnnnnnnnnnnnnnnnnnnnnnnnnnnnnnnnnnnnnnnnnnnnnnnnnnnnnnnnnnnnnnnnnnnnnnnnnnnnnnnnnnnnnnnnnnnnnnnnnnnnnnnnnnnnnnnnnnnnnnnnnnnnnnnnnnnnnnnnnnnnnnnnnnnnnnnnnnnnnnnnnnnnnnnnnnnnnnnnnnnnnnnnnnnnnnnnnnnnnnnnnnnnnnnnnnnnnnnnnnnnnnnnnnnnnnnnnnnnnnnnnnnnnnnnnnnnnnnnnnnnnnnnnnnnnnnnnnnnnnnnnnnnnnnnnnnnnnnnnnnnnnnnnnnnnnnnnnnnnnnnnnnnnnnnnnnnnnnnnnnnnnnnnnnnnnnnnnnnnnnnnnnnnnnnnnnnnnnnnnnnnnnnnnnnnnnnnnnnnnnnnnnnnnnnnnnnnnnnnnnnnnnnnnnnnnnnnnnnnnnnnnnnnnnnnnnnnnnnnnnnnnnnnnnnnnnnnnnnnnnnnnnnnnnnnnnnnnnnnnnnnnnnnnnnnnnnnnnnnnnnnnnnnnnnnnnnnnnnnnnnnnnnnnnnnnnnnnnnnnnnnnnnnnnnnnnnnnnnnnnnnnnnnnnnnnnnnnnnnnnnnnnnnnnnnnnnnnnnnnnnnnnnnnnnnnnnnnnnnnnnnnnnnnnnnnnnnnnnnnnnnnnnnnnnnnnnnnnnnnnnnnnnnnnnnnnnnnnnnnnnnnnnnnnnnnnnnnnnnnnnnnnnnnnnnnnnnnnnnnnnnnnnnnnnnnnnnnnnnnnnnnnnnnnnnnnnnnnnnnnnnnnnnnnnnnnnnnnnnnnnnnnnnnnnnnnnnnnnnnnnnnnnnnnnnnnnnnnnnnnnnnnnnnnnnnnnnnnnnnnnnnnnnnnnnnnnnnnnnnnnnnnnnnnnnnnnnnnnnnnnnnnnnnnnnnnnnnnnnnnnnnnnnnnnnnnnnnnnnnnnnnnnnnnnnnnnnnnnnnnnnnnnnnnnnnnnnnnnnnnnnnnnnnnnnnnnnnnnnnnnnnnnnnnnnnnnnnnnnnnnnnnnnnnnnnnnnnnnnnnnnnnnnnnnnnnnnnnnnnnnnnnnnnnnnnnnnnnnnnnnnnnnnnnnnnnnnnnnnnnnnnnnnnnnnnnnnnnnnnnnnnnnnnnnnnnnnnnnnnnnnnnnnnnnnnnnnnnnnnnnnnnnnnnnnnnnnnnnnnnnnnnnnnnnnnnnnnnnnnnnnnnnnnnnnnnnnnnnnnnnnnnnnnnnnnnnnnnnnnnnnnnnnnnnnnnnnnnnnnnnnnnnnnnnnnnnnnnnnnnnnnnnnnnnnnnnnnnnnnnnnnnnnnnnnnnnnnnnnnnnnnnnnnnnnnnnnnnnnnnnnnnnnnnnnnnnnnnnnnnnnnnnnnnnnnnnnnnnnnnnnnnnnnnnnnnnnnnnnnnnnnnnnnnnnnnnnnnnnnnnnnnnnnnnnnnnnnnnnnnnnnnnnnnnnnnnnnnnnnnnnnnnnnnnnnnnnnnnnnnnnnnnnnnnnnnnnnnnnnnnnnnnnnnnnnnnnnnnnnnnnnnnnnnnnnnnnnnnnnnnnnnnnnnnnnnnnnnnnnnnnnnnnnnnnnnnnnnnnnnnnnnnnnnnnnnnnnnnnnnnnnnnnnnnnnnnnnnnnnnnnnnnnnnnnnnnnnnnnnnnnnnnnnnnnnnnnnnnnnnnnnnnnnnnnnnnnnnnnnnnnnnnnnnnnnnnnnnnnnnnnnnnnnnnnnnnnnnnnnnnnnnnnnnnnnnnnnnnnnnnnnnnnnnnnnnnnnnnnnnnnnnnnnnnnnnnnnnnnnnnnnnnnnnnnnnnnnnnnnnnnnnnnnnnnnnnnnnnnnnnnnnnnnnnnnnnnnnnnnnnnnnnnnnnnnnnnnnnnnnnnnnnnnnnnnnnnnnnnnnnnnnnnnnnnnnnnnnnnnnnnnnnnnnnnnnnnnnnnnnnnnnnnnnnnnnnnnnnnnnnnnnnnnnnnnnnnnnnnnnnnnnnnnnnnnnnnnnnnnnnnnnnnnnnnnnnnnnnnnnnnnnnnnnnnnnnnnnnnnnnnnnnnnnnnnnnnnnnnnnnnnnnnnnnnnnnnnnnnnnnnnnnnnnnnnnnnnnnnnnnnnnnnnnnnnnnnnnnnnnnnnnnnnnnnnnnnnnnnnnnnnnnnnnnnnnnnnnnnnnnnnnnnnnnnnnnnnnnnnnnnnnnnnnnnnnnnnnnnnnnnnnnnnnnnnnnnnnnnnnnnnnnnnnnnnnnnnnnnnnnnnnnnnnnnnnnnnnnnnnnnnnnnnnnnnnnnnnnnnnnnnnnnnnnnnnnnnnnnnnnnnnnnnnnnnnnnnnnnnnnnnnnnnnnnnnnnnnnnnnnnnnnnnnnnnnnnnnnnnnnnnnnnnnnnnnnnnnnnnnnnnnnnnnnnnnnnnnnnnnnnnnnnnnnnnnnnnnnnnnnnnnnnnnnnnnnnnnnnnnnnnnnnnnnnnnnnnnnnnnnnnnnnnnnnnnnnnnnnnnnnnnnnnnnnnnnnnnnnnnnnnnnnnnnnnnnnnnnnnnnnnnnnnnnnnnnnnnnnnnnnnnnnnnnnnnnnnnnnnnnnnnnnnnnnnnnnnnnnnnnnnnnnnnnnnnnnnnnnnnnnnnnnnnnnnnnnnnnnnnnnnnnnnnnnnnnnnnnnnnnnnnnnnnnnnnnnnnnnnnnnnnnnnnnnnnnnnnnnnnnnnnnnnnnnnnnnnnnnnnnnnnnnnnnnnnnnnnnnnnnnnnnnnnnnnnnnnnnnnnnnnnnnnnnnnnnnnnnnnnnnnnnnnnnnnnnnnnnnnnnnnnnnnnnnnnnnnnnnnnnnnnnnnnnnnnnnnnnnnnnnnnnnnnnnnnnnnnnnnnnnnnnnnnnnnnnnnnnnnnnnnnnnnnnnnnnnnnnnnnnnnnnnnnnnnnnnnnnnnnnnnnnnnnnnnnnnnnnnnnnnnnnnnnnnnnnnnnnnnnnnnnnnnnnnnnnnnnnnnnnnnnnnnnnnnnnnnnnnnnnnnnnnnnnnnnnnnnnnnnnnnnnnnnnnnnnnnnnnnnnnnnnnnnnnnnnnnnnnnnnnnnnnnnnnnnnnnnnnnnnnnnnnnnnnnnnnnnnnnnnnnnnnnnnnnnnnnnnnnnnnnnnnnnnnnnnnnnnnnnnnnnnnnnnnnnnnnnnnnnnnnnnnnnnnnnnnnnnnnnnnnnnnnnnnnnnnnnnnnnnnnnnnnnnnnnnnnnnnnnnnnnnnnnnnnnnnnnnnnnnnnnnnnnnnnnnnnnnnnnnnnnnnnnnnnnnnnnnnnnnnnnnnnnnnnnnnnnnnnnnnnnnnnnnnnnnnnnnnnnnnnnnnnnnnnnnnnnnnnnnnnnnnnnnnnnnnnnnnnnnnnnnnnnnnnnnnnnnnnnnnnnnnnnnnnnnnnnnnnnnnnnnnnnnnnnnnnnnnnnnnnnnnnnnnnnnnnnnnnnnnnnnnnnnnnnnnnnnnnnnnnnnnnnnnnnnnnnnnnnnnnnnnnnnnnnnnnnnnnnnnnnnnnnnnnnnnnnnnnnnnnnnnnnnnnnnnnnnnnnnnnnnnnnnnnnnnnnnnnnnnnnnnnnnnnnnnnnnnnnnnnnnnnnnnnnnnnnnnnnnnnnnnnnnnnnnnnnnnnnnnnnnnnnnnnnnnnnnnnnnnnnnnnnnnnnnnnnnnnnnnnnnnnnnnnnnnnnnnnnnnnnnnnnnnnnnnnnnnnnnnnnnnnnnnnnnnnnnnnnnnnnnnnnnnnnnnnnnnnnnnnnnnnnnnnnnnnnnnnnnnnnnnnnnnnnnnnnnnnnnnnnnnnnnnnnnnnnnnnnnnnnnnnnnnnnnnnnnnnnnnnnnnnnnnnnnnnnnnnnnnnnnnnnnnnnnnnnnnnnnnnnnnnnnnnnnnnnnnnnnnnnnnnnnnnnnnnnnnnnnnnnnnnnnnnnnnnnnnnnnnnnnnnnnnnnnnnnnnnnnnnnnnnnnnnnnnnnnnnnnnnnnnnnnnnnnnnnnnnnnnnnnnnnnnnnnnnnnnnnnnnnnnnnnnnnnnnnnnnnnnnnnnnnnnnnnnnnnnnnnnnnnnnnnnnnnnnnnnnnnnnnnnnnnnnnnnnnnnnnnnnnnnnnnnnnnnnnnnnnnnnnnnnnnnnnnnnnnnnnnnnnnnnnnnnnnnnnnnnnnnnnnnnnnnnnnnnnnnnnnnnnnnnnnnnnnnnnnnnnnnnnnnnnnnnnnnnnnnnnnnnnnnnnnnnnnnnnnnnnnnnnnnnnnnnnnnnnnnnnnnnnnnnnnnnnnnnnnnnnnnnnnnnnnnnnnnnnnnnnnnnnnnnnnnnnnnnnnnnnnnnnnnnnnnnnnnnnnnnnnnnnnnnnnnnnnnnnnnnnnnnnnnnnnnnnnnnnnnnnnnnnnnnnnnnnnnnnnnnnnnnnnnnnnnnnnnnnnnnnnnnnnnnnnnnnnnnnnnnnnnnnnnnnnnnnnnnnnnnnnnnnnnnnnnnnnnnnnnnnnnnnnnnnnnnnnnnnnnnnnnnnnnnnnnnnnnnnnnnnnnnnnnnnnnnnnnnnnnnnnnnnnnnnnnnnnnnnnnnnnnnnnnnnnnnnnnnnnnnnnnnnnnnnnnnnnnnnnnnnnnnnnnnnnnnnnnnnnnnnnnnnnnnnnnnnnnnnnnnnnnnnnnnnnnnnnnnnnnnnnnnnnnnnnnnnnnnnnnnnnnnnnnnnnnnnnnnnnnnnnnnnnnnnnnnnnnnnnnnnnnnnnnnnnnnnnnnnnnnnnnnnnnnnnnnnnnnnnnnnnnnnnnnnnnnnnnnnnnnnnnnnnnnnnnnnnnnnnnnnnnnnnnnnnnnnnnnnnnnnnnnnnnnnnnnnnnnnnnnnnnnnnnnnnnnnnnnnnnnnnnnnnnnnnnnnnnnnnnnnnnnnnnnnnnnnnnnnnnnnnnnnnnnnnnnnnnnnnnnnnnnnnnnnnnnnnnnnnnnnnnnnnnnnnnnnnnnnnnnnnnnnnnnnnnnnnnnnnnnnnnnnnnnnnnnnnnnnnnnnnnnnnnnnnnnnnnnnnnnnnnnnnnnnnnnnnnnnnnnnnnnnnnnnnnnnnnnnnnnnnnnnnnnnnnnnnnnnnnnnnnnnnnnnnnnnnnnnnnnnnnnnnnnnnnnnnnnnnnnnnnnnnnnnnnnnnnnnnnnnnnnnnnnnnnnnnnnnnnnnnnnnnnnnnnnnnnnnnnnnnnnnnnnnnnnnnnnnnnnnnnnnnnnnnnnnnnnnnnnnnnnnnnnnnnnnnnnnnnnnnnnnnnnnnnnnnnnnnnnnnnnnnnnnnnnnnnnnnnnnnnnnnnnnnnnnnnnnnnnnnnnnnnnnnnnnnnnnnnnnnnnnnnnnnnnnnnnnnnnnnnnnnnnnnnnnnnnnnnnnnnnnnnnnnnnnnnnnnnnnnnnnnnnnnnnnnnnnnnnnnnnnnnnnnnnnnnnnnnnnnnnnnnnnnnnnnnnnnnnnnnnnnnnnnnnnnnnnnnnnnnnnnnnnnnnnnnnnnnnnnnnnnnnnnnnnnnnnnnnnnnnnnnnnnnnnnnnnnnnnnnnnnnnnnnnnnnnnnnnnnnnnnnnnnnnnnnnnnnnnnnnnnnnnnnnnnnnnnnnnnnnnnnnnnnnnnnnnnnnnnnnnnnnnnnnnnnnnnnnnnnnnnnnnnnnnnnnnnnnnnnnnnnnnnnnnnnnnnnnnnnnnnnnnnnnnnnnnnnnnnnnnnnnnnnnnnnnnnnnnnnnnnnnnnnnnnnnnnnnnnnnnnnnnnnnnnnnnnnnnnnnnnnnnnnnnnnnnnnnnnnnnnnnnnnnnnnnnnnnnnnnnnnnnnnnnnnnnnnnnnnnnnnnnnnnnnnnnnnnnnnnnnnnnnnnnnnnnnnnnnnnnnnnnnnnnnnnnnnnnnnnnnnnnnnnnnnnnnnnnnnnnnnnnnnnnnnnnnnnnnnnnnnnnnnnnnnnnnnnnnnnnnnnnnnnnnnnnnnnnnnnnnnnnnnnnnnnnnnnnnnnnnnnnnnnnnnnnnnnnnnnnnnnnnnnnnnnnnnnnnnnnnnnnnnnnnnnnnnnnnnnnnnnnnnnnnnnnnnnnnnnnnnnnnnnnnnnnnnnnnnnnnnnnnnnnnnnnnnnnnnnnnnnnnnnnnnnnnnnnnnnnnnnnnnnnnnnnnnnnnnnnnnnnnnnnnnnnnnnnnnnnnnnnnnnnnnnnnnnnnnnnnnnnnnnnnnnnnnnnnnnnnnnnnnnnnnnnnnnnnnnnnnnnnnnnnnnnnnnnnnnnnnnnnnnnnnnnnnnnnnnnnnnnnnnnnnnnnnnnnnnnnnnnnnnnnnnnnnnnnnnnnnnnnnnnnnnnnnnnnnnnnnnnnnnnnnnnnnnnnnnnnnnnnnnnnnnnnnnnnnnnnnnnnnnnnnnnnnnnnnnnnnnnnnnnnnnnnnnnnnnnnnnnnnnnnnnnnnnnnnnnnnnnnnnnnnnnnnnnnnnnnnnnnnnnnnnnnnnnnnnnnnnnnnnnnnnnnnnnnnnnnnnnnnnnnnnnnnnnnnnnnnnnnnnnnnnnnnnnnnnnnnnnnnnnnnnnnnnnnnnnnnnnnnnnnnnnnnnnnnnnnnnnnnnnnnnnnnnnnnnnnnnnnnnnnnnnnnnnnnnnnnnnnnnnnnnnnnnnnnnnnnnnnnnnnnnnnnnnnnnnnnnnnnnnnnnnnnnnnnnnnnnnnnnnnnnnnnnnnnnnnnnnnnnnnnnnnnnnnnnnnnnnnnnnnnnnnnnnnnnnnnnnnnnnnnnnnnnnnnnnnnnnnnnnnnnnnnnnnnnnnnnnnnnnnnnnnnnnnnnnnnnnnnnnnnnnnnnnnnnnnnnnnnnnnnnnnnnnnnnnnnnnnnnnnnnnnnnnnnnnnnnnnnnnnnnnnnnnnnnnnnnnnnnnnnnnnnnnnnnnnnnnnnnnnnnnnnnnnnnnnnnnnnnnnnnnnnnnnnnnnnnnnnnnnnnnnnnnnnnnnnnnnnnnnnnnnnnnnnnnnnnnnnnnnnnnnnnnnnnnnnnnnnnnnnnnnnnnnnnnnnnnnnnnnnnnnnnnnnnnnnnnnnnnnnnnnnnnnnnnnnnnnnnnnnnnnnnnnnnnnnnnnnnnnnnnnnnnnnnnnnnnnnnnnnnnnnnnnnnnnnnnnnnnnnnnnnnnnnnnnnnnnnnnnnnnnnnnnnnnnnnnnnnnnnnnnnnnnnnnnnnnnnnnnnnnnnnnnnnnnnnnnnnnnnnnnnnnnnnnnnnnnnnnnnnnnnnnnnnnnnnnnnnnnnnnnnnnnnnnnnnnnnnnnnnnnnnnnnnnnnnnnnnnnnnnnnnnnnnnnnnnnnnnnnnnnnnnnnnnnnnnnnnnnnnnnnnnnnnnnnnnnnnnnnnnnnnnnnnnnnnnnnnnnnnnnnnnnnnnnnnnnnnnnnnnnnnnnnnnnnnnnnnnnnnnnnnnnnnnnnnnnnnnnnnnnnnnnnnnnnnnnnnnnnnnnnnnnnnnnnnnnnnnnnnnnnnnnnnnnnnnnnnnnnnnnnnnnnnnnnnnnnnnnnnnnnnnnnnnnnnnnnnnnnnnnnnnnnnnnnnnnnnnnnnnnnnnnnnnnnnnnnnnnnnnnnnnnnnnnnnnnnnnnnnnnnnnnnnnnnnnnnnnnnnnnnnnnnnnnnnnnnnnnnnnnnnnnnnnnnnnnnnnnnnnnnnnnnnnnnnnnnnnnnnnnnnnnnnnnnnnnnnnnnnnnnnnnnnnnnnnnnnnnnnnnnnnnnnnnnnnnnnnnnnnnnnnnnnnnnnnnnnnnnnnnnnnnnnnnnnnnnnnnnnnnnnnnnnnnnnnnnnnnnnnnnnnnnnnnnnnnnnnnnnnnnnnnnnnnnnnnnnnnnnnnnnnnnnnnnnnnnnnnnnnnnnnnnnnnnnnnnnnnnnnnnnnnnnnnnnnnnnnnnnnnnnnnnnnnnnnnnnnnnnnnnnnnnnnnnnnnnnnnnnnnnnnnnnnnnnnnnnnnnnnnnnnnnnnnnnnnnnnnnnnnnnnnnnnnnnnnnnnnnnnnnnnnnnnnnnnnnnnnnnnnnnnnnnnnnnnnnnnnnnnnnnnnnnnnnnnnnnnnnnnnnnnnnnnnnnnnnnnnnnnnnnnnnnnnnnnnnnnnnnnnnnnnnnnnnnnnnnnnnnnnnnnnnnnnnnnnnnnnnnnnnnnnnnnnnnnnnnnnnnnnnnnnnnnnnnnnnnnnnnnnnnnnnnnnnnnnnnnnnnnnnnnnnnnnnnnnnnnnnnnnnnnnnnnnnnnnnnnnnnnnnnnnnnnnnnnnnnnnnnnnnnnnnnnnnnnnnnnnnnnnnnnnnnnnnnnnnnnnnnnnnnnnnnnnnnnnnnnnnnnnnnnnnnnnnnnnnnnnnnnnnnnnnnnnnnnnnnnnnnnnnnnnnnnnnnnnnnnnnnnnnnnnnnnnnnnnnnnnnnnnnnnnnnnnnnnnnnnnnnnnnnnnnnnnnnnnnnnnnnnnnnnnnnnnnnnnnnnnnnnnnnnnnnnnnnnnnnnnnnnnnnnnnnnnnnnnnnnnnnnnnnnnnnnnnnnnnnnnnnnnnnnnnnnnnnnnnnnnnnnnnnnnnnnnnnnnnnnnnnnnnnnnnnnnnnnnnnnnnnnnnnnnnnnnnnnnnnnnnnnnnnnnnnnnnnnnnnnnnnnnnnnnnnnnnnnnnnnnnnnnnnnnnnnnnnnnnnnnnnnnnnnnnnnnnnnnnnnnnnnnnnnnnnnnnnnnnnnnnnnnnnnnnnnnnnnnnnnnnnnnnnnnnnnnnnnnnnnnnnnnnnnnnnnnnnnnnnnnnnnnnnnnnnnnnnnnnnnnnnnnnnnnnnnnnnnnnnnnnnnnnnnnnnnnnnnnnnnnnnnnnnnnnnnnnnnnnnnnnnnnnnnnnnnnnnnnnnnnnnnnnnnnnnnnnnnnnnnnnnnnnnnnnnnnnnnnnnnnnnnnnnnnnnnnnnnnnnnnnnnnnnnnnnnnnnnnnnnnnnnnnnnnnnnnnnnnnnnnnnnnnnnnnnnnnnnnnnnnnnnnnnnnnnnnnnnnnnnnnnnnnnnnnnnnnnnnnnnnnnnnnnnnnnnnnnnnnnnnnnnnnnnnnnnnnnnnnnnnnnnnnnnnnnnnnnnnnnnnnnnnnnnnnnnnnnnnnnnnnnnnnnnnnnnnnnnnnnnnnnnnnnnnnnnnnnnnnnnnnnnnnnnnnnnnnnnnnnnnnnnnnnnnnnnnnnnnnnnnnnnnnnnnnnnnnnnnnnnnnnnnnnnnnnnnnnnnnnnnnnnnnnnnnnnnnnnnnnnnnnnnnnnnnnnnnnnnnnnnnnnnnnnnnnnnnnnnnnnnnnnnnnnnnnnnnnnnnnnnnnnnnnnnnnnnnnnnnnnnnnnnnnnnnnnnnnnnnnnnnnnnnnnnnnnnnnnnnnnnnnnnnnnnnnnnnnnnnnnnnnnnnnnnnnnnnnnnnnnnnnnnnnnnnnnnnnnnnnnnnnnnnnnnnnnnnnnnnnnnnnnnnnnnnnnnnnnnnnnnnnnnnnnnnnnnnnnnnnnnnnnnnnnnnnnnnnnnnnnnnnnnnnnnnnnnnnnnnnnnnnnnnnnnnnnnnnnnnnnnnnnnnnnnnnnnnnnnnnnnnnnnnnnnnnnnnnnnnnnnnnnnnnnnnnnnnnnnnnnnnnnnnnnnnnnnnnnnnnnnnnnnnnnnnnnnnnnnnnnnnnnnnnnnnnnnnnnnnnnnnnnnnnnnnnnnnnnnnnnnnnnnnnnnnnnnnnnnnnnnnnnnnnnnnnnnnnnnnnnnnnnnnnnnnnnnnnnnnnnnnnnnnnnnnnnnnnnnnnnnnnnnnnnnnnnnnnnnnnnnnnnnnnnnnnnnnnnnnnnnnnnnnnnnnnnnnnnnnnnnnnnnnnnnnnnnnnnnnnnnnnnnnnnnnnnnnnnnnnnnnnnnnnnnnnnnnnnnnnnnnnnnnnnnnnnnnnnnnnnnnnnnnnnnnnnnnnnnnnnnnnnnnnnnnnnnnnnnnnnnnnnnnnnnnnnnnnnnnnnnnnnnnnnnnnnnnnnnnnnnnnnnnnnnnnnnnnnnnnnnnnnnnnnnnnnnnnnnnnnnnnnnnnnnnnnnnnnnnnnnnnnnnnnnnnnnnnnnnnnnnnnnnnnnnnnnnnnnnnnnnnnnnnnnnnnnnnnnnnnnnnnnnnnnnnnnnnnnnnnnnnnnnnnnnnnnnnnnnnnnnnnnnnnnnnnnnnnnnnnnnnnnnnnnnnnnnnnnnnnnnnnnnnnnnnnnnnnnnnnnnnnnnnnnnnnnnnnnnnnnnnnnnnnnnnnnnnnnnnnnnnnnnnnnnnnnnnnnnnnnnnnnnnnnnnnnnnnnnnnnnnnnnnnnnnnnnnnnnnnnnnnnnnnnnnnnnnnnnnnnnnnnnnnnnnnnnnnnnnnnnnnnnnnnnnnnnnnnnnnnnnnnnnnnnnnnnnnnnnnnnnnnnnnnnnnnnnnnnnnnnnnnnnnnnnnnnnnnnnnnnnnnnnnnnnnnnnnnnnnnnnnnnnnnnnnnnnnnnnnnnnnnnnnnnnnnnnnnnnnnnnnnnnnnnnnnnnnnnnnnnnnnnnnnnnnnnnnnnnnnnnnnnnnnnnnnnnnnnnnnnnnnnnnnnnnnnnnnnnnnnnnnnnnnnnnnnnnnnnnnnnnnnnnnnnnnnnnnnnnnnnnnnnnnnnnnnnnnnnnnnnnnnnnnnnnnnnnnnnnnnnnnnnnnnnnnnnnnnnnnnnnnnnnnnnnnnnnnnnnnnnnnnnnnnnnnnnnnnnnnnnnnnnnnnnnnnnnnnnnnnnnnnnnnnnnnnnnnnnnnnnnnnnnnnnnnnnnnnnnnnnnnnnnnnnnnnnnnnnnnnnnnnnnnnnnnnnnnnnnnnnnnnnnnnnnnnnnnnnnnnnnnnnnnnnnnnnnnnnnnnnnnnnnnnnnnnnnnnnnnnnnnnnnnnnnnnnnnnnnnnnnnnnnnnnnnnnnnnnnnnnnnnnnnnnnnnnnnnnnnnnnnnnnnnnnnnnnnnnnnnnnnnnnnnnnnnnnnnnnnnnnnnnnnnnnnnnnnnnnnnnnnnnnnnnnnnnnnnnnnnnnnnnnnnnnnnnnnnnnnnnnnnnnnnnnnnnnnnnnnnnnnnnnnnnnnnnnnnnnnnnnnnnnnnnnnnnnnnnnnnnnnnnnnnnnnnnnnnnnnnnnnnnnnnnnnnnnnnnnnnnnnnnnnnnnnnnnnnnnnnnnnnnnnnnnnnnnnnnnnnnnnnnnnnnnnnnnnnnnnnnnnnnnnnnnnnnnnnnnnnnnnnnnnnnnnnnnnnnnnnnnnnnnnnnnnnnnnnnnnnnnnnnnnnnnnnnnnnnnnnnnnnnnnnnnnnnnnnnnnnnnnnnnnnnnnnnnnnnnnnnnnnnnnnnnnnnnnnnnnnnnnnnnnnnnnnnnnnnnnnnnnnnnnnnnnnnnnnnnnnnnnnnnnnnnnnnnnnnnnnnnnnnnnnnnnnnnnnnnnnnnnnnnnnnnnnnnnnnnnnnnnnnnnnnnnnnnnnnnnnnnnnnnnnnnnnnnnnnnnnnnnnnnnnnnnnnnnnnnnnnnnnnnnnnnnnnnnnnnnnnnnnnnnnnnnnnnnnnnnnnnnnnnnnnnnnnnnnnnnnnnnnnnnnnnnnnnnnnnnnnnnnnnnnnnnnnnnnnnnnnnnnnnnnnnnnnnnnnnnnnnnnnnnnnnnnnnnnnnnnnnnnnnnnnnnnnnnnnnnnnnnnnnnnnnnnnnnnnnnnnnnnnnnnnnnnnnnnnnnnnnnnnnnnnnnnnnnnnnnnnnnnnnnnnnnnnnnnnnnnnnnnnnnnnnnnnnnnnnnnnnnnnnnnnnnnnnnnnnnnnnnnnnnnnnnnnnnnnnnnnnnnnnnnnnnnnnnnnnnnnnnnnnnnnnnnnnnnnnnnnnnnnnnnnnnnnnnnnnnnnnnnnnnnnnnnnnnnnnnnnnnnnnnnnnnnnnnnnnnnnnnnnnnnnnnnnnnnnnnnnnnnnnnnnnnnnnnnnnnnnnnnnnnnnnnnnnnnnnnnnnnnnnnnnnnnnnnnnnnnnnnnnnnnnnnnnnnnnnnnnnnnnnnnnnnnnnnnnnnnnnnnnnnnnnnnnnnnnnnnnnnnnnnnnnnnnnnnnnnnnnnnnnnnnnnnnnnnnnnnnnnnnnnnnnnnnnnnnnnnnnnnnnnnnnnnnnnnnnnnnnnnnnnnnnnnnnnnnnnnnnnnnnnnnnnnnnnnnnnnnnnnnnnnnnnnnnnnnnnnnnnnnnnnnnnnnnnnnnnnnnnnnnnnnnnnnnnnnnnnnnnnnnnnnnnnnnnnnnnnnnnnnnnnnnnnnnnnnnnnnnnnnnnnnnnnnnnnnnnnnnnnnnnnnnnnnnnnnnnnnnnnnnnnnnnnnnnnnnnnnnnnnnnnnnnnnnnnnnnnnnnnnnnnnnnnnnnnnnnnnnnnnnnnnnnnnnnnnnnnnnnnnnnnnnnnnnnnnnnnnnnnnnnnnnnnnnnnnnnnnnnnnnnnnnnnnnnnnnnnnnnnnnnnnnnnnnnnnnnnnnnnnnnnnnnnnnnnnnnnnnnnnnnnnnnnnnnnnnnnnnnnnnnnnnnnnnnnnnnnnnnnnnnnnnnnnnnnnnnnnnnnnnnnnnnnnnnnnnnnnnnnnnnnnnnnnnnnnnnnnnnnnnnnnnnnnnnnnnnnnnnnnnnnnnnnnnnnnnnnnnnnnnnnnnnnnnnnnnnnnnnnnnnnnnnnnnnnnnnnnnnnnnnnnnnnnnnnnnnnnnnnnnnnnnnnnnnnnnnnnnnnnnnnnnnnnnnnnnnnnnnnnnnnnnnnnnnnnnnnnnnnnnnnnnnnnnnnnnnnnnnnnnnnnnnnnnnnnnnnnnnnnnnnnnnnnnnnnnnnnnnnnnnnnnnnnnnnnnnnnnnnnnnnnnnnnnnnnnnnnnnnnnnnnnnnnnnnnnnnnnnnnnnnnnnnnnnnnnnnnnnnnnnnnnnnnnnnnnnnnnnnnnnnnnnnnnnnnnnnnnnnnnnnnnnnnnnnnnnnnnnnnnnnnnnnnnnnnnnnnnnnnnnnnnnnnnnnnnnnnnnnnnnnnnnnnnnnnnnnnnnnnnnnnnnnnnnnnnnnnnnnnnnnnnnnnnnnnnnnnnnnnnnnnnnnnnnnnnnnnnnnnnnnnnnnnnnnnnnnnnnnnnnnnnnnnnnnnnnnnnnnnnnnnnnnnnnnnnnnnnnnnnnnnnnnnnnnnnnnnnnnnnnnnnnnnnnnnnnnnnnnnnnnnnnnnnnnnnnnnnnnnnnnnnnnnnnnnnnnnnnnnnnnnnnnnnnnnnnnnnnnnnnnnnnnnnnnnnnnnnnnnnnnnnnnnnnnnnnnnnnnnnnnnnnnnnnnnnnnnnnnnnnnnnnnnnnnnnnnnnnnnnnnnnnnnnnnnnnnnnnnnnnnnnnnnnnnnnnnnnnnnnnnnnnnnnnnnnnnnnnnnnnnnnnnnnnnnnnnnnnnnnnnnnnnnnnnnnnnnnnnnnnnnnnnnnnnnnnnnnnnnnnnnnnnnnnnnnnnnnnnnnnnnnnnnnnnnnnnnnnnnnnnnnnnnnnnnnnnnnnnnnnnnnnnnnnnnnnnnnnnnnnnnnnnnnnnnnnnnnnnnnnnnnnnnnnnnnnnnnnnnnnnnnnnnnnnnnnnnnnnnnnnnnnnnnnnnnnnnnnnnnnnnnnnnnnnnnnnnnnnnnnnnnnnnnnnnnnnnnnnnnnnnnnnnnnnnnnnnnnnnnnnnnnnnnnnnnnnnnnnnnnnnnnnnnnnnnnnnnnnnnnnnnnnnnnnnnnnnnnnnnnnnnnnnnnnnnnnnnnnnnnnnnnnnnnnnnnnnnnnnnnnnnnnnnnnnnnnnnnnnnnnnnnnnnnnnnnnnnnnnnnnnnnnnnnnnnnnnnnnnnnnnnnnnnnnnnnnnnnnnnnnnnnnnnnnnnnnnnnnnnnnnnnnnnnnnnnnnnnnnnnnnnnnnnnnnnnnnnnnnnnnnnnnnnnnnnnnnnnnnnnnnnnnnnnnnnnnnnnnnnnnnnnnnnnnnnnnnnnnnnnnnnnnnnnnnnnnnnnnnnnnnnnnnnnnnnnnnnnnnnnnnnnnnnnnnnnnnnnnnnnnnnnnnnnnnnnnnnnnnnnnnnnnnnnnnnnnnnnnnnnnnnnnnnnnnnnnnnnnnnnnnnnnnnnnnnnnnnnnnnnnnnnnnnnnnnnnnnnnnnnnnnnnnnnnnnnnnnnnnnnnnnnnnnnnnnnnnnnnnnnnnnnnnnnnnnnnnnnnnnnnnnnnnnnnnnnnnnnnnnnnnnnnnnnnnnnnnnnnnnnnnnnnnnnnnnnnnnnnnnnnnnnnnnnnnnnnnnnnnnnnnnnnnnnnnnnnnnnnnnnnnnnnnnnnnnnnnnnnnnnnnnnnnnnnnnnnnnnnnnnnnnnnnnnnnnnnnnnnnnnnnnnnnnnnnnnnnnnnnnnnnnnnnnnnnnnnnnnnnnnnnnnnnnnnnnnnnnnnnnnnnnnnnnnnnnnnnnnnnnnnnnnnnnnnnnnnnnnnnnnnnnnnnnnnnnnnnnnnnnnnnnnnnnnnnnnnnnnnnnnnnnnnnnnnnnnnnnnnnnnnnnnnnnnnnnnnnnnnnnnnnnnnnnnnnnnnnnnnnnnnnnnnnnnnnnnnnnnnnnnnnnnnnnnnnnnnnnnnnnnnnnnnnnnnnnnnnnnnnnnnnnnnnnnnnnnnnnnnnnnnnnnnnnnnnnnnnnnnnnnnnnnnnnnnnnnnnnnnnnnnnnnnnnnnnnnnnnnnnnnnnnnnnnnnnnnnnnnnnnnnnnnnnnnnnnnnnnnnnnnnnnnnnnnnnnnnnnnnnnnnnnnnnnnnnnnnnnnnnnnnnnnnnnnnnnnnnnnnnnnnnnnnnnnnnnnnnnnnnnnnnnnnnnnnnnnnnnnnnnnnnnnnnnnnnnnnnnnnnnnnnnnnnnnnnnnnnnnnnnnnnnnnnnnnnnnnnnnnnnnnnnnnnnnnnnnnnnnnnnnnnnnnnnnnnnnnnnnnnnnnnnnnnnnnnnnnnnnnnnnnnnnnnnnnnnnnnnnnnnnnnnnnnnnnnnnnnnnnnnnnnnnnnnnnnnnnnnnnnnnnnnnnnnnnnnnnnnnnnnnnnnnnnnnnnnnnnnnnnnnnnnnnnnnnnnnnnnnnnnnnnnnnnnnnnnnnnnnnnnnnnnnnnnnnnnnnnnnnnnnnnnnnnnnnnnnnnnnnnnnnnnnnnnnnnnnnnnnnnnnnnnnnnnnnnnnnnnnnnnnnnnnnnnnnnnnnnnnnnnnnnnnnnnnnnnnnnnnnnnnnnnnnnnnnnnnnnnnnnnnnnnnnnnnnnnnnnnnnnnnnnnnnnnnnnnnnnnnnnnnnnnnnnnnnnnnnnnnnnnnnnnnnnnnnnnnnnnnnnnnnnnnnnnnnnnnnnnnnnnnnnnnnnnnnnnnnnnnnnnnnnnnnnnnnnnnnnnnnnnnnnnnnnnnnnnnnnnnnnnnnnnnnnnnnnnnnnnnnnnnnnnnnnnnnnnnnnnnnnnnnnnnnnnnnnnnnnnnnnnnnnnnnnnnnnnnnnnnnnnnnnnnnnnnnnnnnnnnnnnnnnnnnnnnnnnnnnnnnnnnnnnnnnnnnnnnnnnnnnnnnnnnnnnnnnnnnnnnnnnnnnnnnnnnnnnnnnnnnnnnnnnnnnnnnnnnnnnnnnnnnnnnnnnnnnnnnnnnnnnnnnnnnnnnnnnnnnnnnnnnnnnnnnnnnnnnnnnnnnnnnnnnnnnnnnnnnnnnnnnnnnnnnnnnnnnnnnnnnnnnnnnnnnnnnnnnnnnnnnnnnnnnnnnnnnnnnnnnnnnnnnnnnnnnnnnnnnnnnnnnnnnnnnnnnnnnnnnnnnnnnnnnnnnnnnnnnnnnnnnnnnnnnnnnnnnnnnnnnnnnnnnnnnnnnnnnnnnnnnnnnnnnnnnnnnnnnnnnnnnnnnnnnnnnnnnnnnnnnnnnnnnnnnnnnnnnnnnnnnnnnnnnnnnnnnnnnnnnnnnnnnnnnnnnnnnnnnnnnnnnnnnnnnnnnnnnnnnnnnnnnnnnnnnnnnnnnnnnnnnnnnnnnnnnnnnnnnnnnnnnnnnnnnnnnnnnnnnnnnnnnnnnnnnnnnnnnnnnnnnnnnnnnnnnnnnnnnnnnnnnnnnnnnnnnnnnnnnnnnnnnnnnnnnnnnnnnnnnnnnnnnnnnnnnnnnnnnnnnnnnnnnnnnnnnnnnnnnnnnnnnnnnnnnnnnnnnnnnnnnnnnnnnnnnnnnnnnnnnnnnnnnnnnnnnnnnnnnnnnnnnnnnnnnnnnnnnnnnnnnnnnnnnnnnnnnnnnnnnnnnnnnnnnnnnnnnnnnnnnnnnnnnnnnnnnnnnnnnnnnnnnnnnnnnnnnnnnnnnnnnnnnnnnnnnnnnnnnnnnnnnnnnnnnnnnnnnnnnnnnnnnnnnnnnnnnnnnnnnnnnnnnnnnnnnnnnnnnnnnnnnnnnnnnnnnnnnnnnnnnnnnnnnnnnnnnnnnnnnnnnnnnnnnnnnnnnnnnnnnnnnnnnnnnnnnnnnnnnnnnnnnnnnnnnnnnnnnnnnnnnnnnnnnnnnnnnnnnnnnnnnnnnnnnnnnnnnnnnnnnnnnnnnnnnnnnnnnnnnnnnnnnnnnnnnnnnnnnnnnnnnnnnnnnnnnnnnnnnnnnnnnnnnnnnnnnnnnnnnnnnnnnnnnnnnnnnnnnnnnnnnnnnnnnnnnnnnnnnnnnnnnnnnnnnnnnnnnnnnnnnnnnnnnnnnnnnnnnnnnnnnnnnnnnnnnnnnnnnnnnnnnnnnnnnnnnnnnnnnnnnnnnnnnnnnnnnnnnnnnnnnnnnnnnnnnnnnnnnnnnnnnnnnnnnnnnnnnnnnnnnnnnnnnnnnnnnnnnnnnnnnnnnnnnnnnnnnnnnnnnnnnnnnnnnnnnnnnnnnnnnnnnnnnnnnnnnnnnnnnnnnnnnnnnnnnnnnnnnnnnnnnnnnnnnnnnnnnnnnnnnnnnnnnnnnnnnnnnnnnnnnnnnnnnnnnnnnnnnnnnnnnnnnnnnnnnnnnnnnnnnnnnnnnnnnnnnnnnnnnnnnnnnnnnnnnnnnnnnnnnnnnnnnnnnnnnnnnnnnnnnnnnnnnnnnnnnnnnnnnnnnnnnnnnnnnnnnnnnnnnnnnnnnnnnnnnnnnnnnnnnnnnnnnnnnnnnnnnnnnnnnnnnnnnnnnnnnnnnnnnnnnnnnnnnnnnnnnnnnnnnnnnnnnnnnnnnnnnnnnnnnnnnnnnnnnnnnnnnnnnnnnnnnnnnnnnnnnnnnnnnnnnnnnnnnnnnnnnnnnnnnnnnnnnnnnnnnnnnnnnnnnnnnnnnnnnnnnnnnnnnnnnnnnnnnnnnnnnnnnnnnnnnnnnnnnnnnnnnnnnnnnnnnnnnnnnnnnnnnnnnnnnnnnnnnnnnnnnnnnnnnnnnnnnnnnnnnnnnnnnnnnnnnnnnnnnnnnnnnnnnnnnnnnnnnnnnnnnnnnnnnnnnnnnnnnnnnnnnnnnnnnnnnnnnnnnnnnnnnnnnnnnnnnnnnnnnnnnnnnnnnnnnnnnnnnnnnnnnnnnnnnnnnnnnnnnnnnnnnnnnnnnnnnnnnnnnnnnnnnnnnnnnnnnnnnnnnnnnnnnnnnnnnnnnnnnnnnnnnnnnnnnnnnnnnnnnnnnnnnnnnnnnnnnnnnnnnnnnnnnnnnnnnnnnnnnnnnnnnnnnnnnnnnnnnnnnnnnnnnnnnnnnnnnnnnnnnnnnnnnnnnnnnnnnnnnnnnnnnnnnnnnnnnnnnnnnnnnnnnnnnnnnnnnnnnnnnnnnnnnnnnnnnnnnnnnnnnnnnnnnnnnnnnnnnnnnnnnnnnnnnnnnnnnnnnnnnnnnnnnnnnnnnnnnnnnnnnnnnnnnnnnnnnnnnnnnnnnnnnnnnnnnnnnnnnnnnnnnnnnnnnnnnnnnnnnnnnnnnnnnnnnnnnnnnnnnnnnnnnnnnnnnnnnnnnnnnnnnnnnnnnnnnnnnnnnnnnnnnnnnnnnnnnnnnnnnnnnnnnnnnnnnnnnnnnnnnnnnnnnnnnnnnnnnnnnnnnnnnnnnnnnnnnnnnnnnnnnnnnnnnnnnnnnnnnnnnnnnnnnnnnnnnnnnnnnnnnnnnnnnnnnnnnnnnnnnnnnnnnnnnnnnnnnnnnnnnnnnnnnnnnnnnnnnnnnnnnnnnnnnnnnnnnnnnnnnnnnnnnnnnnnnnnnnnnnnnnnnnnnnnnnnnnnnnnnnnnnnnnnnnnnnnnnnnnnnnnnnnnnnnnnnnnnnnnnnnnnnnnnnnnnnnnnnnnnnnnnnnnnnnnnnnnnnnnnnnnnnnnnnnnnnnnnnnnnnnnnnnnnnnnnnnnnnnnnnnnnnnnnnnnnnnnnnnnnnnnnnnnnnnnnnnnnnnnnnnnnnnnnnnnnnnnnnnnnnnnnnnnnnnnnnnnnnnnnnnnnnnnnnnnnnnnnnnnnnnnnnnnnnnnnnnnnnnnnnnnnnnnnnnnnnnnnnnnnnnnnnnnnnnnnnnnnnnnnnnnnnnnnnnnnnnnnnnnnnnnnnnnnnnnnnnnnnnnnnnnnnnnnnnnnnnnnnnnnnnnnnnnnnnnnnnnnnnnnnnnnnnnnnnnnnnnnnnnnnnnnnnnnnnnnnnnnnnnnnnnnnnnnnnnnnnnnnnnnnnnnnnnnnnnnnnnnnnnnnnnnnnnnnnnnnnnnnnnnnnnnnnnnnnnnnnnnnnnnnnnnnnnnnnnnnnnnnnnnnnnnnnnnnnnnnnnnnnnnnnnnnnnnnnnnnnnnnnnnnnnnnnnnnnnnnnnnnnnnnnnnnnnnnnnnnnnnnnnnnnnnnnnnnnnnnnnnnnnnnnnnnnnnnnnnnnnnnnnnnnnnnnnnnnnnnnnnnnnnnnnnnnnnnnnnnnnnnnnnnnnnnnnnnnnnnnnnnnnnnnnnnnnnnnnnnnnnnnnnnnnnnnnnnnnnnnnnnnnnnnnnnnnnnnnnnnnnnnnnnnnnnnnnnnnnnnnnnnnnnnnnnnnnnnnnnnnnnnnnnnnnnnnnnnnnnnnnnnnnnnnnnnnnnnnnnnnnnnnnnnnnnnnnnnnnnnnnnnnnnnnnnnnnnnnnnnnnnnnnnnnnnnnnnnnnnnnnnnnnnnnnnnnnnnnnnnnnnnnnnnnnnnnnnnnnnnnnnnnnnnnnnnnnnnnnnnnnnnnnnnnnnnnnnnnnnnnnnnnnnnnnnnnnnnnnnnnnnnnnnnnnnnnnnnnnnnnnnnnnnnnnnnnnnnnnnnnnnnnnnnnnnnnnnnnnnnnnnnnnnnnnnnnnnnnnnnnnnnnnnnnnnnnnnnnnnnnnnnnnnnnnnnnnnnnnnnnnnnnnnnnnnnnnnnnnnnnnnnnnnnnnnnnnnnnnnnnnnnnnnnnnnnnnnnnnnnnnnnnnnnnnnnnnnnnnnnnnnnnnnnnnnnnnnnnnnnnnnnnnnnnnnnnnnnnnnnnnnnnnnnnnnnnnnnnnnnnnnnnnnnnnnnnnnnnnnnnnnnnnnnnnnnnnnnnnnnnnnnnnnnnnnnnnnnnnnnnnnnnnnnnnnnnnnnnnnnnnnnnnnnnnnnnnnnnnnnnnnnnnnnnnnnnnnnnnnnnnnnnnnnnnnnnnnnnnnnnnnnnnnnnnnnnnnnnnnnnnnnnnnnnnnnnnnnnnnnnnnnnnnnnnnnnnnnnnnnnnnnnnnnnnnnnnnnnnnnnnnnnnnnnnnnnnnnnnnnnnnnnnnnnnnnnnnnnnnnnnnnnnnnnnnnnnnnnnnnnnnnnnnnnnnnnnnnnnnnnnnnnnnnnnnnnnnnnnnnnnnnnnnnnnnnnnnnnnnnnnnnnnnnnnnnnnnnnnnnnnnnnnnnnnnnnnnnnnnnnnnnnnnnnnnnnnnnnnnnnnnnnnnnnnnnnnnnnnnnnnnnnnnnnnnnnnnnnnnnnnnnnnnnnnnnnnnnnnnnnnnnnnnnnnnnnnnnnnnnnnnnnnnnnnnnnnnnnnnnnnnnnnnnnnnnnnnnnnnnnnnnnnnnnnnnnnnnnnnnnnnnnnnnnnnnnnnnnnnnnnnnnnnnnnnnnnnnnnnnnnnnnnnnnnnnnnnnnnnnnnnnnnnnnnnnnnnnnnnnnnnnnnnnnnnnnnnnnnnnnnnnnnnnnnnnnnnnnnnnnnnnnnnnnnnnnnnnnnnnnnnnnnnnnnnnnnnnnnnnnnnnnnnnnnnnnnnnnnnnnnnnnnnnnnnnnnnnnnnnnnnnnnnnnnnnnnnnnnnnnnnnnnnnnnnnnnnnnnnnnnnnnnnnnnnnnnnnnnnnnnnnnnnnnnnnnnnnnnnnnnnnnnnnnnnnnnnnnnnnnnnnnnnnnnnnnnnnnnnnnnnnnnnnnnnnnnnnnnnnnnnnnnnnnnnnnnnnnnnnnnnnnnnnnnnnnnnnnnnnnnnnnnnnnnnnnnnnnnnnnnnnnnnnnnnnnnnnnnnnnnnnnnnnnnnnnnnnnnnnnnnnnnnnnnnnnnnnnnnnnnnnnnnnnnnnnnnnnnnnnnnnnnnnnnnnnnnnnnnnnnnnnnnnnnnnnnnnnnnnnnnnnnnnnnnnnnnnnnnnnnnnnnnnnnnnnnnnnnnnnnnnnnnnnnnnnnnnnnnnnnnnnnnnnnnnnnnnnnnnnnnnnnnnnnnnnnnnnnnnnnnnnnnnnnnnnnnnnnnnnnnnnnnnnnnnnnnnnnnnnnnnnnnnnnnnnnnnnnnnnnnnnnnnnnnnnnnnnnnnnnnnnnnnnnnnnnnnnnnnnnnnnnnnnnnnnnnnnnnnnnnnnnnnnnnnnnnnnnnnnnnnnnnnnnnnnnnnnnnnnnnnnnnnnnnnnnnnnnnnnnnnnnnnnnnnnnnnnnnnnnnnnnnnnnnnnnnnnnnnnnnnnnnnnnnnnnnnnnnnnnnnnnnnnnnnnnnnnnnnnnnnnnnnnnnnnnnnnnnnnnnnnnnnnnnnnnnnnnnnnnnnnnnnnnnnnnnnnnnnnnnnnnnnnnnnnnnnnnnnnnnnnnnnnnnnnnnnnnnnnnnnnnnnnnnnnnnnnnnnnnnnnnnnnnnnnnnnnnnnnnnnnnnnnnnnnnnnnnnnnnnnnnnnnnnnnnnnnnnnnnnnnnnnnnnnnnnnnnnnnnnnnnnnnnnnnnnnnnnnnnnnnnnnnnnnnnnnnnnnnnnnnnnnnnnnnnnnnnnnnnnnnnnnnnnnnnnnnnnnnnnnnnnnnnnnnnnnnnnnnnnnnnnnnnnnnnnnnnnnnnnnnnnnnnnnnnnnnnnnnnnnnnnnnnnnnnnnnnnnnnnnnnnnnnnnnnnnnnnnnnnnnnnnnnnnnnnnnnnnnnnnnnnnnnnnnnnnnnnnnnnnnnnnnnnnnnnnnnnnnnnnnnnnnnnnnnnnnnnnnnnnnnnnnnnnnnnnnnnnnnnnnnnnnnnnnnnnnnnnnnnnnnnnnnnnnnnnnnnnnnnnnnnnnnnnnnnnnnnnnnnnnnnnnnnnnnnnnnnnnnnnnnnnnnnnnnnnnnnnnnnnnnnnnnnnnnnnnnnnnnnnnnnnnnnnnnnnnnnnnnnnnnnnnnnnnnnnnnnnnnnnnnnnnnnnnnnnnnnnnnnnnnnnnnnnnnnnnnnnnnnnnnnnnnnnnnnnnnnnnnnnnnnnnnnnnnnnnnnnnnnnnnnnnnnnnnnnnnnnnnnnnnnnnnnnnnnnnnnnnnnnnnnnnnnnnnnnnnnnnnnnnnnnnnnnnnnnnnnnnnnnnnnnnnnnnnnnnnnnnnnnnnnnnnnnnnnnnnnnnnnnnnnnnnnnnnnnnnnnnnnnnnnnnnnnnnnnnnnnnnnnnnnnnnnnnnnnnnnnnnnnnnnnnnnnnnnnnnnnnnnnnnnnnnnnnnnnnnnnnnnnnnnnnnnnnnnnnnnnnnnnnnnnnnnnnnnnnnnnnnnnnnnnnnnnnnnnnnnnnnnnnnnnnnnnnnnnnnnnnnnnnnnnnnnnnnnnnnnnnnnnnnnnnnnnnnnnnnnnnnnnnnnnnnnnnnnnnnnnnnnnnnnnnnnnnnnnnnnnnnnnnnnnnnnnnnnnnnnnnnnnnnnnnnnnnnnnnnnnnnnnnnnnnnnnnnnnnnnnnnnnnnnnnnnnnnnnnnnnnnnnnnnnnnnnnnnnnnnnnnnnnnnnnnnnnnnnnnnnnnnnnnnnnnnnnnnnnnnnnnnnnnnnnnnnnnnnnnnnnnnnnnnnnnnnnnnnnnnnnnnnnnnnnnnnnnnnnnnnnnnnnnnnnnnnnnnnnnnnnnnnnnnnnnnnnnnnnnnnnnnnnnnnnnnnnnnnnnnnnnnnnnnnnnnnnnnnnnnnnnnnnnnnnnnnnnnnnnnnnnnnnnnnnnnnnnnnnnnnnnnnnnnnnnnnnnnnnnnnnnnnnnnnnnnnnnnnnnnnnnnnnnnnnnnnnnnnnnnnnnnnnnnnnnnnnnnnnnnnnnnnnnnnnnnnnnnnnnnnnnnnnnnnnnnnnnnnnnnnnnnnnnnnnnnnnnnnnnnnnnnnnnnnnnnnnnnnnnnnnnnnnnnnnnnnnnnnnnnnnnnnnnnnnnnnnnnnnnnnnnnnnnnnnnnnnnnnnnnnnnnnnnnnnnnnnnnnnnnnnnnnnnnnnnnnnnnnnnnnnnnnnnnnnnnnnnnnnnnnnnnnnnnnnnnnnnnnnnnnnnnnnnnnnnnnnnnnnnnnnnnnnnnnnnnnnnnnnnnnnnnnnnnnnnnnnnnnnnnnnnnnnnnnnnnnnnnnnnnnnnnnnnnnnnnnnnnnnnnnnnnnnnnnnnnnnnnnnnnnnnnnnnnnnnnnnnnnnnnnnnnnnnnnnnnnnnnnnnnnnnnnnnnnnnnnnnnnnnnnnnnnnnnnnnnnnnnnnnnnnnnnnnnnnnnnnnnnnnnnnnnnnnnnnnnnnnnnnnnnnnnnnnnnnnnnnnnnnnnnnnnnnnnnnnnnnnnnnnnnnnnnnnnnnnnnnnnnnnnnnnnnnnnnnnnnnnnnnnnnnnnnnnnnnnnnnnnnnnnnnnnnnnnnnnnnnnnnnnnnnnnnnnnnnnnnnnnnnnnnnnnnnnnnnnnnnnnnnnnnnnnnnnnnnnnnnnnnnnnnnnnnnnnnnnnnnnnnnnnnnnnnnnnnnnnnnnnnnnnnnnnnnnnnnnnnnnnnnnnnnnnnnnnnnnnnnnnnnnnnnnnnnnnnnnnnnnnnnnnnnnnnnnnnnnnnnnnnnnnnnnnnnnnnnnnnnnnnnnnnnnnnnnnnnnnnnnnnnnnnnnnnnnnnnnnnnnnnnnnnnnnnnnnnnnnnnnnnnnnnnnnnnnnnnnnnnnnnnnnnnnnnnnnnnnnnnnnnnnnnnnnnnnnnnnnnnnnnnnnnnnnnnnnnnnnnnnnnnnnnnnnnnnnnnnnnnnnnnnnnnnnnnnnnnnnnnnnnnnnnnnnnnnnnnnnnnnnnnnnnnnnnnnnnnnnnnnnnnnnnnnnnnnnnnnnnnnnnnnnnnnnnnnnnnnnnnnnnnnnnnnnnnnnnnnnnnnnnnnnnnnnnnnnnnnnnnnnnnnnnnnnnnnnnnnnnnnnnnnnnnnnnnnnnnnnnnnnnnnnnnnnnnnnnnnnnnnnnnnnnnnnnnnnnnnnnnnnnnnnnnnnnnnnnnnnnnnnnnnnnnnnnnnnnnnnnnnnnnnnnnnnnnnnnnnnnnnnnnnnnnnnnnnnnnnnnnnnnnnnnnnnnnnnnnnnnnnnnnnnnnnnnnnnnnnnnnnnnnnnnnnnnnnnnnnnnnnnnnnnnnnnnnnnnnnnnnnnnnnnnnnnnnnnnnnnnnnnnnnnnnnnnnnnnnnnnnnnnnnnnnnnnnnnnnnnnnnnnnnnnnnnnnnnnnnnnnnnnnnnnnnnnnnnnnnnnnnnnnnnnnnnnnnnnnnnnnnnnnnnnnnnnnnnnnnnnnnnnnnnnnnnnnnnnnnnnnnnnnnnnnnnnnnnnnnnnnnnnnnnnnnnnnnnnnnnnnnnnnnnnnnnnnnnnnnnnnnnnnnnnnnnnnnnnnnnnnnnnnnnnnnnnnnnnnnnnnnnnnnnnnnnnnnnnnnnnnnnnnnnnnnnnnnnnnnnnnnnnnnnnnnnnnnnnnnnnnnnnnnnnnnnnnnnnnnnnnnnnnnnnnnnnnnnnnnnnnnnnnnnnnnnnnnnnnnnnnnnnnnnnnnnnnnnnnnnnnnnnnnnnnnnnnnnnnnnnnnnnnnnnnnnnnnnnnnnnnnnnnnnnnnnnnnnnnnnnnnnnnnnnnnnnnnnnnnnnnnnnnnnnnnnnnnnnnnnnnnnnnnnnnnnnnnnnnnnnnnnnnnnnnnnnnnnnnnnnnnnnnnnnnnnnnnnnnnnnnnnnnnnnnnnnnnnnnnnnnnnnnnnnnnnnnnnnnnnnnnnnnnnnnnnnnnnnnnnnnnnnnnnnnnnnnnnnnnnnnnnnnnnnnnnnnnnnnnnnnnnnnnnnnnnnnnnnnnnnnnnnnnnnnnnnnnnnnnnnnnnnnnnnnnnnnnnnnnnnnnnnnnnnnnnnnnnnnnnnnnnnnnnnnnnnnnnnnnnnnnnnnnnnnnnnnnnnnnnnnnnnnnnnnnnnnnnnnnnnnnnnnnnnnnnnnnnnnnnnnnnnnnnnnnnnnnnnnnnnnnnnnnnnnnnnnnnnnnnnnnnnnnnnnnnnnnnnnnnnnnnnnnnnnnnnnnnnnnnnnnnnnnnnnnnnnnnnnnnnnnnnnnnnnnnnnnnnnnnnnnnnnnnnnnnnnnnnnnnnnnnnnnnnnnnnnnnnnnnnnnnnnnnnnnnnnnnnnnnnnnnnnnnnnnnnnnnnnnnnnnnnnnnnnnnnnnnnnnnnnnnnnnnnnnnnnnnnnnnnnnnnnnnnnnnnnnnnnnnnnnnnnnnnnnnnnnnnnnnnnnnnnnnnnnnnnnnnnnnnnnnnnnnnnnnnnnnnnnnnnnnnnnnnnnnnnnnnnnnnnnnnnnnnnnnnnnnnnnnnnnnnnnnnnnnnnnnnnnnnnnnnnnnnnnnnnnnnnnnnnnnnnnnnnnnnnnnnnnnnnnnnnnnnnnnnnnnnnnnnnnnnnnnnnnnnnnnnnnnnnnnnnnnnnnnnnnnnnnnnnnnnnnnnnnnnnnnnnnnnnnnnnnnnnnnnnnnnnnnnnnnnnnnnnnnnnnnnnnnnnnnnnnnnnnnnnnnnnnnnnnnnnnnnnnnnnnnnnnnnnnnnnnnnnnnnnnnnnnnnnnnnnnnnnnnnnnnnnnnnnnnnnnnnnnnnnnnnnnnnnnnnnnnnnnnnnnnnnnnnnnnnnnnnnnnnnnnnnnnnnnnnnnnnnnnnnnnnnnnnnnnnnnnnnnnnnnnnnnnnnnnnnnnnnnnnnnnnnnnnnnnnnnnnnnnnnnnnnnnnnnnnnnnnnnnnnnnnnnnnnnnnnnnnnnnnnnnnnnnnnnnnnnnnnnnnnnnnnnnnnnnnnnnnnnnnnnnnnnnnnnnnnnnnnnnnnnnnnnnnnnnnnnnnnnnnnnnnnnnnnnnnnnnnnnnnnnnnnnnnnnnnnnnnnnnnnnnnnnnnnnnnnnnnnnnnnnnnnnnnnnnnnnnnnnnnnnnnnnnnnnnnnnnnnnnnnnnnnnnnnnnnnnnnnnnnnnnnnnnnnnnnnnnnnnnnnnnnnnnnnnnnnnnnnnnnnnnnnnnnnnnnnnnnnnnnnnnnnnnnnnnnnnnnnnnnnnnnnnnnnnnnnnnnnnnnnnnnnnnnnnnnnnnnnnnnnnnnnnnnnnnnnnnnnnnnnnnnnnnnnnnnnnnnnnnnnnnnnnnnnnnnnnnnnnnnnnnnnnnnnnnnnnnnnnnnnnnnnnnnnnnnnnnnnnnnnnnnnnnnnnnnnnnnnnnnnnnnnnnnnnnnnnnnnnnnnnnnnnnnnnnnnnnnnnnnnnnnnnnnnnnnnnnnnnnnnnnnnnnnnnnnnnnnnnnnnnnnnnnnnnnnnnnnnnnnnnnnnnnnnnnnnnnnnnnnnnnnnnnnnnnnnnnnnnnnnnnnnnnnnnnnnnnnnnnnnnnnnnnnnnnnnnnnnnnnnnnnnnnnnnnnnnnnnnnnnnnnnnnnnnnnnnnnnnnnnnnnnnnnnnnnnnnnnnnnnnnnnnnnnnnnnnnnnnnnnnnnnnnnnnnnnnnnnnnnnnnnnnnnnnnnnnnnnnnnnnnnnnnnnnnnnnnnnnnnnnnnnnnnnnnnnnnnnnnnnnnnnnnnnnnnnnnnnnnnnnnnnnnnnnnnnnnnnnnnnnnnnnnnnnnnnnnnnnnnnnnnnnnnnnnnnnnnnnnnnnnnnnnnnnnnnnnnnnnnnnnnnnnnnnnnnnnnnnnnnnnnnnnnnnnnnnnnnnnnnnnnnnnnnnnnnnnnnnnnnnnnnnnnnnnnnnnnnnnnnnnnnnnnnnnnnnnnnnnnnnnnnnnnnnnnnnnnnnnnnnnnnnnnnnnnnnnnnnnnnnnnnnnnnnnnnnnnnnnnnnnnnnnnnnnnnnnnnnnnnnnnnnnnnnnnnnnnnnnnnnnnnnnnnnnnnnnnnnnnnnnnnnnnnnnnnnnnnnnnnnnnnnnnnnnnnnnnnnnnnnnnnnnnnnnnnnnnnnnnnnnnnnnnnnnnnnnnnnnnnnnnnnnnnnnnnnnnnnnnnnnnnnnnnnnnnnnnnnnnnnnnnnnnnnnnnnnnnnnnnnnnnnnnnnnnnnnnnnnnnnnnnnnnnnnnnnnnnnnnnnnnnnnnnnnnnnnnnnnnnnnnnnnnnnnnnnnnnnnnnnnnnnnnnnnnnnnnnnnnnnnnnnnnnnnnnnnnnnnnnnnnnnnnnnnnnnnnnnnnnnnnnnnnnnnnnnnnnnnnnnnnnnnnnnnnnnnnnnnnnnnnnnnnnnnnnnnnnnnnnnnnnnnnnnnnnnnnnnnnnnnnnnnnnnnnnnnnnnnnnnnnnnnnnnnnnnnnnnnnnnnnnnnnnnnnnnnnnnnnnnnnnnnnnnnnnnnnnnnnnnnnnnnnnnnnnnnnnnnnnnnnnnnnnnnnnnnnnnnnnnnnnnnnnnnnnnnnnnnnnnnnnnnnnnnnnnnnnnnnnnnnnnnnnnnnnnnnnnnnnnnnnnnnnnnnnnnnnnnnnnnnnnnnnnnnnnnnnnnnnnnnnnnnnnnnnnnnnnnnnnnnnnnnnnnnnnnnnnnnnnnnnnnnnnnnnnnnnnnnnnnnnnnnnnnnnnnnnnnnnnnnnnnnnnnnnnnnnnnnnnnnnnnnnnnnnnnnnnnnnnnnnnnnnnnnnnnnnnnnnnnnnnnnnnnnnnnnnnnnnnnnnnnnnnnnnnnnnnnnnnnnnnnnnnnnnnnnnnnnnnnnnnnnnnnnnnnnnnnnnnnnnnnnnnnnnnnnnnnnnnnnnnnnnnnnnnnnnnnnnnnnnnnnnnnnnnnnnnnnnnnnnnnnnnnnnnnnnnnnnnnnnnnnnnnnnnnnnnnnnnnnnnnnnnnnnnnnnnnnnnnnnnnnnnnnnnnnnnnnnnnnnnnnnnnnnnnnnnnnnnnnnnnnnnnnnnnnnnnnnnnnnnnnnnnnnnnnnnnnnnnnnnnnnnnnnnnnnnnnnnnnnnnnnnnnnnnnnnnnnnnnnnnnnnnnnnnnnnnnnnnnnnnnnnnnnnnnnnnnnnnnnnnnnnnnnnnnnnnnnnnnnnnnnnnnnnnnnnnnnnnnnnnnnnnnnnnnnnnnnnnnnnnnnnnnnnnnnnnnnnnnnnnnnnnnnnnnnnnnnnnnnnnnnnnnnnnnnnnnnnnnnnnnnnnnnnnnnnnnnnnnnnnnnnnnnnnnnnnnnnnnnnnnnnnnnnnnnnnnnnnnnnnnnnnnnnnnnnnnnnnnnnnnnnnnnnnnnnnnnnnnnnnnnnnnnnnnnnnnnnnnnnnnnnnnnnnnnnnnnnnnnnnnnnnnnnnnnnnnnnnnnnnnnnnnnnnnnnnnnnnnnnnnnnnnnnnnnnnnnnnnnnnnnnnnnnnnnnnnnnnnnnnnnnnnnnnnnnnnnnnnnnnnnnnnnnnnnnnnnnnnnnnnnnnnnnnnnnnnnnnnnnnnnnnnnnnnnnnnnnnnnnnnnnnnnnnnnnnnnnnnnnnnnnnnnnnnnnnnnnnnnnnnnnnnnnnnnnnnnnnnnnnnnnnnnnnnnnnnnnnnnnnnnnnnnnnnnnnnnnnnnnnnnnnnnnnnnnnnnnnnnnnnnnnnnnnnnnnnnnnnnnnnnnnnnnnnnnnnnnnnnnnnnnnnnnnnnnnnnnnnnnnnnnnnnnnnnnnnnnnnnnnnnnnnnnnnnnnnnnnnnnnnnnnnnnnnnnnnnnnnnnnnnnnnnnnnnnnnnnnnnnnnnnnnnnnnnnnnnnnnnnnnnnnnnnnnnnnnnnnnnnnnnnnnnnnnnnnnnnnnnnnnnnnnnnnnnnnnnnnnnnnnnnnnnnnnnnnnnnnnnnnnnnnnnnnnnnnnnnnnnnnnnnnnnnnnnnnnnnnnnnnnnnnnnnnnnnnnnnnnnnnnnnnnnnnnnnnnnnnnnnnnnnnnnnnnnnnnnnnnnnnnnnnnnnnnnnnnnnnnnnnnnnnnnnnnnnnnnnnnnnnnnnnnnnnnnnnnnnnnnnnnnnnnnnnnnnnnnnnnnnnnnnnnnnnnnnnnnnnnnnnnnnnnnnnnnnnnnnnnnnnnnnnnnnnnnnnnnnnnnnnnnnnnnnnnnnnnnnnnnnnnnnnnnnnnnnnnnnnnnnnnnnnnnnnnnnnnnnnnnnnnnnnnnnnnnnnnnnnnnnnnnnnnnnnnnnnnnnnnnnnnnnnnnnnnnnnnnnnnnnnnnnnnnnnnnnnnnnnnnnnnnnnnnnnnnnnnnnnnnnnnnnnnnnnnnnnnnnnnnnnnnnnnnnnnnnnnnnnnnnnnnnnnnnnnnnnnnnnnnnnnnnnnnnnnnnnnnnnnnnnnnnnnnnnnnnnnnnnnnnnnnnnnnnnnnnnnnnnnnnnnnnnnnnnnnnnnnnnnnnnnnnnnnnnnnnnnnnnnnnnnnnnnnnnnnnnnnnnnnnnnnnnnnnnnnnnnnnnnnnnnnnnnnnnnnnnnnnnnnnnnnnnnnnnnnnnnnnnnnnnnnnnnnnnnnnnnnnnnnnnnnnnnnnnnnnnnnnnnnnnnnnnnnnnnnnnnnnnnnnnnnnnnnnnnnnnnnnnnnnnnnnnnnnnnnnnnnnnnnnnnnnnnnnnnnnnnnnnnnnnnnnnnnnnnnnnnnnnnnnnnnnnnnnnnnnnnnnnnnnnnnnnnnnnnnnnnnnnnnnnnnnnnnnnnnnnnnnnnnnnnnnnnnnnnnnnnnnnnnnnnnnnnnnnnnnnnnnnnnnnnnnnnnnnnnnnnnnnnnnnnnnnnnnnnnnnnnnnnnnnnnnnnnnnnnnnnnnnnnnnnnnnnnnnnnnnnnnnnnnnnnnnnnnnnnnnnnnnnnnnnnnnnnnnnnnnnnnnnnnnnnnnnnnnnnnnnnnnnnnnnnnnnnnnnnnnnnnnnnnnnnnnnnnnnnnnnnnnnnnnnnnnnnnnnnnnnnnnnnnnnnnnnnnnnnnnnnnnnnnnnnnnnnnnnnnnnnnnnnnnnnnnnnnnnnnnnnnnnnnnnnnnnnnnnnnnnnnnnnnnnnnnnnnnnnnnnnnnnnnnnnnnnnnnnnnnnnnnnnnnnnnnnnnnnnnnnnnnnnnnnnnnnnnnnnnnnnnnnnnnnnnnnnnnnnnnnnnnnnnnnnnnnnnnnnnnnnnnnnnnnnnnnnnnnnnnnnnnnnnnnnnnnnnnnnnnnnnnnnnnnnnnnnnnnnnnnnnnnnnnnnnnnnnnnnnnnnnnnnnnnnnnnnnnnnnnnnnnnnnnnnnnnnnnnnnnnnnnnnnnnnnnnnnnnnnnnnnnnnnnnnnnnnnnnnnnnnnnnnnnnnnnnnnnnnnnnnnnnnnnnnnnnnnnnnnnnnnnnnnnnnnnnnnnnnnnnnnnnnnnnnnnnnnnnnnnnnnnnnnnnnnnnnnnnnnnnnnnnnnnnnnnnnnnnnnnnnnnnnnnnnnnnnnnnnnnnnnnnnnnnnnnnnnnnnnnnnnnnnnnnnnnnnnnnnnnnnnnnnnnnnnnnnnnnnnnnnnnnnnnnnnnnnnnnnnnnnnnnnnnnnnnnnnnnnnnnnnnnnnnnnnnnnnnnnnnnnnnnnnnnnnnnnnnnnnnnnnnnnnnnnnnnnnnnnnnnnnnnnnnnnnnnnnnnnnnnnnnnnnnnnnnnnnnnnnnnnnnnnnnnnnnnnnnnnnnnnnnnnnnnnnnnnnnnnnnnnnnnnnnnnnnnnnnnnnnnnnnnnnnnnnnnnnnnnnnnnnnnnnnnnnnnnnnnnnnnnnnnnnnnnnnnnnnnnnnnnnnnnnnnnnnnnnnnnnnnnnnnnnnnnnnnnnnnnnnnnnnnnnnnnnnnnnnnnnnnnnnnnnnnnnnnnnnnnnnnnnnnnnnnnnnnnnnnnnnnnnnnnnnnnnnnnnnnnnnnnnnnnnnnnnnnnnnnnnnnnnnnnnnnnnnnnnnnnnnnnnnnnnnnnnnnnnnnnnnnnnnnnnnnnnnnnnnnnnnnnnnnnnnnnnnnnnnnnnnnnnnnnnnnnnnnnnnnnnnnnnnnnnnnnnnnnnnnnnnnnnnnnnnnnnnnnnnnnnnnnnnnnnnnnnnnnnnnnnnnnnnnnnnnnnnnnnnnnnnnnnnnnnnnnnnnnnnnnnnnnnnnnnnnnnnnnnnnnnnnnnnnnnnnnnnnnnnnnnnnnnnnnnnnnnnnnnnnnnnnnnnnnnnnnnnnnnnnnnnnnnnnnnnnnnnnnnnnnnnnnnnnnnnnnnnnnnnnnnnnnnnnnnnnnnnnnnnnnnnnnnnnnnnnnnnnnnnnnnnnnnnnnnnnnnnnnnnnnnnnnnnnnnnnnnnnnnnnnnnnnnnnnnnnnnnnnnnnnnnnnnnnnnnnnnnnnnnnnnnnnnnnnnnnnnnnnnnnnnnnnnnnnnnnnnnnnnnnnnnnnnnnnnnnnnnnnnnnnnnnnnnnnnnnnnnnnnnnnnnnnnnnnnnnnnnnnnnnnnnnnnnnnnnnnnnnnnnnnnnnnnnnnnnnnnnnnnnnnnnnnnnnnnnnnnnnnnnnnnnnnnnnnnnnnnnnnnnnnnnnnnnnnnnnnnnnnnnnnnnnnnnnnnnnnnnnnnnnnnnnnnnnnnnnnnnnnnnnnnnnnnnnnnnnnnnnnnnnnnnnnnnnnnnnnnnnnnnnnnnnnnnnnnnnnnnnnnnnnnnnnnnnnnnnnnnnnnnnnnnnnnnnnnnnnnnnnnnnnnnnnnnnnnnnnnnnnnnnnnnnnnnnnnnnnnnnnnnnnnnnnnnnnnnnnnnnnnnnnnnnnnnnnnnnnnnnnnnnnnnnnnnnnnnnnnnnnnnnnnnnnnnnnnnnnnnnnnnnnnnnnnnnnnnnnnnnnnnnnnnnnnnnnnnnnnnnnnnnnnnnnnnnnnnnnnnnnnnnnnnnnnnnnnnnnnnnnnnnnnnnnnnnnnnnnnnnnnnnnnnnnnnnnnnnnnnnnnnnnnnnnnnnnnnnnnnnnnnnnnnnnnnnnnnnnnnnnnnnnnnnnnnnnnnnnnnnnnnnnnnnnnnnnnnnnnnnnnnnnnnnnnnnnnnnnnnnnnnnnnnnnnnnnnnnnnnnnnnnnnnnnnnnnnnnnnnnnnnnnnnnnnnnnnnnnnnnnnnnnnnnnnnnnnnnnnnnnnnnnnnnnnnnnnnnnnnnnnnnnnnnnnnnnnnnnnnnnnnnnnnnnnnnnnnnnnnnnnnnnnnnnnnnnnnnnnnnnnnnnnnnnnnnnnnnnnnnnnnnnnnnnnnnnnnnnnnnnnnnnnnnnnnnnnnnnnnnnnnnnnnnnnnnnnnnnnnnnnnnnnnnnnnnnnnnnnnnnnnnnnnnnnnnnnnnnnnnnnnnnnnnnnnnnnnnnnnnnnnnnnnnnnnnnnnnnnnnnnnnnnnnnnnnnnnnnnnnnnnnnnnnnnnnnnnnnnnnnnnnnnnnnnnnnnnnnnnnnnnnnnnnnnnnnnnnnnnnnnnnnnnnnnnnnnnnnnnnnnnnnnnnnnnnnnnnnnnnnnnnnnnnnnnnnnnnnnnnnnnnnnnnnnnnnnnnnnnnnnnnnnnnnnnnnnnnnnnnnnnnnnnnnnnnnnnnnnnnnnnnnnnnnnnnnnnnnnnnnnnnnnnnnnnnnnnnnnnnnnnnnnnnnnnnnnnnnnnnnnnnnnnnnnnnnnnnnnnnnnnnnnnnnnnnnnnnnnnnnnnnnnnnnnnnnnnnnnnnnnnnnnnnnnnnnnnnnnnnnnnnnnnnnnnnnnnnnnnnnnnnnnnnnnnnnnnnnnnnnnnnnnnnnnnnnnnnnnnnnnnnnnnnnnnnnnnnnnnnnnnnnnnnnnnnnnnnnnnnnnnnnnnnnnnnnnnnnnnnnnnnnnnnnnnnnnnnnnnnnnnnnnnnnnnnnnnnnnnnnnnnnnnnnnnnnnnnnnnnnnnnnnnnnnnnnnnnnnnnnnnnnnnnnnnnnnnnnnnnnnnnnnnnnnnnnnnnnnnnnnnnnnnnnnnnnnnnnnnnnnnnnnnnnnnnnnnnnnnnnnnnnnnnnnnnnnnnnnnnnnnnnnnnnnnnnnnnnnnnnnnnnnnnnnnnnnnnnnnnnnnnnnnnnnnnnnnnnnnnnnnnnnnnnnnnnnnnnnnnnnnnnnnnnnnnnnnnnnnnnnnnnnnnnnnnnnnnnnnnnnnnnnnnnnnnnnnnnnnnnnnnnnnnnnnnnnnnnnnnnnnnnnnnnnnnnnnnnnnnnnnnnnnnnnnnnnnnnnnnnnnnnnnnnnnnnnnnnnnnnnnnnnnnnnnnnnnnnnnnnnnnnnnnnnnnnnnnnnnnnnnnnnnnnnnnnnnnnnnnnnnnnnnnnnnnnnnnnnnnnnnnnnnnnnnnnnnnnnnnnnnnnnnnnnnnnnnnnnnnnnnnnnnnnnnnnnnnnnnnnnnnnnnnnnnnnnnnnnnnnnnnnnnnnnnnnnnnnnnnnnnnnnnnnnnnnnnnnnnnnnnnnnnnnnnnnnnnnnnnnnnnnnnnnnnnnnnnnnnnnnnnnnnnnnnnnnnnnnnnnnnnnnnnnnnnnnnnnnnnnnnnnnnnnnnnnnnnnnnnnnnnnnnnnnnnnnnnnnnnnnnnnnnnnnnnnnnnnnnnnnnnnnnnnnnnnnnnnnnnnnnnnnnnnnnnnnnnnnnnnnnnnnnnnnnnnnnnnnnnnnnnnnnnnnnnnnnnnnnnnnnnnnnnnnnnnnnnnnnnnnnnnnnnnnnnnnnnnnnnnnnnnnnnnnnnnnnnnnnnnnnnnnnnnnnnnnnnnnnnnnnnnnnnnnnnnnnnnnnnnnnnnnnnnnnnnnnnnnnnnnnnnnnnnnnnnnnnnnnnnnnnnnnnnnnnnnnnnnnnnnnnnnnnnnnnnnnnnnnnnnnnnnnnnnnnnnnnnnnnnnnnnnnnnnnnnnnnnnnnnnnnnnnnnnnnnnnnnnnnnnnnnnnnnnnnnnnnnnnnnnnnnnnnnnnnnnnnnnnnnnnnnnnnnnnnnnnnnnnnnnnnnnnnnnnnnnnnnnnnnnnnnnnnnnnnnnnnnnnnnnnnnnnnnnnnnnnnnnnnnnnnnnnnnnnnnnnnnnnnnnnnnnnnnnnnnnnnnnnnnnnnnnnnnnnnnnnnnnnnnnnnnnnnnnnnnnnnnnnnnnnnnnnnnnnnnnnnnnnnnnnnnnnnnnnnnnnnnnnnnnnnnnnnnnnnnnnnnnnnnnnnnnnnnnnnnnnnnnnnnnnnnnnnnnnnnnnnnnnnnnnnnnnnnnnnnnnnnnnnnnnnnnnnnnnnnnnnnnnnnnnnnnnnnnnnnnnnnnnnnnnnnnnnnnnnnnnnnnnnnnnnnnnnnnnnnnnnnnnnnnnnnnnnnnnnnnnnnnnnnnnnnnnnnnnnnnnnnnnnnnnnnnnnnnnnnnnnnnnnnnnnnnnnnnnnnnnnnnnnnnnnnnnnnnnnnnnnnnnnnnnnnnnnnnnnnnnnnnnnnnnnnnnnnnnnnnnnnnnnnnnnnnnnnnnnnnnnnnnnnnnnnnnnnnnnnnnnnnnnnnnnnnnnnnnnnnnnnnnnnnnnnnnnnnnnnnnnnnnnnnnnnnnnnnnnnnnnnnnnnnnnnnnnnnnnnnnnnnnnnnnnnnnnnnnnnnnnnnnnnnnnnnnnnnnnnnnnnnnnnnnnnnnnnnnnnnnnnnnnnnnnnnnnnnnnnnnnnnnnnnnnnnnnnnnnnnnnnnnnnnnnnnnnnnnnnnnnnnnnnnnnnnnnnnnnnnnnnnnnnnnnnnnnnnnnnnnnnnnnnnnnnnnnnnnnnnnnnnnnnnnnnnnnnnnnnnnnnnnnnnnnnnnnnnnnnnnnnnnnnnnnnnnnnnnnnnnnnnnnnnnnnnnnnnnnnnnnnnnnnnnnnnnnnnnnnnnnnnnnnnnnnnnnnnnnnnnnnnnnnnnnnnnnnnnnnnnnnnnnnnnnnnnnnnnnnnnnnnnnnnnnnnnnnnnnnnnnnnnnnnnnnnnnnnnnnnnnnnnnnnnnnnnnnnnnnnnnnnnnnnnnnnnnnnnnnnnnnnnnnnnnnnnnnnnnnnnnnnnnnnnnnnnnnnnnnnnnnnnnnnnnnnnnnnnnnnnnnnnnnnnnnnnnnnnnnnnnnnnnnnnnnnnnnnnnnnnnnnnnnnnnnnnnnnnnnnnnnnnnnnnnnnnnnnnnnnnnnnnnnnnnnnnnnnnnnnnnnnnnnnnnnnnnnnnnnnnnnnnnnnnnnnnnnnnnnnnnnnnnnnnnnnnnnnnnnnnnnnnnnnnnnnnnnnnnnnnnnnnnnnnnnnnnnnnnnnnnnnnnnnnnnnnnnnnnnnnnnnnnnnnnnnnnnnnnnnnnnnnnnnnnnnnnnnnnnnnnnnnnnnnnnnnnnnnnnnnnnnnnnnnnnnnnnnnnnnnnnnnnnnnnnnnnnnnnnnnnnnnnnnnnnnnnnnnnnnnnnnnnnnnnnnnnnnnnnnnnnnnnnnnnnnnnnnnnnnnnnnnnnnnnnnnnnnnnnnnnnnnnnnnnnnnnnnnnnnnnnnnnnnnnnnnnnnnnnnnnnnnnnnnnnnnnnnnnnnnnnnnnnnnnnnnnnnnnnnnnnnnnnnnnnnnnnnnnnnnnnnnnnnnnnnnnnnnnnnnnnnnnnnnnnnnnnnnnnnnnnnnnnnnnnnnnnnnnnnnnnnnnnnnnnnnnnnnnnnnnnnnnnnnnnnnnnnnnnnnnnnnnnnnnnnnnnnnnnnnnnnnnnnnnnnnnnnnnnnnnnnnnnnnnnnnnnnnnnnnnnnnnnnnnnnnnnnnnnnnnnnnnnnnnnnnnnnnnnnnnnnnnnnnnnnnnnnnnnnnnnnnnnnnnnnnnnnnnnnnnnnnnnnnnnnnnnnnnnnnnnnnnnnnnnnnnnnnnnnnnnnnnnnnnnnnnnnnnnnnnnnnnnnnnnnnnnnnnnnnnnnnnnnnnnnnnnnnnnnnnnnnnnnnnnnnnnnnnnnnnnnnnnnnnnnnnnnnnnnnnnnnnnnnnnnnnnnnnnnnnnnnnnnnnnnnnnnnnnnnnnnnnnnnnnnnnnnnnnnnnnnnnnnnnnnnnnnnnnnnnnnnnnnnnnnnnnnnnnnnnnnnnnnnnnnnnnnnnnnnnnnnnnnnnnnnnnnnnnnnnnnnnnnnnnnnnnnnnnnnnnnnnnnnnnnnnnnnnnnnnnnnnnnnnnnnnnnnnnnnnnnnnnnnnnnnnnnnnnnnnnnnnnnnnnnnnnnnnnnnnnnnnnnnnnnnnnnnnnnnnnnnnnnnnnnnnnnnnnnnnnnnnnnnnnnnnnnnnnnnnnnnnnnnnnnnnnnnnnnnnnnnnnnnnnnnnnnnnnnnnnnnnnnnnnnnnnnnnnnnnnnnnnnnnnnnnnnnnnnnnnnnnnnnnnnnnnnnnnnnnnnnnnnnnnnnnnnnnnnnnnnnnnnnnnnnnnnnnnnnnnnnnnnnnnnnnnnnnnnnnnnnnnnnnnnnnnnnnnnnnnnnnnnnnnnnnnnnnnnnnnnnnnnnnnnnnnnnnnnnnnnnnnnnnnnnnnnnnnnnnnnnnnnnnnnnnnnnnnnnnnnnnnnnnnnnnnnnnnnnnnnnnnnnnnnnnnnnnnnnnnnnnnnnnnnnnnnnnnnnnnnnnnnnnnnnnnnnnnnnnnnnnnnnnnnnnnnnnnnnnnnnnnnnnnnnnnnnnnnnnnnnnnnnnnnnnnnnnnnnnnnnnnnnnnnnnnnnnnnnnnnnnnnnnnnnnnnnnnnnnnnnnnnnnnnnnnnnnnnnnnnnnnnnnnnnnnnnnnnnnnnnnnnnnnnnnnnnnnnnnnnnnnnnnnnnnnnnnnnnnnnnnnnnnnnnnnnnnnnnnnnnnnnnnnnnnnnnnnnnnnnnnnnnnnnnnnnnnnnnnnnnnnnnnnnnnnnnnnnnnnnnnnnnnnnnnnnnnnnnnnnnnnnnnnnnnnnnnnnnnnnnnnnnnnnnnnnnnnnnnnnnnnnnnnnnnnnnnnnnnnnnnnnnnnnnnnnnnnnnnnnnnnnnnnnnnnnnnnnnnnnnnnnnnnnnnnnnnnnnnnnnnnnnnnnnnnnnnnnnnnnnnnnnnnnnnnnnnnnnnnnnnnnnnnnnnnnnnnnnnnnnnnnnnnnnnnnnnnnnnnnnnnnnnnnnnnnnnnnnnnnnnnnnnnnnnnnnnnnnnnnnnnnnnnnnnnnnnnnnnnnnnnnnnnnnnnnnnnnnnnnnnnnnnnnnnnnnnnnnnnnnnnnnnnnnnnnnnnnnnnnnnnnnnnnnnnnnnnnnnnnnnnnnnnnnnnnnnnnnnnnnnnnnnnnnnnnnnnnnnnnnnnnnnnnnnnnnnnnnnnnnnnnnnnnnnnnnnnnnnnnnnnnnnnnnnnnnnnnnnnnnnnnnnnnnnnnnnnnnnnnnnnnnnnnnnnnnnnnnnnnnnnnnnnnnnnnnnnnnnnnnnnnnnnnnnnnnnnnnnnnnnnnnnnnnnnnnnnnnnnnnnnnnnnnnnnnnnnnnnnnnnnnnnnnnnnnnnnnnnnnnnnnnnnnnnnnnnnnnnnnnnnnnnnnnnnnnnnnnnnnnnnnnnnnnnnnnnnnnnnnnnnnnnnnnnnnnnnnnnnnnnnnnnnnnnnnnnnnnnnnnnnnnnnnnnnnnnnnnnnnnnnnnnnnnnnnnnnnnnnnnnnnnnnnnnnnnnnnnnnnnnnnnnnnnnnnnnnnnnnnnnnnnnnnnnnnnnnnnnnnnnnnnnnnnnnnnnnnnnnnnnnnnnnnnnnnnnnnnnnnnnnnnnnnnnnnnnnnnnnnnnnnnnnnnnnnnnnnnnnnnnnnnnnnnnnnnnnnnnnnnnnnnnnnnnnnnnnnnnnnnnnnnnnnnnnnnnnnnnnnnnnnnnnnnnnnnnnnnnnnnnnnnnnnnnnnnnnnnnnnnnnnnnnnnnnnnnnnnnnnnnnnnnnnnnnnnnnnnnnnnnnnnnnnnnnnnnnnnnnnnnnnnnnnnnnnnnnnnnnnnnnnnnnnnnnnnnnnnnnnnnnnnnnnnnnnnnnnnnnnnnnnnnnnnnnnnnnnnnnnnnnnnnnnnnnnnnnnnnnnnnnnnnnnnnnnnnnnnnnnnnnnnnnnnnnnnnnnnnnnnnnnnnnnnnnnnnnnnnnnnnnnnnnnnnnnnnnnnnnnnnnnnnnnnnnnnnnnnnnnnnnnnnnnnnnnnnnnnnnnnnnnnnnnnnnnnnnnnnnnnnnnnnnnnnnnnnnnnnnnnnnnnnnnnnnnnnnnnnnnnnnnnnnnnnnnnnnnnnnnnnnnnnnnnnnnnnnnnnnnnnnnnnnnnnnnnnnnnnnnnnnnnnnnnnnnnnnnnnnnnnnnnnnnnnnnnnnnnnnnnnnnnnnnnnnnnnnnnnnnnnnnnnnnnnnnnnnnnnnnnnnnnnnnnnnnnnnnnnnnnnnnnnnnnnnnnnnnnnnnnnnnnnnnnnnnnnnnnnnnnnnnnnnnnnnnnnnnnnnnnnnnnnnnnnnnnnnnnnnnnnnnnnnnnnnnnnnnnnnnnnnnnnnnnnnnnnnnnnnnnnnnnnnnnnnnnnnnnnnnnnnnnnnnnnnnnnnnnnnnnnnnnnnnnnnnnnnnnnnnnnnnnnnnnnnnnnnnnnnnnnnnnnnnnnnnnnnnnnnnnnnnnnnnnnnnnnnnnnnnnnnnnnnnnnnnnnnnnnnnnnnnnnnnnnnnnnnnnnnnnnnnnnnnnnnnnnnnnnnnnnnnnnnnnnnnnnnnnnnnnnnnnnnnnnnnnnnnnnnnnnnnnnnnnnnnnnnnnnnnnnnnnnnnnnnnnnnnnnnnnnnnnnnnnnnnnnnnnnnnnnnnnnnnnnnnnnnnnnnnnnnnnnnnnnnnnnnnnnnnnnnnnnnnnnnnnnnnnnnnnnnnnnnnnnnnnnnnnnnnnnnnnnnnnnnnnnnnnnnnnnnnnnnnnnnnnnnnnnnnnnnnnnnnnnnnnnnnnnnnnnnnnnnnnnnnnnnnnnnnnnnnnnnnnnnnnnnnnnnnnnnnnnnnnnnnnnnnnnnnnnnnnnnnnnnnnnnnnnnnnnnnnnnnnnnnnnnnnnnnnnnnnnnnnnnnnnnnnnnnnnnnnnnnnnnnnnnnnnnnnnnnnnnnnnnnnnnnnnnnnnnnnnnnnnnnnnnnnnnnnnnnnnnnnnnnnnnnnnnnnnnnnnnnnnnnnnnnnnnnnnnnnnnnnnnnnnnnnnnnnnnnnnnnnnnnnnnnnnnnnnnnnnnnnnnnnnnnnnnnnnnnnnnnnnnnnnnnnnnnnnnnnnnnnnnnnnnnnnnnnnnnnnnnnnnnnnnnnnnnnnnnnnnnnnnnnnnnnnnnnnnnnnnnnnnnnnnnnnnnnnnnnnnnnnnnnnnnnnnnnnnnnnnnnnnnnnnnnnnnnnnnnnnnnnnnnnnnnnnnnnnnnnnnnnnnnnnnnnnnnnnnnnnnnnnnnnnnnnnnnnnnnnnnnnnnnnnnnnnnnnnnnnnnnnnnnnnnnnnnnnnnnnnnnnnnnnnnnnnnnnnnnnnnnnnnnnnnnnnnnnnnnnnnnnnnnnnnnnnnnnnnnnnnnnnnnnnnnnnnnnnnnnnnnnnnnnnnnnnnnnnnnnnnnnnnnnnnnnnnnnnnnnnnnnnnnnnnnnnnnnnnnnnnnnnnnnnnnnnnnnnnnnnnnnnnnnnnnnnnnnnnnnnnnnnnnnnnnnnnnnnnnnnnnnnnnnnnnnnnnnnnnnnnnnnnnnnnnnnnnnnnnnnnnnnnnnnnnnnnnnnnnnnnnnnnnnnnnnnnnnnnnnnnnnnnnnnnnnnnnnnnnnnnnnnnnnnnnnnnnnnnnnnnnnnnnnnnnnnnnnnnnnnnnnnnnnnnnnnnnnnnnnnnnnnnnnnnnnnnnnnnnnnnnnnnnnnnnnnnnnnnnnnnnnnnnnnnnnnnnnnnnnnnnnnnnnnnnnnnnnnnnnnnnnnnnnnnnnnnnnnnnnnnnnnnnnnnnnnnnnnnnnnnnnnnnnnnnnnnnnnnnnnnnnnnnnnnnnnnnnnnnnnnnnnnnnnnnnnnnnnnnnnnnnnnnnnnnnnnnnnnnnnnnnnnnnnnnnnnnnnnnnnnnnnnnnnnnnnnnnnnnnnnnnnnnnnnnnnnnnnnnnnnnnnnnnnnnnnnnnnnnnnnnnnnnnnnnnnnnnnnnnnnnnnnnnnnnnnnnnnnnnnnnnnnnnnnnnnnnnnnnnnnnnnnnnnnnnnnnnnnnnnnnnnnnnnnnnnnnnnnnnnnnnnnnnnnnnnnnnnnnnnnnnnnnnnnnnnnnnnnnnnnnnnnnnnnnnnnnnnnnnnnnnnnnnnnnnnnnnnnnnnnnnnnnnnnnnnnnnnnnnnnnnnnnnnnnnnnnnnnnnnnnnnnnnnnnnnnnnnnnnnnnnnnnnnnnnnnnnnnnnnnnnnnnnnnnnnnnnnnnnnnnnnnnnnnnnnnnnnnnnnnnnnnnnnnnnnnnnnnnnnnnnnnnnnnnnnnnnnnnnnnnnnnnnnnnnnnnnnnnnnnnnnnnnnnnnnnnnnnnnnnnnnnnnnnnnnnnnnnnnnnnnnnnnnnnnnnnnnnnnnnnnnnnnnnnnnnnnnnnnnnnnnnnnnnnnnnnnnnnnnnnnnnnnnnnnnnnnnnnnnnnnnnnnnnnnnnnnnnnnnnnnnnnnnnnnnnnnnnnnnnnnnnnnnnnnnnnnnnnnnnnnnnnnnnnnnnnnnnnnnnnnnnnnnnnnnnnnnnnnnnnnnnnnnnnnnnnnnnnnnnnnnnnnnnnnnnnnnnnnnnnnnnnnnnnnnnnnnnnnnnnnnnnnnnnnnnnnnnnnnnnnnnnnnnnnnnnnnnnnnnnnnnnnnnnnnnnnnnnnnnnnnnnnnnnnnnnnnnnnnnnnnnnnnnnnnnnnnnnnnnnnnnnnnnnnnnnnnnnnnnnnnnnnnnnnnnnnnnnnnnnnnnnnnnnnnnnnnnnnnnnnnnnnnnnnnnnnnnnnnnnnnnnnnnnnnnnnnnnnnnnnnnnnnnnnnnnnnnnnnnnnnnnnnnnnnnnnnnnnnnnnnnnnnnnnnnnnnnnnnnnnnnnnnnnnnnnnnnnnnnnnnnnnnnnnnnnnnnnnnnnnnnnnnnnnnnnnnnnnnnnnnnnnnnnnnnnnnnnnnnnnnnnnnnnnnnnnnnnnnnnnnnnnnnnnnnnnnnnnnnnnnnnnnnnnnnnnnnnnnnnnnnnnnnnnnnnnnnnnnnnnnnnnnnnnnnnnnnnnnnnnnnnnnnnnnnnnnnnnnnnnnnnnnnnnnnnnnnnnnnnnnnnnnnnnnnnnnnnnnnnnnnnnnnnnnnnnnnnnnnnnnnnnnnnnnnnnnnnnnnnnnnnnnnnnnnnnnnnnnnnnnnnnnnnnnnnnnnnnnnnnnnnnnnnnnnnnnnnnnnnnnnnnnnnnnnnnnnnnnnnnnnnnnnnnnnnnnnnnnnnnnnnnnnnnnnnnnnnnnnnnnnnnnnnnnnnnnnnnnnnnnnnnnnnnnnnnnnnnnnnnnnnnnnnnnnnnnnnnnnnnnnnnnnnnnnnnnnnnnnnnnnnnnnnnnnnnnnnnnnnnnnnnnnnnnnnnnnnnnnnnnnnnnnnnnnnnnnnnnnnnnnnnnnnnnnnnnnnnnnnnnnnnnnnnnnnnnnnnnnnnnnnnnnnnnnnnnnnnnnnnnnnnnnnnnnnnnnnnnnnnnnnnnnnnnnnnnnnnnnnnnnnnnnnnnnnnnnnnnnnnnnnnnnnnnnnnnnnnnnnnnnnnnnnnnnnnnnnnnnnnnnnnnnnnnnnnnnnnnnnnnnnnnnnnnnnnnnnnnnnnnnnnnnnnnnnnnnnnnnnnnnnnnnnnnnnnnnnnnnnnnnnnnnnnnnnnnnnnnnnnnnnnnnnnnnnnnnnnnnnnnnnnnnnnnnnnnnnnnnnnnnnnnnnnnnnnnnnnnnnnnnnnnnnnnnnnnnnnnnnnnnnnnnnnnnnnnnnnnnnnnnnnnnnnnnnnnnnnnnnnnnnnnnnnnnnnnnnnnnnnnnnnnnnnnnnnnnnnnnnnnnnnnnnnnnnnnnnnnnnnnnnnnnnnnnnnnnnnnnnnnnnnnnnnnnnnnnnnnnnnnnnnnnnnnnnnnnnnnnnnnnnnnnnnnnnnnnnnnnnnnnnnnnnnnnnnnnnnnnnnnnnnnnnnnnnnnnnnnnnnnnnnnnnnnnnnnnnnnnnnnnnnnnnnnnnnnnnnnnnnnnnnnnnnnnnnnnnnnnnnnnnnnnnnnnnnnnnnnnnnnnnnnnnnnnnnnnnnnnnnnnnnnnnnnnnnnnnnnnnnnnnnnnnnnnnnnnnnnnnnnnnnnnnnnnnnnnnnnnnnnnnnnnnnnnnnnnnnnnnnnnnnnnnnnnnnnnnnnnnnnnnnnnnnnnnnnnnnnnnnnnnnnnnnnnnnnnnnnnnnnnnnnnnnnnnnnnnnnnnnnnnnnnnnnnnnnnnnnnnnnnnnnnnnnnnnnnnnnnnnnnnnnnnnnnnnnnnnnnnnnnnnnnnnnnnnnnnnnnnnnnnnnnnnnnnnnnnnnnnnnnnnnnnnnnnnnnnnnnnnnnnnnnnnnnnnnnnnnnnnnnnnnnnnnnnnnnnnnnnnnnnnnnnnnnnnnnnnnnnnnnnnnnnnnnnnnnnnnnnnnnnnnnnnnnnnnnnnnnnnnnnnnnnnnnnnnnnnnnnnnnnnnnnnnnnnnnnnnnnnnnnnnnnnnnnnnnnnnnnnnnnnnnnnnnnnnnnnnnnnnnnnnnnnnnnnnnnnnnnnnnnnnnnnnnnnnnnnnnnnnnnnnnnnnnnnnnnnnnnnnnnnnnnnnnnnnnnnnnnnnnnnnnnnnnnnnnnnnnnnnnnnnnnnnnnnnnnnnnnnnnnnnnnnnnnnnnnnnnnnnnnnnnnnnnnnnnnnnnnnnnnnnnnnnnnnnnnnnnnnnnnnnnnnnnnnnnnnnnnnnnnnnnnnnnnnnnnnnnnnnnnnnnnnnnnnnnnnnnnnnnnnnnnnnnnnnnnnnnnnnnnnnnnnnnnnnnnnnnnnnnnnnnnnnnnnnnnnnnnnnnnnnnnnnnnnnnnnnnnnnnnnnnnnnnnnnnnnnnnnnnnnnnnnnnnnnnnnnnnnnnnnnnnnnnnnnnnnnnnnnnnnnnnnnnnnnnnnnnnnnnnnnnnnnnnnnnnnnnnnnnnnnnnnnnnnnnnnnnnnnnnnnnnnnnnnnnnnnnnnnnnnnnnnnnnnnnnnnnnnnnnnnnnnnnnnnnnnnnnnnnnnnnnnnnnnnnnnnnnnnnnnnnnnnnnnnnnnnnnnnnnnnnnnnnnnnnnnnnnnnnnnnnnnnnnnnnnnnnnnnnnnnnnnnnnnnnnnnnnnnnnnnnnnnnnnnnnnnnnnnnnnnnnnnnnnnnnnnnnnnnnnnnnnnnnnnnnnnnnnnnnnnnnnnnnnnnnnnnnnnnnnnnnnnnnnnnnnnnnnnnnnnnnnnnnnnnnnnnnnnnnnnnnnnnnnnnnnnnnnnnnnnnnnnnnnnnnnnnnnnnnnnnnnnnnnnnnnnnnnnnnnnnnnnnnnnnnnnnnnnnnnnnnnnnnnnnnnnnnnnnnnnnnnnnnnnnnnnnnnnnnnnnnnnnnnnnnnnnnnnnnnnnnnnnnnnnnnnnnnnnnnnnnnnnnnnnnnnnnnnnnnnnnnnnnnnnnnnnnnnnnnnnnnnnnnnnnnnnnnnnnnnnnnnnnnnnnnnnnnnnnnnnnnnnnnnnnnnnnnnnnnnnnnnnnnnnnnnnnnnnnnnnnnnnnnnnnnnnnnnnnnnnnnnnnnnnnnnnnnnnnnnnnnnnnnnnnnnnnnnnnnnnnnnnnnnnnnnnnnnnnnnnnnnnnnnnnnnnnnnnnnnnnnnnnnnnnnnnnnnnnnnnnnnnnnnnnnnnnnnnnnnnnnnnnnnnnnnnnnnnnnnnnnnnnnnnnnnnnnnnnnnnnnnnnnnnnnnnnnnnnnnnnnnnnnnnnnnnnnnnnnnnnnnnnnnnnnnnnnnnnnnnnnnnnnnnnnnnnnnnnnnnnnnnnnnnnnnnnnnnnnnnnnnnnnnnnnnnnnnnnnnnnnnnnnnnnnnnnnnnnnnnnnnnnnnnnnnnnnnnnnnnnnnnnnnnnnnnnnnnnnnnnnnnnnnnnnnnnnnnnnnnnnnnnnnnnnnnnnnnnnnnnnnnnnnnnnnnnnnnnnnnnnnnnnnnnnnnnnnnnnnnnnnnnnnnnnnnnnnnnnnnnnnnnnnnnnnnnnnnnnnnnnnnnnnnnnnnnnnnnnnnnnnnnnnnnnnnnnnnnnnnnnnnnnnnnnnnnnnnnnnnnnnnnnnnnnnnnnnnnnnnnnnnnnnnnnnnnnnnnnnnnnnnnnnnnnnnnnnnnnnnnnnnnnnnnnnnnnnnnnnnnnnnnnnnnnnnnnnnnnnnnnnnnnnnnnnnnnnnnnnnnnnnnnnnnnnnnnnnnnnnnnnnnnnnnnnnnnnnnnnnnnnnnnnnnnnnnnnnnnnnnnnnnnnnnnnnnnnnnnnnnnnnnnnnnnnnnnnnnnnnnnnnnnnnnnnnnnnnnnnnnnnnnnnnnnnnnnnnnnnnnnnnnnnnnnnnnnnnnnnnnnnnnnnnnnnnnnnnnnnnnnnnnnnnnnnnnnnnnnnnnnnnnnnnnnnnnnnnnnnnnnnnnnnnnnnnnnnnnnnnnnnnnnnnnnnnnnnnnnnnnnnnnnnnnnnnnnnnnnnnnnnnnnnnnnnnnnnnnnnnnnnnnnnnnnnnnnnnnnnnnnnnnnnnnnnnnnnnnnnnnnnnnnnnnnnnnnnnnnnnnnnnnnnnnnnnnnnnnnnnnnnnnnnnnnnnnnnnnnnnnnnnnnnnnnnnnnnnnnnnnnnnnnnnnnnnnnnnnnnnnnnnnnnnnnnnnnnnnnnnnnnnnnnnnnnnnnnnnnnnnnnnnnnnnnnnnnnnnnnnnnnnnnnnnnnnnnnnnnnnnnnnnnnnnnnnnnnnnnnnnnnnnnnnnnnnnnnnnnnnnnnnnnnnnnnnnnnnnnnnnnnnnnnnnnnnnnnnnnnnnnnnnnnnnnnnnnnnnnnnnnnnnnnnnnnnnnnnnnnnnnnnnnnnnnnnnnnnnnnnnnnnnnnnnnnnnnnnnnnnnnnnnnnnnnnnnnnnnnnnnnnnnnnnnnnnnnnnnnnnnnnnnnnnnnnnnnnnnnnnnnnnnnnnnnnnnnnnnnnnnnnnnnnnnnnnnnnnnnnnnnnnnnnnnnnnnnnnnnnnnnnnnnnnnnnnnnnnnnnnnnnnnnnnnnnnnnnnnnnnnnnnnnnnnnnnnnnnnnnnnnnnnnnnnnnnnnnnnnnnnnnnnnnnnnnnnnnnnnnnnnnnnnnnnnnnnnnnnnnnnnnnnnnnnnnnnnnnnnnnnnnnnnnnnnnnnnnnnnnnnnnnnnnnnnnnnnnnnnnnnnnnnnnnnnnnnnnnnnnnnnnnnnnnnnnnnnnnnnnnnnnnnnnnnnnnnnnnnnnnnnnnnnnnnnnnnnnnnnnnnnnnnnnnnnnnnnnnnnnnnnnnnnnnnnnnnnnnnnnnnnnnnnnnnnnnnnnnnnnnnnnnnnnnnnnnnnnnnnnnnnnnnnnnnnnnnnnnnnnnnnnnnnnnnnnnnnnnnnnnnnnnnnnnnnnnnnnnnnnnnnnnnnnnnnnnnnnnnnnnnnnnnnnnnnnnnnnnnnnnnnnnnnnnnnnnnnnnnnnnnnnnnnnnnnnnnnnnnnnnnnnnnnnnnnnnnnnnnnnnnnnnnnnnnnnnnnnnnnnnnnnnnnnnnnnnnnnnnnnnnnnnnnnnnnnnnnnnnnnnnnnnnnnnnnnnnnnnnnnnnnnnnnnnnnnnnnnnnnnnnnnnnnnnnnnnnnnnnnnnnnnnnnnnnnnnnnnnnnnnnnnnnnnnnnnnnnnnnnnnnnnnnnnnnnnnnnnnnnnnnnnnnnnnnnnnnnnnnnnnnnnnnnnnnnnnnnnnnnnnnnnnnnnnnnnnnnnnnnnnnnnnnnnnnnnnnnnnnnnnnnnnnnnnnnnnnnnnnnnnnnnnnnnnnnnnnnnnnnnnnnnnnnnnnnnnnnnnnnnnnnnnnnnnnnnnnnnnnnnnnnnnnnnnnnnnnnnnnnnnnnnnnnnnnnnnnnnnnnnnnnnnnnnnnnnnnnnnnnnnnnnnnnnnnnnnnnnnnnnnnnnnnnnnnnnnnnnnnnnnnnnnnnnnnnnnnnnnnnnnnnnnnnnnnnnnnnnnnnnnnnnnnnnnnnnnnnnnnnnnnnnnnnnnnnnnnnnnnnnnnnnnnnnnnnnnnnnnnnnnnnnnnnnnnnnnnnnnnnnnnnnnnnnnnnnnnnnnnnnnnnnnnnnnnnnnnnnnnnnnnnnnnnnnnnnnnnnnnnnnnnnnnnnnnnnnnnnnnnnnnnnnnnnnnnnnnnnnnnnnnnnnnnnnnnnnnnnnnnnnnnnnnnnnnnnnnnnnnnnnnnnnnnnnnnnnnnnnnnnnnnnnnnnnnnnnnnnnnnnnnnnnnnnnnnnnnnnnnnnnnnnnnnnnnnnnnnnnnnnnnnnnnnnnnnnnnnnnnnnnnnnnnnnnnnnnnnnnnnnnnnnnnnnnnnnnnnnnnnnnnnnnnnnnnnnnnnnnnnnnnnnnnnnnnnnnnnnnnnnnnnnnnnnnnnnnnnnnnnnnnnnnnnnnnnnnnnnnnnnnnnnnnnnnnnnnnnnnnnnnnnnnnnnnnnnnnnnnnnnnnnnnnnnnnnnnnnnnnnnnnnnnnnnnnnnnnnnnnnnnnnnnnnnnnnnnnnnnnnnnnnnnnnnnnnnnnnnnnnnnnnnnnnnnnnnnnnnnnnnnnnnnnnnnnnnnnnnnnnnnnnnnnnnnnnnnnnnnnnnnnnnnnnnnnnnnnnnnnnnnnnnnnnnnnnnnnnnnnnnnnnnnnnnnnnnnnnnnnnnnnnnnnnnnnnnnnnnnnnnnnnnnnnnnnnnnnnnnnnnnnnnnnnnnnnnnnnnnnnnnnnnnnnnnnnnnnnnnnnnnnnnnnnnnnnnnnnnnnnnnnnnnnnnnnnnnnnnnnnnnnnnnnnnnnnnnnnnnnnnnnnnnnnnnnnnnnnnnnnnnnnnnnnnnnnnnnnnnnnnnnnnnnnnnnnnnnnnnnnnnnnnnnnnnnnnnnnnnnnnnnnnnnnnnnnnnnnnnnnnnnnnnnnnnnnnnnnnnnnnnnnnnnnnnnnnnnnnnnnnnnnnnnnnnnnnnnnnnnnnnnnnnnnnnnnnnnnnnnnnnnnnnnnnnnnnnnnnnnnnnnnnnnnnnnnnnnnnnnnnnnnnnnnnnnnnnnnnnnnnnnnnnnnnnnnnnnnnnnnnnnnnnnnnnnnnnnnnnnnnnnnnnnnnnnnnnnnnnnnnnnnnnnnnnnnnnnnnnnnnnnnnnnnnnnnnnnnnnnnnnnnnnnnnnnnnnnnnnnnnnnnnnnnnnnnnnnnnnnnnnnnnnnnnnnnnnnnnnnnnnnnnnnnnnnnnnnnnnnnnnnnnnnnnnnnnnnnnnnnnnnnnnnnnnnnnnnnnnnnnnnnnnnnnnnnnnnnnnnnnnnnnnnnnnnnnnnnnnnnnnnnnnnnnnnnnnnnnnnnnnnnnnnnnnnnnnnnnnnnnnnnnnnnnnnnnnnnnnnnnnnnnnnnnnnnnnnnnnnnnnnnnnnnnnnnnnnnnnnnnnnnnnnnnnnnnnnnnnnnnnnnnnnnnnnnnnnnnnnnnnnnnnnnnnnnnnnnnnnnnnnnnnnnnnnnnnnnnnnnnnnnnnnnnnnnnnnnnnnnnnnnnnnnnnnnnnnnnnnnnnnnnnnnnnnnnnnnnnnnnnnnnnnnnnnnnnnnnnnnnnnnnnnnnnnnnnnnnnnnnnnnnnnnnnnnnnnnnnnnnnnnnnnnnnnnnnnnnnnnnnnnnnnnnnnnnnnnnnnnnnnnnnnnnnnnnnnnnnnnnnnnnnnnnnnnnnnnnnnnnnnnnnnnnnnnnnnnnnnnnnnnnnnnnnnnnnnnnnnnnnnnnnnnnnnnnnnnnnnnnnnnnnnnnnnnnnnnnnnnnnnnnnnnnnnnnnnnnnnnnnnnnnnnnnnnnnnnnnnnnnnnnnnnnnnnnnnnnnnnnnnnnnnnnnnnnnnnnnnnnnnnnnnnnnnnnnnnnnnnnnnnnnnnnnnnnnnnnnnnnnnnnnnnnnnnnnnnnnnnnnnnnnnnnnnnnnnnnnnnnnnnnnnnnnnnnnnnnnnnnnnnnnnnnnnnnnnnnnnnnnnnnnnnnnnnnnnnnnnnnnnnnnnnnnnnnnnnnnnnnnnnnnnnnnnnnnnnnnnnnnnnnnnnnnnnnnnnnnnnnnnnnnnnnnnnnnnnnnnnnnnnnnnnnnnnnnnnnnnnnnnnnnnnnnnnnnnnnnnnnnnnnnnnnnnnnnnnnnnnnnnnnnnnnnnnnnnnnnnnnnnnnnnnnnnnnnnnnnnnnnnnnnnnnnnnnnnnnnnnnnnnnnnnnnnnnnnnnnnnnnnnnnnnnnnnnnnnnnnnnnnnnnnnnnnnnnnnnnnnnnnnnnnnnnnnnnnnnnnnnnnnnnnnnnnnnnnnnnnnnnnnnnnnnnnnnnnnnnnnnnnnnnnnnnnnnnnnnnnnnnnnnnnnnnnnnnnnnnnnnnnnnnnnnnnnnnnnnnnnnnnnnnnnnnnnnnnnnnnnnnnnnnnnnnnnnnnnnnnnnnnnnnnnnnnnnnnnnnnnnnnnnnnnnnnnnnnnnnnnnnnnnnnnnnnnnnnnnnnnnnnnnnnnnnnnnnnnnnnnnnnnnnnnnnnnnnnnnnnnnnnnnnnnnnnnnnnnnnnnnnnnnnnnnnnnnnnnnnnnnnnnnnnnnnnnnnnnnnnnnnnnnnnnnnnnnnnnnnnnnnnnnnnnnnnnnnnnnnnnnnnnnnnnnnnnnnnnnnnnnnnnnnnnnnnnnnnnnnnnnnnnnnnnnnnnnnnnnnnnnnnnnnnnnnnnnnnnnnnnnnnnnnnnnnnnnnnnnnnnnnnnnnnnnnnnnnnnnnnnnnnnnnnnnnnnnnnnnnnnnnnnnnnnnnnnnnnnnnnnnnnnnnnnnnnnnnnnnnnnnnnnnnnnnnnnnnnnnnnnnnnnnnnnnnnnnnnnnnnnnnnnnnnnnnnnnnnnnnnnnnnnnnnnnnnnnnnnnnnnnnnnnnnnnnnnnnnnnnnnnnnnnnnnnnnnnnnnnnnnnnnnnnnnnnnnnnnnnnnnnnnnnnnnnnnnnnnnnnnnnnnnnnnnnnnnnnnnnnnnnnnnnnnnnnnnnnnnnnnnnnnnnnnnnnnnnnnnnnnnnnnnnnnnnnnnnnnnnnnnnnnnnnnnnnnnnnnnnnnnnnnnnnnnnnnnnnnnnnnnnnnnnnnnnnnnnnnnnnnnnnnnnnnnnnnnnnnnnnnnnnnnnnnnnnnnnnnnnnnnnnnnnnnnnnnnnnnnnnnnnnnnnnnnnnnnnnnnnnnnnnnnnnnnnnnnnnnnnnnnnnnnnnnnnnnnnnnnnnnnnnnnnnnnnnnnnnnnnnnnnnnnnnnnnnnnnnnnnnnnnnnnnnnnnnnnnnnnnnnnnnnnnnnnnnnnnnnnnnnnnnnnnnnnnnnnnnnnnnnnnnnnnnnnnnnnnnnnnnnnnnnnnnnnnnnnnnnnnnnnnnnnnnnnnnnnnnnnnnnnnnnnnnnnnnnnnnnnnnnnnnnnnnnnnnnnnnnnnnnnnnnnnnnnnnnnnnnnnnnnnnnnnnnnnnnnnnnnnnnnnnnnnnnnnnnnnnnnnnnnnnnnnnnnnnnnnnnnnnnnnnnnnnnnnnnnnnnnnnnnnnnnnnnnnnnnnnnnnnnnnnnnnnnnnnnnnnnnnnnnnnnnnnnnnnnnnnnnnnnnnnnnnnnnnnnnnnnnnnnnnnnnnnnnnnnnnnnnnnnnnnnnnnnnnnnnnnnnnnnnnnnnnnnnnnnnnnnnnnnnnnnnnnnnnnnnnnnnnnnnnnnnnnnnnnnnnnnnnnnnnnnnnnnnnnnnnnnnnnnnnnnnnnnnnnnnnnnnnnnnnnnnnnnnnnnnnnnnnnnnnnnnnnnnnnnnnnnnnnnnnnnnnnnnnnnnnnnnnnnnnnnnnnnnnnnnnnnnnnnnnnnnnnnnnnnnnnnnnnnnnnnnnnnnnnnnnnnnnnnnnnnnnnnnnnnnnnnnnnnnnnnnnnnnnnnnnnnnnnnnnnnnnnnnnnnnnnnnnnnnnnnnnnnnnnnnnnnnnnnnnnnnnnnnnnnnnnnnnnnnnnnnnnnnnnnnnnnnnnnnnnnnnnnnnnnnnnnnnnnnnnnnnnnnnnnnnnnnnnnnnnnnnnnnnnnnnnnnnnnnnnnnnnnnnnnnnnnnnnnnnnnnnnnnnnnnnnnnnnnnnnnnnnnnnnnnnnnnnnnnnnnnnnnnnnnnnnnnnnnnnnnnnnnnnnnnnnnnnnnnnnnnnnnnnnnnnnnnnnnnnnnnnnnnnnnnnnnnnnnnnnnnnnnnnnnnnnnnnnnnnnnnnnnnnnnnnnnnnnnnnnnnnnnnnnnnnnnnnnnnnnnnnnnnnnnnnnnnnnnnnnnnnnnnnnnnnnnnnnnnnnnnnnnnnnnnnnnnnnnnnnnnnnnnnnnnnnnnnnnnnnnnnnnnnnnnnnnnnnnnnnnnnnnnnnnnnnnnnnnnnnnnnnnnnnnnnnnnnnnnnnnnnnnnnnnnnnnnnnnnnnnnnnnnnnnnnnnnnnnnnnnnnnnnnnnnnnnnnnnnnnnnnnnnnnnnnnnnnnnnnnnnnnnnnnnnnnnnnnnnnnnnnnnnnnnnnnnnnnnnnnnnnnnnnnnnnnnnnnnnnnnnnnnnnnnnnnnnnnnnnnnnnnnnnnnnnnnnnnnnnnnnnnnnnnnnnnnnnnnnnnnnnnnnnnnnnnnnnnnnnnnnnnnnnnnnnnnnnnnnnnnnnnnnnnnnnnnnnnnnnnnnnnnnnnnnnnnnnnnnnnnnnnnnnnnnnnnnnnnnnnnnnnnnnnnnnnnnnnnnnnnnnnnnnnnnnnnnnnnnnnnnnnnnnnnnnnnnnnnnnnnnnnnnnnnnnnnnnnnnnnnnnnnnnnnnnnnnnnnnnnnnnnnnnnnnnnnnnnnnnnnnnnnnnnnnnnnnnnnnnnnnnnnnnnnnnnnnnnnnnnnnnnnnnnnnnnnnnnnnnnnnnnnnnnnnnnnnnnnnnnnnnnnnnnnnnnnnnnnnnnnnnnnnnnnnnnnnnnnnnnnnnnnnnnnnnnnnnnnnnnnnnnnnnnnnnnnnnnnnnnnnnnnnnnnnnnnnnnnnnnnnnnnnnnnnnnnnnnnnnnnnnnnnnnnnnnnnnnnnnnnnnnnnnnnnnnnnnnnnnnnnnnnnnnnnnnnnnnnnnnnnnnnnnnnnnnnnnnnnnnnnnnnnnnnnnnnnnnnnnnnnnnnnnnnnnnnnnnnnnnnnnnnnnnnnnnnnnnnnnnnnnnnnnnnnnnnnnnnnnnnnnnnnnnnnnnnnnnnnnnnnnnnnnnnnnnnnnnnnnnnnnnnnnnnnnnnnnnnnnnnnnnnnnnnnnnnnnnnnnnnnnnnnnnnnnnnnnnnnnnnnnnnnnnnnnnnnnnnnnnnnnnnnnnnnnnnnnnnnnnnnnnnnnnnnnnnnnnnnnnnnnnnnnnnnnnnnnnnnnnnnnnnnnnnnnnnnnnnnnnnnnnnnnnnnnnnnnnnnnnnnnnnnnnnnnnnnnnnnnnnnnnnnnnnnnnnnnnnnnnnnnnnnnnnnnnnnnnnnnnnnnnnnnnnnnnnnnnnnnnnnnnnnnnnnnnnnnnnnnnnnnnnnnnnnnnnnnnnnnnnnnnnnnnnnnnnnnnnnnnnnnnnnnnnnnnnnnnnnnnnnnnnnnnnnnnnnnnnnnnnnnnnnnnnnnnnnnnnnnnnnnnnnnnnnnnnnnnnnnnnnnnnnnnnnnnnnnnnnnnnnnnnnnnnnnnnnnnnnnnnnnnnnnnnnnnnnnnnnnnnnnnnnnnnnnnnnnnnnnnnnnnnnnnnnnnnnnnnnnnnnnnnnnnnnnnnnnnnnnnnnnnnnnnnnnnnnnnnnnnnnnnnnnnnnnnnnnnnnnnnnnnnnnnnnnnnnnnnnnnnnnnnnnnnnnnnnnnnnnnnnnnnnnnnnnnnnnnnnnnnnnnnnnnnnnnnnnnnnnnnnnnnnnnnnnnnnnnnnnnnnnnnnnnnnnnnnnnnnnnnnnnnnnnnnnnnnnnnnnnnnnnnnnnnnnnnnnnnnnnnnnnnnnnnnnnnnnnnnnnnnnnnnnnnnnnnnnnnnnnnnnnnnnnnnnnnnnnnnnnnnnnnnnnnnnnnnnnnnnnnnnnnnnnnnnnnnnnnnnnnnnnnnnnnnnnnnnnnnnnnnnnnnnnnnnnnnnnnnnnnnnnnnnnnnnnnnnnnnnnnnnnnnnnnnnnnnnnnnnnnnnnnnnnnnnnnnnnnnnnnnnnnnnnnnnnnnnnnnnnnnnnnnnnnnnnnnnnnnnnnnnnnnnnnnnnnnnnnnnnnnnnnnnnnnnnnnnnnnnnnnnnnnnnnnnnnnnnnnnnnnnnnnnnnnnnnnnnnnnnnnnnnnnnnnnnnnnnnnnnnnnnnnnnnnnnnnnnnnnnnnnnnnnnnnnnnnnnnnnnnnnnnnnnnnnnnnnnnnnnnnnnnnnnnnnnnnnnnnnnnnnnnnnnnnnnnnnnnnnnnnnnnnnnnnnnnnnnnnnnnnnnnnnnnnnnnnnnnnnnnnnnnnnnnnnnnnnnnnnnnnnnnnnnnnnnnnnnnnnnnnnnnnnnnnnnnnnnnnnnnnnnnnnnnnnnnnnnnnnnnnnnnnnnnnnnnnnnnnnnnnnnnnnnnnnnnnnnnnnnnnnnnnnnnnnnnnnnnnnnnnnnnnnnnnnnnnnnnnnnnnnnnnnnnnnnnnnnnnnnnnnnnnnnnnnnnnnnnnnnnnnnnnnnnnnnnnnnnnnnnnnnnnnnnnnnnnnnnnnnnnnnnnnnnnnnnnnnnnnnnnnnnnnnnnnnnnnnnnnnnnnnnnnnnnnnnnnnnnnnnnnnnnnnnnnnnnnnnnnnnnnnnnnnnnnnnnnnnnnnnnnnnnnnnnnnnnnnnnnnnnnnnnnnnnnnnnnnnnnnnnnnnnnnnnnnnnnnnnnnnnnnnnnnnnnnnnnnnnnnnnnnnnnnnnnnnnnnnnnnnnnnnnnnnnnnnnnnnnnnnnnnnnnnnnnnnnnnnnnnnnnnnnnnnnnnnnnnnnnnnnnnnnnnnnnnnnnnnnnnnnnnnnnnnnnnnnnnnnnnnnnnnnnnnnnnnnnnnnnnnnnnnnnnnnnnnnnnnnnnnnnnnnnnnnnnnnnnnnnnnnnnnnnnnnnnnnnnnnnnnnnnnnnnnnnnnnnnnnnnnnnnnnnnnnnnnnnnnnnnnnnnnnnnnnnnnnnnnnnnnnnnnnnnnnnnnnnnnnnnnnnnnnnnnnnnnnnnnnnnnnnnnnnnnnnnnnnnnnnnnnnnnnnnnnnnnnnnnnnnnnnnnnnnnnnnnnnnnnnnnnnnnnnnnnnnnnnnnnnnnnnnnnnnnnnnnnnnnnnnnnnnnnnnnnnnnnnnnnnnnnnnnnnnnnnnnnnnnnnnnnnnnnnnnnnnnnnnnnnnnnnnnnnnnnnnnnnnnnnnnnnnnnnnnnnnnnnnnnnnnnnnnnnnnnnnnnnnnnnnnnnnnnnnnnnnnnnnnnnnnnnnnnnnnnnnnnnnnnnnnnnnnnnnnnnnnnnnnnnnnnnnnnnnnnnnnnnnnnnnnnnnnnnnnnnnnnnnnnnnnnnnnnnnnnnnnnnnnnnnnnnnnnnnnnnnnnnnnnnnnnnnnnnnnnnnnnnnnnnnnnnnnnnnnnnnnnnnnnnnnnnnnnnnnnnnnnnnnnnnnnnnnnnnnnnnnnnnnnnnnnnnnnnnnnnnnnnnnnnnnnnnnnnnnnnnnnnnnnnnnnnnnnnnnnnnnnnnnnnnnnnnnnnnnnnnnnnnnnnnnnnnnnnnnnnnnnnnnnnnnnnnnnnnnnnnnnnnnnnnnnnnnnnnnnnnnnnnnnnnnnnnnnnnnnnnnnnnnnnnnnnnnnnnnnnnnnnnnnnnnnnnnnnnnnnnnnnnnnnnnnnnnnnnnnnnnnnnnnnnnnnnnnnnnnnnnnnnnnnnnnnnnnnnnnnnnnnnnnnnnnnnnnnnnnnnnnnnnnnnnnnnnnnnnnnnnnnnnnnnnnnnnnnnnnnnnnnnnnnnnnnnnnnnnnnnnnnnnnnnnnnnnnnnnnnnnnnnnnnnnnnnnnnnnnnnnnnnnnnnnnnnnnnnnnnnnnnnnnnnnnnnnnnnnnnnnnnnnnnnnnnnnnnnnnnnnnnnnnnnnnnnnnnnnnnnnnnnnnnnnnnnnnnnnnnnnnnnnnnnnnnnnnnnnnnnnnnnnnnnnnnnnnnnnnnnnnnnnnnnnnnnnnnnnnnnnnnnnnnnnnnnnnnnnnnnnnnnnnnnnnnnnnnnnnnnnnnnnnnnnnnnnnnnnnnnnnnnnnnnnnnnnnnnnnnnnnnnnnnnnnnnnnnnnnnnnnnnnnnnnnnnnnnnnnnnnnnnnnnnnnnnnnnnnnnnnnnnnnnnnnnnnnnnnnnnnnnnnnnnnnnnnnnnnnnnnnnnnnnnnnnnnnnnnnnnnnnnnnnnnnnnnnnnnnnnnnnnnnnnnnnnnnnnnnnnnnnnnnnnnnnnnnnnnnnnnnnnnnnnnnnnnnnnnnnnnnnnnnnnnnnnnnnnnnnnnnnnnnnnnnnnnnnnnnnnnnnnnnnnnnnnnnnnnnnnnnnnnnnnnnnnnnnnnnnnnnnnnnnnnnnnnnnnnnnnnnnnnnnnnnnnnnnnnnnnnnnnnnnnnnnnnnnnnnnnnnnnnnnnnnnnnnnnnnnnnnnnnnnnnnnnnnnnnnnnnnnnnnnnnnnnnnnnnnnnnnnnnnnnnnnnnnnnnnnnnnnnnnnnnnnnnnnnnnnnnnnnnnnnnnnnnnnnnnnnnnnnnnnnnnnnnnnnnnnnnnnnnnnnnnnnnnnnnnnnnnnnnnnnnnnnnnnnnnnnnnnnnnnnnnnnnnnnnnnnnnnnnnnnnnnnnnnnnnnnnnnnnnnnnnnnnnnnnnnnnnnnnnnnnnnnnnnnnnnnnnnnnnnnnnnnnnnnnnnnnnnnnnnnnnnnnnnnnnnnnnnnnnnnnnnnnnnnnnnnnnnnnnnnnnnnnnnnnnnnnnnnnnnnnnnnnnnnnnnnnnnnnnnnnnnnnnnnnnnnnnnnnnnnnnnnnnnnnnnnnnnnnnnnnnnnnnnnnnnnnnnnnnnnnnnnnnnnnnnnnnnnnnnnnnnnnnnnnnnnnnnnnnnnnnnnnnnnnnnnnnnnnnnnnnnnnnnnnnnnnnnnnnnnnnnnnnnnnnnnnnnnnnnnnnnnnnnnnnnnnnnnnnnnnnnnnnnnnnnnnnnnnnnnnnnnnnnnnnnnnnnnnnnnnnnnnnnnnnnnnnnnnnnnnnnnnnnnnnnnnnnnnnnnnnnnnnnnnnnnnnnnnnnnnnnnnnnnnnnnnnnnnnnnnnnnnnnnnnnnnnnnnnnnnnnnnnnnnnnnnnnnnnnnnnnnnnnnnnnnnnnnnnnnnnnnnnnnnnnnnnnnnnnnnnnnnnnnnnnnnnnnnnnnnnnnnnnnnnnnnnnnnnnnnnnnnnnnnnnnnnnnnnnnnnnnnnnnnnnnnnnnnnnnnnnnnnnnnnnnnnnnnnnnnnnnnnnnnnnnnnnnnnnnnnnnnnnnnnnnnnnnnnnnnnnnnnnnnnnnnnnnnnnnnnnnnnnnnnnnnnnnnnnnnnnnnnnnnnnnnnnnnnnnnnnnnnnnnnnnnnnnnnnnnnnnnnnnnnnnnnnnnnnnnnnnnnnnnnnnnnnnnnnnnnnnnnnnnnnnnnnnnnnnnnnnnnnnnnnnnnnnnnnnnnnnnnnnnnnnnnnnnnnnnnnnnnnnnnnnnnnnnnnnnnnnnnnnnnnnnnnnnnnnnnnnnnnnnnnnnnnnnnnnnnnnnnnnnnnnnnnnnnnnnnnnnnnnnnnnnnnnnnnnnnnnnnnnnnnnnnnnnnnnnnnnnnnnnnnnnnnnnnnnnnnnnnnnnnnnnnnnnnnnnnnnnnnnnnnnnnnnnnnnnnnnnnnnnnnnnnnnnnnnnnnnnnnnnnnnnnnnnnnnnnnnnnnnnnnnnnnnnnnnnnnnnnnnnnnnnnnnnnnnnnnnnnnnnnnnnnnnnnnnnnnnnnnnnnnnnnnnnnnnnnnnnnnnnnnnnnnnnnnnnnnnnnnnnnnnnnnnnnnnnnnnnnnnnnnnnnnnnnnnnnnnnnnnnnnnnnnnnnnnnnnnnnnnnnnnnnnnnnnnnnnnnnnnnnnnnnnnnnnnnnnnnnnnnnnnnnnnnnnnnnnnnnnnnnnnnnnnnnnnnnnnnnnnnnnnnnnnnnnnnnnnnnnnnnnnnnnnnnnnnnnnnnnnnnnnnnnnnnnnnnnnnnnnnnnnnnnnnnnnnnnnnnnnnnnnnnnnnnnnnnnnnnnnnnnnnnnnnnnnnnnnnnnnnnnnnnnnnnnnnnnnnnnnnnnnnnnnnnnnnnnnnnnnnnnnnnnnnnnnnnnnnnnnnnnnnnnnnnnnnnnnnnnnnnnnnnnnnnnnnnnnnnnnnnnnnnnnnnnnnnnnnnnnnnnnnnnnnnnnnnnnnnnnnnnnnnnnnnnnnnnnnnnnnnnnnnnnnnnnnnnnnnnnnnnnnnnnnnnnnnnnnnnnnnnnnnnnnnnnnnnnnnnnnnnnnnnnnnnnnnnnnnnnnnnnnnnnnnnnnnnnnnnnnnnnnnnnnnnnnnnnnnnnnnnnnnnnnnnnnnnnnnnnnnnnnnnnnnnnnnnnnnnnnnnnnnnnnnnnnnnnnnnnnnnnnnnnnnnnnnnnnnnnnnnnnnnnnnnnnnnnnnnnnnnnnnnnnnnnnnnnnnnnnnnnnnnnnnnnnnnnnnnnnnnnnnnnnnnnnnnnnnnnnnnnnnnnnnnnnnnnnnnnnnnnnnnnnnnnnnnnnnnnnnnnnnnnnnnnnnnnnnnnnnnnnnnnnnnnnnnnnnnnnnnnnnnnnnnnnnnnnnnnnnnnnnnnnnnnnnnnnnnnnnnnnnnnnnnnnnnnnnnnnnnnnnnnnnnnnnnnnnnnnnnnnnnnnnnnnnnnnnnnnnnnnnnnnnnnnnnnnnnnnnnnnnnnnnnnnnnnnnnnnnnnnnnnnnnnnnnnnnnnnnnnnnnnnnnnnnnnnnnnnnnnnnnnnnnnnnnnnnnnnnnnnnnnnnnnnnnnnnnnnnnnnnnnnnnnnnnnnnnnnnnnnnnnnnnnnnnnnnnnnnnnnnnnnnnnnnnnnnnnnnnnnnnnnnnnnnnnnnnnnnnnnnnnnnnnnnnnnnnnnnnnnnnnnnnnnnnnnnnnnnnnnnnnnnnnnnnnnnnnnnnnnnnnnnnnnnnnnnnnnnnnnnnnnnnnnnnnnnnnnnnnnnnnnnnnnnnnnnnnnnnnnnnnnnnnnnnnnnnnnnnnnnnnnnnnnnnnnnnnnnnnnnnnnnnnnnnnnnnnnnnnnnnnnnnnnnnnnnnnnnnnnnnnnnnnnnnnnnnnnnnnnnnnnnnnnnnnnnnnnnnnnnnnnnnnnnnnnnnnnnnnnnnnnnnnnnnnnnnnnnnnnnnnnnnnnnnnnnnnnnnnnnnnnnnnnnnnnnnnnnnnnnnnnnnnnnnnnnnnnnnnnnnnnnnnnnnnnnnnnnnnnnnnnnnnnnnnnnnnnnnnnnnnnnnnnnnnnnnnnnnnnnnnnnnnnnnnnnnnnnnnnnnnnnnnnnnnnnnnnnnnnnnnnnnnnnnnnnnnnnnnnnnnnnnnnnnnnnnnnnnnnnnnnnnnnnnnnnnnnnnnnnnnnnnnnnnnnnnnnnnnnnnnnnnnnnnnnnnnnnnnnnnnnnnnnnnnnnnnnnnnnnnnnnnnnnnnnnnnnnnnnnnnnnnnnnnnnnnnnnnnnnnnnnnnnnnnnnnnnnnnnnnnnnnnnnnnnnnnnnnnnnnnnnnnnnnnnnnnnnnnnnnnnnnnnnnnnnnnnnnnnnnnnnnnnnnnnnnnnnnnnnnnnnnnnnnnnnnnnnnnnnnnnnnnnnnnnnnnnnnnnnnnnnnnnnnnnnnnnnnnnnnnnnnnnnnnnnnnnnnnnnnnnnnnnnnnnnnnnnnnnnnnnnnnnnnnnnnnnnnnnnnnnnnnnnnnnnnnnnnnnnnnnnnnnnnnnnnnnnnnnnnnnnnnnnnnnnnnnnnnnnnnnnnnnnnnnnnnnnnnnnnnnnnnnnnnnnnnnnnnnnnnnnnnnnnnnnnnnnnnnnnnnnnnnnnnnnnnnnnnnnnnnnnnnnnnnnnnnnnnnnnnnnnnnnnnnnnnnnnnnnnnnnnnnnnnnnnnnnnnnnnnnnnnnnnnnnnnnnnnnnnnnnnnnnnnnnnnnnnnnnnnnnnnnnnnnnnnnnnnnnnnnnnnnnnnnnnnnnnnnnnnnnnnnnnnnnnnnnnnnnnnnnnnnnnnnnnnnnnnnnnnnnnnnnnnnnnnnnnnnnnnnnnnnnnnnnnnnnnnnnnnnnnnnnnnnnnnnnnnnnnnnnnnnnnnnnnnnnnnnnnnnnnnnnnnnnnnnnnnnnnnnnnnnnnnnnnnnnnnnnnnnnnnnnnnnnnnnnnnnnnnnnnnnnnnnnnnnnnnnnnnnnnnnnnnnnnnnnnnnnnnnnnnnnnnnnnnnnnnnnnnnnnnnnnnnnnnnnnnnnnnnnnnnnnnnnnnnnnnnnnnnnnnnnnnnnnnnnnnnnnnnnnnnnnnnnnnnnnnnnnnnnnnnnnnnnnnnnnnnnnnnnnnnnnnnnnnnnnnnnnnnnnnnnnnnnnnnnnnnnnnnnnnnnnnnnnnnnnnnnnnnnnnnnnnnnnnnnnnnnnnnnnnnnnnnnnnnnnnnnnnnnnnnnnnnnnnnnnnnnnnnnnnnnnnnnnnnnnnnnnnnnnnnnnnnnnnnnnnnnnnnnnnnnnnnnnnnnnnnnnnnnnnnnnnnnnnnnnnnnnnnnnnnnnnnnnnnnnnnnnnnnnnnnnnnnnnnnnnnnnnnnnnnnnnnnnnnnnnnnnnnnnnnnnnnnnnnnnnnnnnnnnnnnnnnnnnnnnnnnnnnnnnnnnnnnnnnnnnnnnnnnnnnnnnnnnnnnnnnnnnnnnnnnnnnnnnnnnnnnnnnnnnnnnnnnnnnnnnnnnnnnnnnnnnnnnnnnnnnnnnnnnnnnnnnnnnnnnnnnnnnnnnnnnnnnnnnnnnnnnnnnnnnnnnnnnnnnnnnnnnnnnnnnnnnnnnnnnnnnnnnnnnnnnnnnnnnnnnnnnnnnnnnnnnnnnnnnnnnnnnnnnnnnnnnnnnnnnnnnnnnnnnnnnnnnnnnnnnnnnnnnnnnnnnnnnnnnnnnnnnnnnnnnnnnnnnnnnnnnnnnnnnnnnnnnnnnnnnnnnnnnnnnnnnnnnnnnnnnnnnnnnnnnnnnnnnnnnnnnnnnnnnnnnnnnnnnnnnnnnnnnnnnnnnnnnnnnnnnnnnnnnnnnnnnnnnnnnnnnnnnnnnnnnnnnnnnnnnnnnnnnnnnnnnnnnnnnnnnnnnnnnnnnnnnnnnnnnnnnnnnnnnnnnnnnnnnnnnnnnnnnnnnnnnnnnnnnnnnnnnnnnnnnnnnnnnnnnnnnnnnnnnnnnnnnnnnnnnnnnnnnnnnnnnnnnnnnnnnnnnnnnnnnnnnnnnnnnnnnnnnnnnnnnnnnnnnnnnnnnnnnnnnnnnnnnnnnnnnnnnnnnnnnnnnnnnnnnnnnnnnnnnnnnnnnnnnnnnnnnnnnnnnnnnnnnnnnnnnnnnnnnnnnnnnnnnnnnnnnnnnnnnnnnnnnnnnnnnnnnnnnnnnnnnnnnnnnnnnnnnnnnnnnnnnnnnnnnnnnnnnnnnnnnnnnnnnnnnnnnnnnnnnnnnnnnnnnnnnnnnnnnnnnnnnnnnnnnnnnnnnnnnnnnnnnnnnnnnnnnnnnnnnnnnnnnnnnnnnnnnnnnnnnnnnnnnnnnnnnnnnnnnnnnnnnnnnnnnnnnnnnnnnnnnnnnnnnnnnnnnnnnnnnnnnnnnnnnnnnnnnnnnnnnnnnnnnnnnnnnnnnnnnnnnnnnnnnnnnnnnnnnnnnnnnnnnnnnnnnnnnnnnnnnnnnnnnnnnnnnnnnnnnnnnnnnnnnnnnnnnnnnnnnnnnnnnnnnnnnnnnnnnnnnnnnnnnnnnnnnnnnnnnnnnnnnnnnnnnnnnnnnnnnnnnnnnnnnnnnnnnnnnnnnnnnnnnnnnnnnnnnnnnnnnnnnnnnnnnnnnnnnnnnnnnnnnnnnnnnnnnnnnnnnnnnnnnnnnnnnnnnnnnnnnnnnnnnnnnnnnnnnnnnnnnnnnnnnnnnnnnnnnnnnnnnnnnnnnnnnnnnnnnnnnnnnnnnnnnnnnnnnnnnnnnnnnnnnnnnnnnnnnnnnnnnnnnnnnnnnnnnnnnnnnnnnnnnnnnnnnnnnnnnnnnnnnnnnnnnnnnnnnnnnnnnnnnnnnnnnnnnnnnnnnnnnnnnnnnnnnnnnnnnnnnnnnnnnnnnnnnnnnnnnnnnnnnnnnnnnnnnnnnnnnnnnnnnnnnnnnnnnnnnnnnnnnnnnnnnnnnnnnnnnnnnnnnnnnnnnnnnnnnnnnnnnnnnnnnnnnnnnnnnnnnnnnnnnnnnnnnnnnnnnnnnnnnnnnnnnnnnnnnnnnnnnnnnnnnnnnnnnnnnnnnnnnnnnnnnnnnnnnnnnnnnnnnnnnnnnnnnnnnnnnnnnnnnnnnnnnnnnnnnnnnnnnnnnnnnnnnnnnnnnnnnnnnnnnnnnnnnnnnnnnnnnnnnnnnnnnnnnnnnnnnnnnnnnnnnnnnnnnnnnnnnnnnnnnnnnnnnnnnnnnnnnnnnnnnnnnnnnnnnnnnnnnnnnnnnnnnnnnnnnnnnnnnnnnnnnnnnnnnnnnnnnnnnnnnnnnnnnnnnnnnnnnnnnnnnnnnnnnnnnnnnnnnnnnnnnnnnnnnnnnnnnnnnnnnnnnnnnnnnnnnnnnnnnnnnnnnnnnnnnnnnnnnnnnnnnnnnnnnnnnnnnnnnnnnnnnnnnnnnnnnnnnnnnnnnnnnnnnnnnnnnnnnnnnnnnnnnnnnnnnnnnnnnnnnnnnnnnnnnnnnnnnnnnnnnnnnnnnnnnnnnnnnnnnnnnnnnnnnnnnnnnnnnnnnnnnnnnnnnnnnnnnnnnnnnnnnnnnnnnnnnnnnnnnnnnnnnnnnnnnnnnnnnnnnnnnnnnnnnnnnnnnnnnnnnnnnnnnnnnnnnnnnnnnnnnnnnnnnnnnnnnnnnnnnnnnnnnnnnnnnnnnnnnnnnnnnnnnnnnnnnnnnnnnnnnnnnnnnnnnnnnnnnnnnnnnnnnnnnnnnnnnnnnnnnnnnnnnnnnnnnnnnnnnnnnnnnnnnnnnnnnnnnnnnnnnnnnnnnnnnnnnnnnnnnnnnnnnnnnnnnnnnnnnnnnnnnnnnnnnnnnnnnnnnnnnnnnnnnnnnnnnnnnnnnnnnnnnnnnnnnnnnnnnnnnnnnnnnnnnnnnnnnnnnnnnnnnnnnnnnnnnnnnnnnnnnnnnnnnnnnnnnnnnnnnnnnnnnnnnnnnnnnnnnnnnnnnnnnnnnnnnnnnnnnnnnnnnnnnnnnnnnnnnnnnnnnnnnnnnnnnnnnnnnnnnnnnnnnnnnnnnnnnnnnnnnnnnnnnnnnnnnnnnnnnnnnnnnnnnnnnnnnnnnnnnnnnnnnnnnnnnnnnnnnnnnnnnnnnnnnnnnnnnnnnnnnnnnnnnnnnnnnnnnnnnnnnnnnnnnnnnnnnnnnnnnnnnnnnnnnnnnnnnnnnnnnnnnnnnnnnnnnnnnnnnnnnnnnnnnnnnnnnnnnnnnnnnnnnnnnnnnnnnnnnnnnnnnnnnnnnnnnnnnnnnnnnnnnnnnnnnnnnnnnnnnnnnnnnnnnnnnnnnnnnnnnnnnnnnnnnnnnnnnnnnnnnnnnnnnnnnnnnnnnnnnnnnnnnnnnnnnnnnnnnnnnnnnnnnnnnnnnnnnnnnnnnnnnnnnnnnnnnnnnnnnnnnnnnnnnnnnnnnnnnnnnnnnnnnnnnnnnnnnnnnnnnnnnnnnnnnnnnnnnnnnnnnnnnnnnnnnnnnnnnnnnnnnnnnnnnnnnnnnnnnnnnnnnnnnnnnnnnnnnnnnnnnnnnnnnnnnnnnnnnnnnnnnnnnnnnnnnnnnnnnnnnnnnnnnnnnnnnnnnnnnnnnnnnnnnnnnnnnnnnnnnnnnnnnnnnnnnnnnnnnnnnnnnnnnnnnnnnnnnnnnnnnnnnnnnnnnnnnnnnnnnnnnnnnnnnnnnnnnnnnnnnnnnnnnnnnnnnnnnnnnnnnnnnnnnnnnnnnnnnnnnnnnnnnnnnnnnnnnnnnnnnnnnnnnnnnnnnnnnnnnnnnnnnnnnnnnnnnnnnnnnnnnnnnnnnnnnnnnnnnnnnnnnnnnnnnnnnnnnnnnnnnnnnnnnnnnnnnnnnnnnnnnnnnnnnnnnnnnnnnnnnnnnnnnnnnnnnnnnnnnnnnnnnnnnnnnnnnnnnnnnnnnnnnnnnnnnnnnnnnnnnnnnnnnnnnnnnnnnnnnnnnnnnnnnnnnnnnnnnnnnnnnnnnnnnnnnnnnnnnnnnnnnnnnnnnnnnnnnnnnnnnnnnnnnnnnnnnnnnnnnnnnnnnnnnnnnnnnnnnnnnnnnnnnnnnnnnnnnnnnnnnnnnnnnnnnnnnnnnnnnnnnnnnnnnnnnnnnnnnnnnnnnnnnnnnnnnnnnnnnnnnnnnnnnnnnnnnnnnnnnnnnnnnnnnnnnnnnnnnnnnnnnnnnnnnnnnnnnnnnnnnnnnnnnnnnnnnnnnnnnnnnnnnnnnnnnnnnnnnnnnnnnnnnnnnnnnnnnnnnnnnnnnnnnnnnnnnnnnnnnnnnnnnnnnnnnnnnnnnnnnnnnnnnnnnnnnnnnnnnnnnnnnnnnnnnnnnnnnnnnnnnnnnnnnnnnnnnnnnnnnnnnnnnnnnnnnnnnnnnnnnnnnnnnnnnnnnnnnnnnnnnnnnnnnnnnnnnnnnnnnnnnnnnnnnnnnnnnnnnnnnnnnnnnnnnnnnnnnnnnnnnnnnnnnnnnnnnnnnnnnnnnnnnnnnnnnnnnnnnnnnnnnnnnnnnnnnnnnnnnnnnnnnnnnnnnnnnnnnnnnnnnnnnnnnnnnnnnnnnnnnnnnnnnnnnnnnnnnnnnnnnnnnnnnnnnnnnnnnnnnnnnnnnnnnnnnnnnnnnnnnnnnnnnnnnnnnnnnnnnnnnnnnnnnnnnnnnnnnnnnnnnnnnnnnnnnnnnnnnnnnnnnnnnnnnnnnnnnnnnnnnnnnnnnnnnnnnnnnnnnnnnnnnnnnnnnnnnnnnnnnnnnnnnnnnnnnnnnnnnnnnnnnnnnnnnnnnnnnnnnnnnnnnnnnnnnnnnnnnnnnnnnnnnnnnnnnnnnnnnnnnnnnnnnnnnnnnnnnnnnnnnnnnnnnnnnnnnnnnnnnnnnnnnnnnnnnnnnnnnnnnnnnnnnnnnnnnnnnnnnnnnnnnnnnnnnnnnnnnnnnnnnnnnnnnnnnnnnnnnnnnnnnnnnnnnnnnnnnnnnnnnnnnnnnnnnnnnnnnnnnnnnnnnnnnnnnnnnnnnnnnnnnnnnnnnnnnnnnnnnnnnnnnnnnnnnnnnnnnnnnnnnnnnnnnnnnnnnnnnnnnnnnnnnnnnnnnnnnnnnnnnnnnnnnnnnnnnnnnnnnnnnnnnnnnnnnnnnnnnnnnnnnnnnnnnnnnnnnnnnnnnnnnnnnnnnnnnnnnnnnnnnnnnnnnnnnnnnnnnnnnnnnnnnnnnnnnnnnnnnnnnnnnnnnnnnnnnnnnnnnnnnnnnnnnnnnnnnnnnnnnnnnnnnnnnnnnnnnnnnnnnnnnnnnnnnnnnnnnnnnnnnnnnnnnnnnnnnnnnnnnnnnnnnnnnnnnnnnnnnnnnnnnnnnnnnnnnnnnnnnnnnnnnnnnnnnnnnnnnnnnnnnnnnnnnnnnnnnnnnnnnnnncccacggacaggccgtttgccccttcccactaacatcccgtaaacctccccttaagttcccgcccggccaatgggaactcagcgggaagtaatttagatgtgtatgggatggagaaaatagggcttctattgatagtgggtatcagaacgggtggaagtccacaaattgcgcgaattcatacgaattgcttttccagttacgctaccaactgcggtagatggcctaaaataagggacttacttcccaatcgggcaagtaatccatatgttttaagcccgaaggtcccagaacgattggccgacggggacatcgaccttcctgacgctggcgtcgagcgaggcacgagcatggacgccagcaacatctcctgtagtccatactcgcaagctcgctgcactccaggctcaccaacgttggaaggcaaattcacaaattcacaaccggtaaatatggcttgtgaatttgcaacctgctgatagacgggtaattatgaggctaattcacaaaaaaggggtctcttatacatccgcggaagccgattgtaaacaggatatgatgtatccacgctaccagtctataatacatatagaaatagtatatataatatataatagtattatatattattatatattgatattatatcatctctaccttcccttcatctcttgtttgcggcatgagccactgcaaaccggcattctcccctggtccggctggatataagagataagcgtattttgtgaatttgtcccccaactcactgtgccacaataacacacggattcacaagccatatttaccggttgtgaatttgtgaatctgaccttgccggccttaaggaagtttgaaattagagccctattttggacttgacaaattattccttggtaaatttggtgtataatagctatggggcataatgatgttagcctgtggaacggcctctgtaaaggatcaacaagctatcaaccctccccatgcgacaggagcttcaatgtattataatttgacagacaaaccctggatcagtgtgctacagcttgacgggcattctgccaggctcggcctggctgaggtcctgcgaaaagcacacacactgcgtttggcttacggcaatccgatggaccgcatgtccgttttccgtttcctcctcgccctgggctattggtgttttgccaatacaaaacaagcgccggtatcagataagccactgcctcaggcatggacggactggcttgaacaaaaccaagaatatttcgaattgttcggtgatggccccagattctaccaatccccaggaacatccagaatacgccccagcacggaccttatccacgagcttcccacggcaaacaatttctggcacttccgccatgtgaccgatttcatcgatggcatttgcccagcttgctgcgttaccggtctgctgcgcctgccactctttaccaccgtaggcggcagcggaatcggagccggcatcaacagaactcctcccttctatgccatctggcagggtgatagtctgtcggaatcgatattcctgaattgggaacccacttcccggttgggtgttcctgcctggctgaacccgtttggatcccaaaacgagaaggatgtagccttgctgactggcctcacctggctgccccgcaaggtattcctgcttggcccggtgtcagacggagcaaaatgcagcgcctgcggagaagagcatgagcctctggtctatgcctgcaacaatgaggcggtgaaagtgcctccgaaccttgtctggaacgaccctcacgcgatttaccgggatgacaataatggcctgactgcccaggtggctctgatgtccggggacaaatacactttcgctaacagggattggcataaacccctggtcggcttcttacgggcgaaaggcatgtctcggaccgccacgctgtttttagtgggcttcacaagcgttcaagccaaatgtgtggacgtttgggaaaagaccattgccctatccggaaaaacaagctccgaggaactgctggaccagatatccgaaagagcctactccctgcacaggatgaggaaacaagaccgccggggcgattacaaggaatccgtgggaatcaccgccgtggcggacatcatcccgcacgtagagcatcgggttgacgtccattcgggcgagatggtggaaaacagcggcaatgtctggcaggaagcggatgaagattacggattcttcatgaagcgttttgccgtttctctagtgccggaaattacggttgccgccaagcttgagcgagaacaactggctcggcgcaagccctggcccctaaaaccaaaatcaattaaaaaaccttcatccggaggcgataatgaatgagagcaccgtgaaatttgttcggagcctgggcgaactcaaagagggcgacctgggcttgctcagaaagctcaggggtcgccgtctggatgaatccctgccgggtttcgacctgttttccggcctgtggtggccactccgcagtataagccccaaaacccccaggcggaaggtggtctggctagtcaccaagcttttcgcggaattccgctttgagcaaaagaaaggcgccagcctgccttggctcatgggcagaatatgccgtggacttaaagaagaaaaagagttcccacgtgttttagccaggttcgaccgcttgctcacgctcgagttgaaccaactggaggaaccgctggcgcaagtgctcgcgattttaaaaagacatgacattgccagtctggactgggttgccctcatcgatgacctctccgcttgggaacgggaatcaaacagagcgatatggtcagacacatttatttcagcatttaataatcagcaaggaggaatcaaatgttgattgaaatacacatgatccaaaaccacagcccggccaacctgaaccgggacgacctgggcgcgcccaagacctgttatttcggtggggtgttgcggtcccgcatctccagccagtgcctaaagcggagcatcaggatgagcgatgaattcaaaaacttgctcgggggtatccgtacccgtcggttggctgagttgattacaaaagctgcaggacaggactgcaggaatcaggcagaggaagttctgaacaaagccggtttgaaacacgaaaacggacatagcaagatgctggtgttcatgacccggaacaagatcgatgcccttgctcaaattgtcaccagcgaaggcctgagtgttgcagagaaagccaagaaagcggcagatgtaatatcgggggcaatacattcccctgacatcgctctgtgcggaagaatgctcgagcccgataccaaggacaagaacacagacaaggtcaagtgggaaaataccactgttgaagcagccctgcaggtgtcgcacgccatttcaacccacatcgcccgcccagaaatagattactatgtagcagctgatgacgagcctggcgacgacacaggtgctggattcatagacgaggcgatgtttgcttcggcctgtttctacaaatattactcaattgattggaataccttgataatcaacctccagggtaatgaaaagttggcagctcatactgtcggagcctttatccaggccgctgcactcactaatcccagcggaaagcagaacagctttgccgcacataaccttcccgatggaatattggtagaaataaaagagacacctgtcagctatgcaaatgcctttgtgcgaccggtgggaatcgttaaggattctgacttggtagaacaaagcattggccaactggccaactatgtgaaggatataagtgccggtttcttccctggacagatgaaaggcaacgctctgtggttctcgcccaatggacgttatcccctaaagcctcaacagggcacgctggacataaagccagtttgcaacctgctagaacttgttcgcgaagcagttgagatgttgggttttgaatgggatgatgtaaaaaacgagaaagtagagagttgaaatgtcttctccgcctaataccctgttcctgagattggaggctccccttcaggcctggggaagcaatgaggccaaattcgccgtgcgcaggacagccgacgcgcccaccaaatccggagtggcaggcctgctctgcgctgccctgggaatcagccgggccgaagccggacagtattggctgggtgaaattgccaaattgcgcatgggggtgcggatagaccgccccggcatccgctggtgggattaccatactgtgggagcggagcagaagctgcgcatttctgacctgaaaatgcccaacggcctagttctggttggcactgccctggccaaaaacctgggcgcggacaagatcaaatccaaacccggggctttgctctcccgacgcgagtatttggctgatgccagcttcctggttgcgctccagggtgaaccggatatcgtggcacaactggctgaagcgctgaaaaaaccagtctggacgctttatctggggcgaaaatcctgtcccccctcccgtccggtggatgaacacccgccagggttttatgccagtctgaaagaggctttgcggtcgatcccggcgcaactgagggaaaaaggcgaaccgatacctgacagtgttccctgtgtgctcgactgggttccggcccatgatgacgtgcacgctccgccgaacgccgaagcgcattacgacgtgccggtgtcctttgagcctccccaccacttgccccggctggtgatccgctgtaacctgccattggaccgcaacttcgaggcagagaccgtgctttccggcaaagcctggcaaccgccccgcaaccgggcaaattacgacaatcctgaatacaaaagggtccgcgctgagcgtttggtgatggacaatgccgcctgcatgttctgcaaggcacccgccactactgtgcagcacgtgaattaccgacgcgccggaggcagcgagaagccggaggacttgcgcgccctctgccgcctctgccacgatgcctgcaccatgctggaatatggcagcggcatgaccatggaccgcatagatccctgtgaccccgcctggcgtgagcgcatcttggccaaacgcgaggaaataatcaaattccgctcgctggagcagcgcaggcgcaaactcgatccgaaggaggagaacggatgatgtatctatcccaactgctcatcgacacaggcggcaaccctgaccggccaaggcccgggcgcttgtggctgaacaatatctataatgtccaccggcggctcagcatggctttccccatgcgcaagcgcaaggaaggagacccgaggtttctgcagccctttgaccccgcagattttgaaaagcgccagttcctctttcgggtggacaacaacaccgatggagaaaatcaaagggcgatggttttggtgcagtcgtccctgccgccggattgggactgggctttccagaatgccacgggatttttggcagcccctccccaggttaaggaatacgatccccagttctcagcaggtcagcggctgcgcttccgcatcctcgtgaatgccagtgtcaaacgcaaaatcgacgagttgcgggaaggacccggaggaaaggaaaaaacgggaagggttctgcacaaacggatcgcccttacctgggacacaaattccaacccaaaggatgcggtggcgcaatggtttgccgccaaggctggcagactgggcttcacgcccggggagaccgaactggtaagcctgggctgggtatacggttccaaaccggagccccggggaaattcgccccggcgtgagaacgaataccgtcccctgagataccgttccgccctgctggaaggttatctgacagtggatgatgcctttctgttccgggaagccttggaaaaaggtatcggcagcgccaaaggaatgggcttcggcctcctttccgtggttccggcaagtgatgcgtaacagagaccttcacctaatgccaaaaatgcgggaccgcttcacctatctctatgtggagcatgccaaaatagacaaagaacaacaggcaatcgcctttcacgatgccatgggctccactcctgttccctgcgctggactggccctgctgatgctggggccaggcgtatccatcacccatgcggccatccttgttttagcagaatgcggctgtttggtggcttgggtgggggaacagggagtccgcttttactcatccgggacagggaccacccgtagttccgccaaccttatacgtcaggctgccgcctggtcaaatcgagatacgcatctgcggatagttcgcagaatgtatgaattgaggttcaaggaaaaactggacccaaccctctctcttgaacagataaggggaaaagagggagcgagagtacgggatacctatttcagactttcaaaagaattcgatgtgcccatgagtgcgaggaattacgacaggagcaactggaataaaaccgaccccatcaacagagccctgtccgttgccaattcctgtctctatggcatctgccacgccgcgatagtggccgctggctattcacctgccctgggtttcgttcatactggcaaacaactgtcatttgtttatgacattgccgatctttataaaatggaaacctccgtgcccgcggctttcatagccacagccgcaggggtcgataacctggacagaaggacacgcattgcctgccgtgaccagttctatcaatttggtctgctaaagaagatagtggccgacattcacgcccttttcggtattctggaaacttcggacgatgagccagaccttgctgatgtcgatccagccgtgccaggcgggctttggaacccagatgataaagtgagccccggcggcttgtcatggggtctggatgatcctggaggccatgatgatggttctggtgcttgaaaaagttccctctggcctgagaggagaaattacacgctggctcctcgaaatcaaggctggagtatttgtcggtcaggtatcggccatgataagggaaaagctgtgggacaaggccaggtctggttgtgccggtggaacttgtatcatgatttacagcaagcattgcgaacaaggctttggaattgagttttggggtgccgcggaaaggatagtgacagaatgggaaggattgaaattgatgaccaagcatccgtgatccatacttgaagcctgttcaatggcctcaaagcgtctactttcgaagtgtgttccccacctgcgtgggggtgaaccggaagctggacgccacacccattgtcgcatagagtgttccccacctgcgtgggggtgaaccgatgccgcagaatactatacctacaagggtaatgtgttccccacctgcgtgggggtgaaccgttcaataaa

SEQ ID NO: 1107 - DNA, 103329 bp, Artificial Sequence
  Synthetic Oligonucleotide
  misc_feature (1)..(95947): n is a, c, g, or t
nnnnnnnnnnnnnnnnnnnnnnnnnnnnnnnnnnnnnnnnnnnnnnnnnnnnnnnnnnnnnnnnnnnnnnnnnnnnnnnnnnnnnnnnnnnnnnnnnnnnnnnnnnnnnnnnnnnnnnnnnnnnnnnnnnnnnnnnnnnnnnnnnnnnnnnnnnnnnnnnnnnnnnnnnnnnnnnnnnnnnnnnnnnnnnnnnnnnnnnnnnnnnnnnnnnnnnnnnnnnnnnnnnnnnnnnnnnnnnnnnnnnnnnnnnnnnnnnnnnnnnnnnnnnnnnnnnnnnnnnnnnnnnnnnnnnnnnnnnnnnnnnnnnnnnnnnnnnnnnnnnnnnnnnnnnnnnnnnnnnnnnnnnnnnnnnnnnnnnnnnnnnnnnnnnnnnnnnnnnnnnnnnnnnnnnnnnnnnnnnnnnnnnnnnnnnnnnnnnnnnnnnnnnnnnnnnnnnnnnnnnnnnnnnnnnnnnnnnnnnnnnnnnnnnnnnnnnnnnnnnnnnnnnnnnnnnnnnnnnnnnnnnnnnnnnnnnnnnnnnnnnnnnnnnnnnnnnnnnnnnnnnnnnnnnnnnnnnnnnnnnnnnnnnnnnnnnnnnnnnnnnnnnnnnnnnnnnnnnnnnnnnnnnnnnnnnnnnnnnnnnnnnnnnnnnnnnnnnnnnnnnnnnnnnnnnnnnnnnnnnnnnnnnnnnnnnnnnnnnnnnnnnnnnnnnnnnnnnnnnnnnnnnnnnnnnnnnnnnnnnnnnnnnnnnnnnnnnnnnnnnnnnnnnnnnnnnnnnnnnnnnnnnnnnnnnnnnnnnnnnnnnnnnnnnnnnnnnnnnnnnnnnnnnnnnnnnnnnnnnnnnnnnnnnnnnnnnnnnnnnnnnnnnnnnnnnnnnnnnnnnnnnnnnnnnnnnnnnnnnnnnnnnnnnnnnnnnnnnnnnnnnnnnnnnnnnnnnnnnnnnnnnnnnnnnnnnnnnnnnnnnnnnnnnnnnnnnnnnnnnnnnnnnnnnnnnnnnnnnnnnnnnnnnnnnnnnnnnnnnnnnnnnnnnnnnnnnnnnnnnnnnnnnnnnnnnnnnnnnnnnnnnnnnnnnnnnnnnnnnnnnnnnnnnnnnnnnnnnnnnnnnnnnnnnnnnnnnnnnnnnnnnnnnnnnnnnnnnnnnnnnnnnnnnnnnnnnnnnnnnnnnnnnnnnnnnnnnnnnnnnnnnnnnnnnnnnnnnnnnnnnnnnnnnnnnnnnnnnnnnnnnnnnnnnnnnnnnnnnnnnnnnnnnnnnnnnnnnnnnnnnnnnnnnnnnnnnnnnnnnnnnnnnnnnnnnnnnnnnnnnnnnnnnnnnnnnnnnnnnnnnnnnnnnnnnnnnnnnnnnnnnnnnnnnnnnnnnnnnnnnnnnnnnnnnnnnnnnnnnnnnnnnnnnnnnnnnnnnnnnnnnnnnnnnnnnnnnnnnnnnnnnnnnnnnnnnnnnnnnnnnnnnnnnnnnnnnnnnnnnnnnnnnnnnnnnnnnnnnnnnnnnnnnnnnnnnnnnnnnnnnnnnnnnnnnnnnnnnnnnnnnnnnnnnnnnnnnnnnnnnnnnnnnnnnnnnnnnnnnnnnnnnnnnnnnnnnnnnnnnnnnnnnnnnnnnnnnnnnnnnnnnnnnnnnnnnnnnnnnnnnnnnnnnnnnnnnnnnnnnnnnnnnnnnnnnnnnnnnnnnnnnnnnnnnnnnnnnnnnnnnnnnnnnnnnnnnnnnnnnnnnnnnnnnnnnnnnnnnnnnnnnnnnnnnnnnnnnnnnnnnnnnnnnnnnnnnnnnnnnnnnnnnnnnnnnnnnnnnnnnnnnnnnnnnnnnnnnnnnnnnnnnnnnnnnnnnnnnnnnnnnnnnnnnnnnnnnnnnnnnnnnnnnnnnnnnnnnnnnnnnnnnnnnnnnnnnnnnnnnnnnnnnnnnnnnnnnnnnnnnnnnnnnnnnnnnnnnnnnnnnnnnnnnnnnnnnnnnnnnnnnnnnnnnnnnnnnnnnnnnnnnnnnnnnnnnnnnnnnnnnnnnnnnnnnnnnnnnnnnnnnnnnnnnnnnnnnnnnnnnnnnnnnnnnnnnnnnnnnnnnnnnnnnnnnnnnnnnnnnnnnnnnnnnnnnnnnnnnnnnnnnnnnnnnnnnnnnnnnnnnnnnnnnnnnnnnnnnnnnnnnnnnnnnnnnnnnnnnnnnnnnnnnnnnnnnnnnnnnnnnnnnnnnnnnnnnnnnnnnnnnnnnnnnnnnnnnnnnnnnnnnnnnnnnnnnnnnnnnnnnnnnnnnnnnnnnnnnnnnnnnnnnnnnnnnnnnnnnnnnnnnnnnnnnnnnnnnnnnnnnnnnnnnnnnnnnnnnnnnnnnnnnnnnnnnnnnnnnnnnnnnnnnnnnnnnnnnnnnnnnnnnnnnnnnnnnnnnnnnnnnnnnnnnnnnnnnnnnnnnnnnnnnnnnnnnnnnnnnnnnnnnnnnnnnnnnnnnnnnnnnnnnnnnnnnnnnnnnnnnnnnnnnnnnnnnnnnnnnnnnnnnnnnnnnnnnnnnnnnnnnnnnnnnnnnnnnnnnnnnnnnnnnnnnnnnnnnnnnnnnnnnnnnnnnnnnnnnnnnnnnnnnnnnnnnnnnnnnnnnnnnnnnnnnnnnnnnnnnnnnnnnnnnnnnnnnnnnnnnnnnnnnnnnnnnnnnnnnnnnnnnnnnnnnnnnnnnnnnnnnnnnnnnnnnnnnnnnnnnnnnnnnnnnnnnnnnnnnnnnnnnnnnnnnnnnnnnnnnnnnnnnnnnnnnnnnnnnnnnnnnnnnnnnnnnnnnnnnnnnnnnnnnnnnnnnnnnnnnnnnnnnnnnnnnnnnnnnnnnnnnnnnnnnnnnnnnnnnnnnnnnnnnnnnnnnnnnnnnnnnnnnnnnnnnnnnnnnnnnnnnnnnnnnnnnnnnnnnnnnnnnnnnnnnnnnnnnnnnnnnnnnnnnnnnnnnnnnnnnnnnnnnnnnnnnnnnnnnnnnnnnnnnnnnnnnnnnnnnnnnnnnnnnnnnnnnnnnnnnnnnnnnnnnnnnnnnnnnnnnnnnnnnnnnnnnnnnnnnnnnnnnnnnnnnnnnnnnnnnnnnnnnnnnnnnnnnnnnnnnnnnnnnnnnnnnnnnnnnnnnnnnnnnnnnnnnnnnnnnnnnnnnnnnnnnnnnnnnnnnnnnnnnnnnnnnnnnnnnnnnnnnnnnnnnnnnnnnnnnnnnnnnnnnnnnnnnnnnnnnnnnnnnnnnnnnnnnnnnnnnnnnnnnnnnnnnnnnnnnnnnnnnnnnnnnnnnnnnnnnnnnnnnnnnnnnnnnnnnnnnnnnnnnnnnnnnnnnnnnnnnnnnnnnnnnnnnnnnnnnnnnnnnnnnnnnnnnnnnnnnnnnnnnnnnnnnnnnnnnnnnnnnnnnnnnnnnnnnnnnnnnnnnnnnnnnnnnnnnnnnnnnnnnnnnnnnnnnnnnnnnnnnnnnnnnnnnnnnnnnnnnnnnnnnnnnnnnnnnnnnnnnnnnnnnnnnnnnnnnnnnnnnnnnnnnnnnnnnnnnnnnnnnnnnnnnnnnnnnnnnnnnnnnnnnnnnnnnnnnnnnnnnnnnnnnnnnnnnnnnnnnnnnnnnnnnnnnnnnnnnnnnnnnnnnnnnnnnnnnnnnnnnnnnnnnnnnnnnnnnnnnnnnnnnnnnnnnnnnnnnnnnnnnnnnnnnnnnnnnnnnnnnnnnnnnnnnnnnnnnnnnnnnnnnnnnnnnnnnnnnnnnnnnnnnnnnnnnnnnnnnnnnnnnnnnnnnnnnnnnnnnnnnnnnnnnnnnnnnnnnnnnnnnnnnnnnnnnnnnnnnnnnnnnnnnnnnnnnnnnnnnnnnnnnnnnnnnnnnnnnnnnnnnnnnnnnnnnnnnnnnnnnnnnnnnnnnnnnnnnnnnnnnnnnnnnnnnnnnnnnnnnnnnnnnnnnnnnnnnnnnnnnnnnnnnnnnnnnnnnnnnnnnnnnnnnnnnnnnnnnnnnnnnnnnnnnnnnnnnnnnnnnnnnnnnnnnnnnnnnnnnnnnnnnnnnnnnnnnnnnnnnnnnnnnnnnnnnnnnnnnnnnnnnnnnnnnnnnnnnnnnnnnnnnnnnnnnnnnnnnnnnnnnnnnnnnnnnnnnnnnnnnnnnnnnnnnnnnnnnnnnnnnnnnnnnnnnnnnnnnnnnnnnnnnnnnnnnnnnnnnnnnnnnnnnnnnnnnnnnnnnnnnnnnnnnnnnnnnnnnnnnnnnnnnnnnnnnnnnnnnnnnnnnnnnnnnnnnnnnnnnnnnnnnnnnnnnnnnnnnnnnnnnnnnnnnnnnnnnnnnnnnnnnnnnnnnnnnnnnnnnnnnnnnnnnnnnnnnnnnnnnnnnnnnnnnnnnnnnnnnnnnnnnnnnnnnnnnnnnnnnnnnnnnnnnnnnnnnnnnnnnnnnnnnnnnnnnnnnnnnnnnnnnnnnnnnnnnnnnnnnnnnnnnnnnnnnnnnnnnnnnnnnnnnnnnnnnnnnnnnnnnnnnnnnnnnnnnnnnnnnnnnnnnnnnnnnnnnnnnnnnnnnnnnnnnnnnnnnnnnnnnnnnnnnnnnnnnnnnnnnnnnnnnnnnnnnnnnnnnnnnnnnnnnnnnnnnnnnnnnnnnnnnnnnnnnnnnnnnnnnnnnnnnnnnnnnnnnnnnnnnnnnnnnnnnnnnnnnnnnnnnnnnnnnnnnnnnnnnnnnnnnnnnnnnnnnnnnnnnnnnnnnnnnnnnnnnnnnnnnnnnnnnnnnnnnnnnnnnnnnnnnnnnnnnnnnnnnnnnnnnnnnnnnnnnnnnnnnnnnnnnnnnnnnnnnnnnnnnnnnnnnnnnnnnnnnnnnnnnnnnnnnnnnnnnnnnnnnnnnnnnnnnnnnnnnnnnnnnnnnnnnnnnnnnnnnnnnnnnnnnnnnnnnnnnnnnnnnnnnnnnnnnnnnnnnnnnnnnnnnnnnnnnnnnnnnnnnnnnnnnnnnnnnnnnnnnnnnnnnnnnnnnnnnnnnnnnnnnnnnnnnnnnnnnnnnnnnnnnnnnnnnnnnnnnnnnnnnnnnnnnnnnnnnnnnnnnnnnnnnnnnnnnnnnnnnnnnnnnnnnnnnnnnnnnnnnnnnnnnnnnnnnnnnnnnnnnnnnnnnnnnnnnnnnnnnnnnnnnnnnnnnnnnnnnnnnnnnnnnnnnnnnnnnnnnnnnnnnnnnnnnnnnnnnnnnnnnnnnnnnnnnnnnnnnnnnnnnnnnnnnnnnnnnnnnnnnnnnnnnnnnnnnnnnnnnnnnnnnnnnnnnnnnnnnnnnnnnnnnnnnnnnnnnnnnnnnnnnnnnnnnnnnnnnnnnnnnnnnnnnnnnnnnnnnnnnnnnnnnnnnnnnnnnnnnnnnnnnnnnnnnnnnnnnnnnnnnnnnnnnnnnnnnnnnnnnnnnnnnnnnnnnnnnnnnnnnnnnnnnnnnnnnnnnnnnnnnnnnnnnnnnnnnnnnnnnnnnnnnnnnnnnnnnnnnnnnnnnnnnnnnnnnnnnnnnnnnnnnnnnnnnnnnnnnnnnnnnnnnnnnnnnnnnnnnnnnnnnnnnnnnnnnnnnnnnnnnnnnnnnnnnnnnnnnnnnnnnnnnnnnnnnnnnnnnnnnnnnnnnnnnnnnnnnnnnnnnnnnnnnnnnnnnnnnnnnnnnnnnnnnnnnnnnnnnnnnnnnnnnnnnnnnnnnnnnnnnnnnnnnnnnnnnnnnnnnnnnnnnnnnnnnnnnnnnnnnnnnnnnnnnnnnnnnnnnnnnnnnnnnnnnnnnnnnnnnnnnnnnnnnnnnnnnnnnnnnnnnnnnnnnnnnnnnnnnnnnnnnnnnnnnnnnnnnnnnnnnnnnnnnnnnnnnnnnnnnnnnnnnnnnnnnnnnnnnnnnnnnnnnnnnnnnnnnnnnnnnnnnnnnnnnnnnnnnnnnnnnnnnnnnnnnnnnnnnnnnnnnnnnnnnnnnnnnnnnnnnnnnnnnnnnnnnnnnnnnnnnnnnnnnnnnnnnnnnnnnnnnnnnnnnnnnnnnnnnnnnnnnnnnnnnnnnnnnnnnnnnnnnnnnnnnnnnnnnnnnnnnnnnnnnnnnnnnnnnnnnnnnnnnnnnnnnnnnnnnnnnnnnnnnnnnnnnnnnnnnnnnnnnnnnnnnnnnnnnnnnnnnnnnnnnnnnnnnnnnnnnnnnnnnnnnnnnnnnnnnnnnnnnnnnnnnnnnnnnnnnnnnnnnnnnnnnnnnnnnnnnnnnnnnnnnnnnnnnnnnnnnnnnnnnnnnnnnnnnnnnnnnnnnnnnnnnnnnnnnnnnnnnnnnnnnnnnnnnnnnnnnnnnnnnnnnnnnnnnnnnnnnnnnnnnnnnnnnnnnnnnnnnnnnnnnnnnnnnnnnnnnnnnnnnnnnnnnnnnnnnnnnnnnnnnnnnnnnnnnnnnnnnnnnnnnnnnnnnnnnnnnnnnnnnnnnnnnnnnnnnnnnnnnnnnnnnnnnnnnnnnnnnnnnnnnnnnnnnnnnnnnnnnnnnnnnnnnnnnnnnnnnnnnnnnnnnnnnnnnnnnnnnnnnnnnnnnnnnnnnnnnnnnnnnnnnnnnnnnnnnnnnnnnnnnnnnnnnnnnnnnnnnnnnnnnnnnnnnnnnnnnnnnnnnnnnnnnnnnnnnnnnnnnnnnnnnnnnnnnnnnnnnnnnnnnnnnnnnnnnnnnnnnnnnnnnnnnnnnnnnnnnnnnnnnnnnnnnnnnnnnnnnnnnnnnnnnnnnnnnnnnnnnnnnnnnnnnnnnnnnnnnnnnnnnnnnnnnnnnnnnnnnnnnnnnnnnnnnnnnnnnnnnnnnnnnnnnnnnnnnnnnnnnnnnnnnnnnnnnnnnnnnnnnnnnnnnnnnnnnnnnnnnnnnnnnnnnnnnnnnnnnnnnnnnnnnnnnnnnnnnnnnnnnnnnnnnnnnnnnnnnnnnnnnnnnnnnnnnnnnnnnnnnnnnnnnnnnnnnnnnnnnnnnnnnnnnnnnnnnnnnnnnnnnnnnnnnnnnnnnnnnnnnnnnnnnnnnnnnnnnnnnnnnnnnnnnnnnnnnnnnnnnnnnnnnnnnnnnnnnnnnnnnnnnnnnnnnnnnnnnnnnnnnnnnnnnnnnnnnnnnnnnnnnnnnnnnnnnnnnnnnnnnnnnnnnnnnnnnnnnnnnnnnnnnnnnnnnnnnnnnnnnnnnnnnnnnnnnnnnnnnnnnnnnnnnnnnnnnnnnnnnnnnnnnnnnnnnnnnnnnnnnnnnnnnnnnnnnnnnnnnnnnnnnnnnnnnnnnnnnnnnnnnnnnnnnnnnnnnnnnnnnnnnnnnnnnnnnnnnnnnnnnnnnnnnnnnnnnnnnnnnnnnnnnnnnnnnnnnnnnnnnnnnnnnnnnnnnnnnnnnnnnnnnnnnnnnnnnnnnnnnnnnnnnnnnnnnnnnnnnnnnnnnnnnnnnnnnnnnnnnnnnnnnnnnnnnnnnnnnnnnnnnnnnnnnnnnnnnnnnnnnnnnnnnnnnnnnnnnnnnnnnnnnnnnnnnnnnnnnnnnnnnnnnnnnnnnnnnnnnnnnnnnnnnnnnnnnnnnnnnnnnnnnnnnnnnnnnnnnnnnnnnnnnnnnnnnnnnnnnnnnnnnnnnnnnnnnnnnnnnnnnnnnnnnnnnnnnnnnnnnnnnnnnnnnnnnnnnnnnnnnnnnnnnnnnnnnnnnnnnnnnnnnnnnnnnnnnnnnnnnnnnnnnnnnnnnnnnnnnnnnnnnnnnnnnnnnnnnnnnnnnnnnnnnnnnnnnnnnnnnnnnnnnnnnnnnnnnnnnnnnnnnnnnnnnnnnnnnnnnnnnnnnnnnnnnnnnnnnnnnnnnnnnnnnnnnnnnnnnnnnnnnnnnnnnnnnnnnnnnnnnnnnnnnnnnnnnnnnnnnnnnnnnnnnnnnnnnnnnnnnnnnnnnnnnnnnnnnnnnnnnnnnnnnnnnnnnnnnnnnnnnnnnnnnnnnnnnnnnnnnnnnnnnnnnnnnnnnnnnnnnnnnnnnnnnnnnnnnnnnnnnnnnnnnnnnnnnnnnnnnnnnnnnnnnnnnnnnnnnnnnnnnnnnnnnnnnnnnnnnnnnnnnnnnnnnnnnnnnnnnnnnnnnnnnnnnnnnnnnnnnnnnnnnnnnnnnnnnnnnnnnnnnnnnnnnnnnnnnnnnnnnnnnnnnnnnnnnnnnnnnnnnnnnnnnnnnnnnnnnnnnnnnnnnnnnnnnnnnnnnnnnnnnnnnnnnnnnnnnnnnnnnnnnnnnnnnnnnnnnnnnnnnnnnnnnnnnnnnnnnnnnnnnnnnnnnnnnnnnnnnnnnnnnnnnnnnnnnnnnnnnnnnnnnnnnnnnnnnnnnnnnnnnnnnnnnnnnnnnnnnnnnnnnnnnnnnnnnnnnnnnnnnnnnnnnnnnnnnnnnnnnnnnnnnnnnnnnnnnnnnnnnnnnnnnnnnnnnnnnnnnnnnnnnnnnnnnnnnnnnnnnnnnnnnnnnnnnnnnnnnnnnnnnnnnnnnnnnnnnnnnnnnnnnnnnnnnnnnnnnnnnnnnnnnnnnnnnnnnnnnnnnnnnnnnnnnnnnnnnnnnnnnnnnnnnnnnnnnnnnnnnnnnnnnnnnnnnnnnnnnnnnnnnnnnnnnnnnnnnnnnnnnnnnnnnnnnnnnnnnnnnnnnnnnnnnnnnnnnnnnnnnnnnnnnnnnnnnnnnnnnnnnnnnnnnnnnnnnnnnnnnnnnnnnnnnnnnnnnnnnnnnnnnnnnnnnnnnnnnnnnnnnnnnnnnnnnnnnnnnnnnnnnnnnnnnnnnnnnnnnnnnnnnnnnnnnnnnnnnnnnnnnnnnnnnnnnnnnnnnnnnnnnnnnnnnnnnnnnnnnnnnnnnnnnnnnnnnnnnnnnnnnnnnnnnnnnnnnnnnnnnnnnnnnnnnnnnnnnnnnnnnnnnnnnnnnnnnnnnnnnnnnnnnnnnnnnnnnnnnnnnnnnnnnnnnnnnnnnnnnnnnnnnnnnnnnnnnnnnnnnnnnnnnnnnnnnnnnnnnnnnnnnnnnnnnnnnnnnnnnnnnnnnnnnnnnnnnnnnnnnnnnnnnnnnnnnnnnnnnnnnnnnnnnnnnnnnnnnnnnnnnnnnnnnnnnnnnnnnnnnnnnnnnnnnnnnnnnnnnnnnnnnnnnnnnnnnnnnnnnnnnnnnnnnnnnnnnnnnnnnnnnnnnnnnnnnnnnnnnnnnnnnnnnnnnnnnnnnnnnnnnnnnnnnnnnnnnnnnnnnnnnnnnnnnnnnnnnnnnnnnnnnnnnnnnnnnnnnnnnnnnnnnnnnnnnnnnnnnnnnnnnnnnnnnnnnnnnnnnnnnnnnnnnnnnnnnnnnnnnnnnnnnnnnnnnnnnnnnnnnnnnnnnnnnnnnnnnnnnnnnnnnnnnnnnnnnnnnnnnnnnnnnnnnnnnnnnnnnnnnnnnnnnnnnnnnnnnnnnnnnnnnnnnnnnnnnnnnnnnnnnnnnnnnnnnnnnnnnnnnnnnnnnnnnnnnnnnnnnnnnnnnnnnnnnnnnnnnnnnnnnnnnnnnnnnnnnnnnnnnnnnnnnnnnnnnnnnnnnnnnnnnnnnnnnnnnnnnnnnnnnnnnnnnnnnnnnnnnnnnnnnnnnnnnnnnnnnnnnnnnnnnnnnnnnnnnnnnnnnnnnnnnnnnnnnnnnnnnnnnnnnnnnnnnnnnnnnnnnnnnnnnnnnnnnnnnnnnnnnnnnnnnnnnnnnnnnnnnnnnnnnnnnnnnnnnnnnnnnnnnnnnnnnnnnnnnnnnnnnnnnnnnnnnnnnnnnnnnnnnnnnnnnnnnnnnnnnnnnnnnnnnnnnnnnnnnnnnnnnnnnnnnnnnnnnnnnnnnnnnnnnnnnnnnnnnnnnnnnnnnnnnnnnnnnnnnnnnnnnnnnnnnnnnnnnnnnnnnnnnnnnnnnnnnnnnnnnnnnnnnnnnnnnnnnnnnnnnnnnnnnnnnnnnnnnnnnnnnnnnnnnnnnnnnnnnnnnnnnnnnnnnnnnnnnnnnnnnnnnnnnnnnnnnnnnnnnnnnnnnnnnnnnnnnnnnnnnnnnnnnnnnnnnnnnnnnnnnnnnnnnnnnnnnnnnnnnnnnnnnnnnnnnnnnnnnnnnnnnnnnnnnnnnnnnnnnnnnnnnnnnnnnnnnnnnnnnnnnnnnnnnnnnnnnnnnnnnnnnnnnnnnnnnnnnnnnnnnnnnnnnnnnnnnnnnnnnnnnnnnnnnnnnnnnnnnnnnnnnnnnnnnnnnnnnnnnnnnnnnnnnnnnnnnnnnnnnnnnnnnnnnnnnnnnnnnnnnnnnnnnnnnnnnnnnnnnnnnnnnnnnnnnnnnnnnnnnnnnnnnnnnnnnnnnnnnnnnnnnnnnnnnnnnnnnnnnnnnnnnnnnnnnnnnnnnnnnnnnnnnnnnnnnnnnnnnnnnnnnnnnnnnnnnnnnnnnnnnnnnnnnnnnnnnnnnnnnnnnnnnnnnnnnnnnnnnnnnnnnnnnnnnnnnnnnnnnnnnnnnnnnnnnnnnnnnnnnnnnnnnnnnnnnnnnnnnnnnnnnnnnnnnnnnnnnnnnnnnnnnnnnnnnnnnnnnnnnnnnnnnnnnnnnnnnnnnnnnnnnnnnnnnnnnnnnnnnnnnnnnnnnnnnnnnnnnnnnnnnnnnnnnnnnnnnnnnnnnnnnnnnnnnnnnnnnnnnnnnnnnnnnnnnnnnnnnnnnnnnnnnnnnnnnnnnnnnnnnnnnnnnnnnnnnnnnnnnnnnnnnnnnnnnnnnnnnnnnnnnnnnnnnnnnnnnnnnnnnnnnnnnnnnnnnnnnnnnnnnnnnnnnnnnnnnnnnnnnnnnnnnnnnnnnnnnnnnnnnnnnnnnnnnnnnnnnnnnnnnnnnnnnnnnnnnnnnnnnnnnnnnnnnnnnnnnnnnnnnnnnnnnnnnnnnnnnnnnnnnnnnnnnnnnnnnnnnnnnnnnnnnnnnnnnnnnnnnnnnnnnnnnnnnnnnnnnnnnnnnnnnnnnnnnnnnnnnnnnnnnnnnnnnnnnnnnnnnnnnnnnnnnnnnnnnnnnnnnnnnnnnnnnnnnnnnnnnnnnnnnnnnnnnnnnnnnnnnnnnnnnnnnnnnnnnnnnnnnnnnnnnnnnnnnnnnnnnnnnnnnnnnnnnnnnnnnnnnnnnnnnnnnnnnnnnnnnnnnnnnnnnnnnnnnnnnnnnnnnnnnnnnnnnnnnnnnnnnnnnnnnnnnnnnnnnnnnnnnnnnnnnnnnnnnnnnnnnnnnnnnnnnnnnnnnnnnnnnnnnnnnnnnnnnnnnnnnnnnnnnnnnnnnnnnnnnnnnnnnnnnnnnnnnnnnnnnnnnnnnnnnnnnnnnnnnnnnnnnnnnnnnnnnnnnnnnnnnnnnnnnnnnnnnnnnnnnnnnnnnnnnnnnnnnnnnnnnnnnnnnnnnnnnnnnnnnnnnnnnnnnnnnnnnnnnnnnnnnnnnnnnnnnnnnnnnnnnnnnnnnnnnnnnnnnnnnnnnnnnnnnnnnnnnnnnnnnnnnnnnnnnnnnnnnnnnnnnnnnnnnnnnnnnnnnnnnnnnnnnnnnnnnnnnnnnnnnnnnnnnnnnnnnnnnnnnnnnnnnnnnnnnnnnnnnnnnnnnnnnnnnnnnnnnnnnnnnnnnnnnnnnnnnnnnnnnnnnnnnnnnnnnnnnnnnnnnnnnnnnnnnnnnnnnnnnnnnnnnnnnnnnnnnnnnnnnnnnnnnnnnnnnnnnnnnnnnnnnnnnnnnnnnnnnnnnnnnnnnnnnnnnnnnnnnnnnnnnnnnnnnnnnnnnnnnnnnnnnnnnnnnnnnnnnnnnnnnnnnnnnnnnnnnnnnnnnnnnnnnnnnnnnnnnnnnnnnnnnnnnnnnnnnnnnnnnnnnnnnnnnnnnnnnnnnnnnnnnnnnnnnnnnnnnnnnnnnnnnnnnnnnnnnnnnnnnnnnnnnnnnnnnnnnnnnnnnnnnnnnnnnnnnnnnnnnnnnnnnnnnnnnnnnnnnnnnnnnnnnnnnnnnnnnnnnnnnnnnnnnnnnnnnnnnnnnnnnnnnnnnnnnnnnnnnnnnnnnnnnnnnnnnnnnnnnnnnnnnnnnnnnnnnnnnnnnnnnnnnnnnnnnnnnnnnnnnnnnnnnnnnnnnnnnnnnnnnnnnnnnnnnnnnnnnnnnnnnnnnnnnnnnnnnnnnnnnnnnnnnnnnnnnnnnnnnnnnnnnnnnnnnnnnnnnnnnnnnnnnnnnnnnnnnnnnnnnnnnnnnnnnnnnnnnnnnnnnnnnnnnnnnnnnnnnnnnnnnnnnnnnnnnnnnnnnnnnnnnnnnnnnnnnnnnnnnnnnnnnnnnnnnnnnnnnnnnnnnnnnnnnnnnnnnnnnnnnnnnnnnnnnnnnnnnnnnnnnnnnnnnnnnnnnnnnnnnnnnnnnnnnnnnnnnnnnnnnnnnnnnnnnnnnnnnnnnnnnnnnnnnnnnnnnnnnnnnnnnnnnnnnnnnnnnnnnnnnnnnnnnnnnnnnnnnnnnnnnnnnnnnnnnnnnnnnnnnnnnnnnnnnnnnnnnnnnnnnnnnnnnnnnnnnnnnnnnnnnnnnnnnnnnnnnnnnnnnnnnnnnnnnnnnnnnnnnnnnnnnnnnnnnnnnnnnnnnnnnnnnnnnnnnnnnnnnnnnnnnnnnnnnnnnnnnnnnnnnnnnnnnnnnnnnnnnnnnnnnnnnnnnnnnnnnnnnnnnnnnnnnnnnnnnnnnnnnnnnnnnnnnnnnnnnnnnnnnnnnnnnnnnnnnnnnnnnnnnnnnnnnnnnnnnnnnnnnnnnnnnnnnnnnnnnnnnnnnnnnnnnnnnnnnnnnnnnnnnnnnnnnnnnnnnnnnnnnnnnnnnnnnnnnnnnnnnnnnnnnnnnnnnnnnnnnnnnnnnnnnnnnnnnnnnnnnnnnnnnnnnnnnnnnnnnnnnnnnnnnnnnnnnnnnnnnnnnnnnnnnnnnnnnnnnnnnnnnnnnnnnnnnnnnnnnnnnnnnnnnnnnnnnnnnnnnnnnnnnnnnnnnnnnnnnnnnnnnnnnnnnnnnnnnnnnnnnnnnnnnnnnnnnnnnnnnnnnnnnnnnnnnnnnnnnnnnnnnnnnnnnnnnnnnnnnnnnnnnnnnnnnnnnnnnnnnnnnnnnnnnnnnnnnnnnnnnnnnnnnnnnnnnnnnnnnnnnnnnnnnnnnnnnnnnnnnnnnnnnnnnnnnnnnnnnnnnnnnnnnnnnnnnnnnnnnnnnnnnnnnnnnnnnnnnnnnnnnnnnnnnnnnnnnnnnnnnnnnnnnnnnnnnnnnnnnnnnnnnnnnnnnnnnnnnnnnnnnnnnnnnnnnnnnnnnnnnnnnnnnnnnnnnnnnnnnnnnnnnnnnnnnnnnnnnnnnnnnnnnnnnnnnnnnnnnnnnnnnnnnnnnnnnnnnnnnnnnnnnnnnnnnnnnnnnnnnnnnnnnnnnnnnnnnnnnnnnnnnnnnnnnnnnnnnnnnnnnnnnnnnnnnnnnnnnnnnnnnnnnnnnnnnnnnnnnnnnnnnnnnnnnnnnnnnnnnnnnnnnnnnnnnnnnnnnnnnnnnnnnnnnnnnnnnnnnnnnnnnnnnnnnnnnnnnnnnnnnnnnnnnnnnnnnnnnnnnnnnnnnnnnnnnnnnnnnnnnnnnnnnnnnnnnnnnnnnnnnnnnnnnnnnnnnnnnnnnnnnnnnnnnnnnnnnnnnnnnnnnnnnnnnnnnnnnnnnnnnnnnnnnnnnnnnnnnnnnnnnnnnnnnnnnnnnnnnnnnnnnnnnnnnnnnnnnnnnnnnnnnnnnnnnnnnnnnnnnnnnnnnnnnnnnnnnnnnnnnnnnnnnnnnnnnnnnnnnnnnnnnnnnnnnnnnnnnnnnnnnnnnnnnnnnnnnnnnnnnnnnnnnnnnnnnnnnnnnnnnnnnnnnnnnnnnnnnnnnnnnnnnnnnnnnnnnnnnnnnnnnnnnnnnnnnnnnnnnnnnnnnnnnnnnnnnnnnnnnnnnnnnnnnnnnnnnnnnnnnnnnnnnnnnnnnnnnnnnnnnnnnnnnnnnnnnnnnnnnnnnnnnnnnnnnnnnnnnnnnnnnnnnnnnnnnnnnnnnnnnnnnnnnnnnnnnnnnnnnnnnnnnnnnnnnnnnnnnnnnnnnnnnnnnnnnnnnnnnnnnnnnnnnnnnnnnnnnnnnnnnnnnnnnnnnnnnnnnnnnnnnnnnnnnnnnnnnnnnnnnnnnnnnnnnnnnnnnnnnnnnnnnnnnnnnnnnnnnnnnnnnnnnnnnnnnnnnnnnnnnnnnnnnnnnnnnnnnnnnnnnnnnnnnnnnnnnnnnnnnnnnnnnnnnnnnnnnnnnnnnnnnnnnnnnnnnnnnnnnnnnnnnnnnnnnnnnnnnnnnnnnnnnnnnnnnnnnnnnnnnnnnnnnnnnnnnnnnnnnnnnnnnnnnnnnnnnnnnnnnnnnnnnnnnnnnnnnnnnnnnnnnnnnnnnnnnnnnnnnnnnnnnnnnnnnnnnnnnnnnnnnnnnnnnnnnnnnnnnnnnnnnnnnnnnnnnnnnnnnnnnnnnnnnnnnnnnnnnnnnnnnnnnnnnnnnnnnnnnnnnnnnnnnnnnnnnnnnnnnnnnnnnnnnnnnnnnnnnnnnnnnnnnnnnnnnnnnnnnnnnnnnnnnnnnnnnnnnnnnnnnnnnnnnnnnnnnnnnnnnnnnnnnnnnnnnnnnnnnnnnnnnnnnnnnnnnnnnnnnnnnnnnnnnnnnnnnnnnnnnnnnnnnnnnnnnnnnnnnnnnnnnnnnnnnnnnnnnnnnnnnnnnnnnnnnnnnnnnnnnnnnnnnnnnnnnnnnnnnnnnnnnnnnnnnnnnnnnnnnnnnnnnnnnnnnnnnnnnnnnnnnnnnnnnnnnnnnnnnnnnnnnnnnnnnnnnnnnnnnnnnnnnnnnnnnnnnnnnnnnnnnnnnnnnnnnnnnnnnnnnnnnnnnnnnnnnnnnnnnnnnnnnnnnnnnnnnnnnnnnnnnnnnnnnnnnnnnnnnnnnnnnnnnnnnnnnnnnnnnnnnnnnnnnnnnnnnnnnnnnnnnnnnnnnnnnnnnnnnnnnnnnnnnnnnnnnnnnnnnnnnnnnnnnnnnnnnnnnnnnnnnnnnnnnnnnnnnnnnnnnnnnnnnnnnnnnnnnnnnnnnnnnnnnnnnnnnnnnnnnnnnnnnnnnnnnnnnnnnnnnnnnnnnnnnnnnnnnnnnnnnnnnnnnnnnnnnnnnnnnnnnnnnnnnnnnnnnnnnnnnnnnnnnnnnnnnnnnnnnnnnnnnnnnnnnnnnnnnnnnnnnnnnnnnnnnnnnnnnnnnnnnnnnnnnnnnnnnnnnnnnnnnnnnnnnnnnnnnnnnnnnnnnnnnnnnnnnnnnnnnnnnnnnnnnnnnnnnnnnnnnnnnnnnnnnnnnnnnnnnnnnnnnnnnnnnnnnnnnnnnnnnnnnnnnnnnnnnnnnnnnnnnnnnnnnnnnnnnnnnnnnnnnnnnnnnnnnnnnnnnnnnnnnnnnnnnnnnnnnnnnnnnnnnnnnnnnnnnnnnnnnnnnnnnnnnnnnnnnnnnnnnnnnnnnnnnnnnnnnnnnnnnnnnnnnnnnnnnnnnnnnnnnnnnnnnnnnnnnnnnnnnnnnnnnnnnnnnnnnnnnnnnnnnnnnnnnnnnnnnnnnnnnnnnnnnnnnnnnnnnnnnnnnnnnnnnnnnnnnnnnnnnnnnnnnnnnnnnnnnnnnnnnnnnnnnnnnnnnnnnnnnnnnnnnnnnnnnnnnnnnnnnnnnnnnnnnnnnnnnnnnnnnnnnnnnnnnnnnnnnnnnnnnnnnnnnnnnnnnnnnnnnnnnnnnnnnnnnnnnnnnnnnnnnnnnnnnnnnnnnnnnnnnnnnnnnnnnnnnnnnnnnnnnnnnnnnnnnnnnnnnnnnnnnnnnnnnnnnnnnnnnnnnnnnnnnnnnnnnnnnnnnnnnnnnnnnnnnnnnnnnnnnnnnnnnnnnnnnnnnnnnnnnnnnnnnnnnnnnnnnnnnnnnnnnnnnnnnnnnnnnnnnnnnnnnnnnnnnnnnnnnnnnnnnnnnnnnnnnnnnnnnnnnnnnnnnnnnnnnnnnnnnnnnnnnnnnnnnnnnnnnnnnnnnnnnnnnnnnnnnnnnnnnnnnnnnnnnnnnnnnnnnnnnnnnnnnnnnnnnnnnnnnnnnnnnnnnnnnnnnnnnnnnnnnnnnnnnnnnnnnnnnnnnnnnnnnnnnnnnnnnnnnnnnnnnnnnnnnnnnnnnnnnnnnnnnnnnnnnnnnnnnnnnnnnnnnnnnnnnnnnnnnnnnnnnnnnnnnnnnnnnnnnnnnnnnnnnnnnnnnnnnnnnnnnnnnnnnnnnnnnnnnnnnnnnnnnnnnnnnnnnnnnnnnnnnnnnnnnnnnnnnnnnnnnnnnnnnnnnnnnnnnnnnnnnnnnnnnnnnnnnnnnnnnnnnnnnnnnnnnnnnnnnnnnnnnnnnnnnnnnnnnnnnnnnnnnnnnnnnnnnnnnnnnnnnnnnnnnnnnnnnnnnnnnnnnnnnnnnnnnnnnnnnnnnnnnnnnnnnnnnnnnnnnnnnnnnnnnnnnnnnnnnnnnnnnnnnnnnnnnnnnnnnnnnnnnnnnnnnnnnnnnnnnnnnnnnnnnnnnnnnnnnnnnnnnnnnnnnnnnnnnnnnnnnnnnnnnnnnnnnnnnnnnnnnnnnnnnnnnnnnnnnnnnnnnnnnnnnnnnnnnnnnnnnnnnnnnnnnnnnnnnnnnnnnnnnnnnnnnnnnnnnnnnnnnnnnnnnnnnnnnnnnnnnnnnnnnnnnnnnnnnnnnnnnnnnnnnnnnnnnnnnnnnnnnnnnnnnnnnnnnnnnnnnnnnnnnnnnnnnnnnnnnnnnnnnnnnnnnnnnnnnnnnnnnnnnnnnnnnnnnnnnnnnnnnnnnnnnnnnnnnnnnnnnnnnnnnnnnnnnnnnnnnnnnnnnnnnnnnnnnnnnnnnnnnnnnnnnnnnnnnnnnnnnnnnnnnnnnnnnnnnnnnnnnnnnnnnnnnnnnnnnnnnnnnnnnnnnnnnnnnnnnnnnnnnnnnnnnnnnnnnnnnnnnnnnnnnnnnnnnnnnnnnnnnnnnnnnnnnnnnnnnnnnnnnnnnnnnnnnnnnnnnnnnnnnnnnnnnnnnnnnnnnnnnnnnnnnnnnnnnnnnnnnnnnnnnnnnnnnnnnnnnnnnnnnnnnnnnnnnnnnnnnnnnnnnnnnnnnnnnnnnnnnnnnnnnnnnnnnnnnnnnnnnnnnnnnnnnnnnnnnnnnnnnnnnnnnnnnnnnnnnnnnnnnnnnnnnnnnnnnnnnnnnnnnnnnnnnnnnnnnnnnnnnnnnnnnnnnnnnnnnnnnnnnnnnnnnnnnnnnnnnnnnnnnnnnnnnnnnnnnnnnnnnnnnnnnnnnnnnnnnnnnnnnnnnnnnnnnnnnnnnnnnnnnnnnnnnnnnnnnnnnnnnnnnnnnnnnnnnnnnnnnnnnnnnnnnnnnnnnnnnnnnnnnnnnnnnnnnnnnnnnnnnnnnnnnnnnnnnnnnnnnnnnnnnnnnnnnnnnnnnnnnnnnnnnnnnnnnnnnnnnnnnnnnnnnnnnnnnnnnnnnnnnnnnnnnnnnnnnnnnnnnnnnnnnnnnnnnnnnnnnnnnnnnnnnnnnnnnnnnnnnnnnnnnnnnnnnnnnnnnnnnnnnnnnnnnnnnnnnnnnnnnnnnnnnnnnnnnnnnnnnnnnnnnnnnnnnnnnnnnnnnnnnnnnnnnnnnnnnnnnnnnnnnnnnnnnnnnnnnnnnnnnnnnnnnnnnnnnnnnnnnnnnnnnnnnnnnnnnnnnnnnnnnnnnnnnnnnnnnnnnnnnnnnnnnnnnnnnnnnnnnnnnnnnnnnnnnnnnnnnnnnnnnnnnnnnnnnnnnnnnnnnnnnnnnnnnnnnnnnnnnnnnnnnnnnnnnnnnnnnnnnnnnnnnnnnnnnnnnnnnnnnnnnnnnnnnnnnnnnnnnnnnnnnnnnnnnnnnnnnnnnnnnnnnnnnnnnnnnnnnnnnnnnnnnnnnnnnnnnnnnnnnnnnnnnnnnnnnnnnnnnnnnnnnnnnnnnnnnnnnnnnnnnnnnnnnnnnnnnnnnnnnnnnnnnnnnnnnnnnnnnnnnnnnnnnnnnnnnnnnnnnnnnnnnnnnnnnnnnnnnnnnnnnnnnnnnnnnnnnnnnnnnnnnnnnnnnnnnnnnnnnnnnnnnnnnnnnnnnnnnnnnnnnnnnnnnnnnnnnnnnnnnnnnnnnnnnnnnnnnnnnnnnnnnnnnnnnnnnnnnnnnnnnnnnnnnnnnnnnnnnnnnnnnnnnnnnnnnnnnnnnnnnnnnnnnnnnnnnnnnnnnnnnnnnnnnnnnnnnnnnnnnnnnnnnnnnnnnnnnnnnnnnnnnnnnnnnnnnnnnnnnnnnnnnnnnnnnnnnnnnnnnnnnnnnnnnnnnnnnnnnnnnnnnnnnnnnnnnnnnnnnnnnnnnnnnnnnnnnnnnnnnnnnnnnnnnnnnnnnnnnnnnnnnnnnnnnnnnnnnnnnnnnnnnnnnnnnnnnnnnnnnnnnnnnnnnnnnnnnnnnnnnnnnnnnnnnnnnnnnnnnnnnnnnnnnnnnnnnnnnnnnnnnnnnnnnnnnnnnnnnnnnnnnnnnnnnnnnnnnnnnnnnnnnnnnnnnnnnnnnnnnnnnnnnnnnnnnnnnnnnnnnnnnnnnnnnnnnnnnnnnnnnnnnnnnnnnnnnnnnnnnnnnnnnnnnnnnnnnnnnnnnnnnnnnnnnnnnnnnnnnnnnnnnnnnnnnnnnnnnnnnnnnnnnnnnnnnnnnnnnnnnnnnnnnnnnnnnnnnnnnnnnnnnnnnnnnnnnnnnnnnnnnnnnnnnnnnnnnnnnnnnnnnnnnnnnnnnnnnnnnnnnnnnnnnnnnnnnnnnnnnnnnnnnnnnnnnnnnnnnnnnnnnnnnnnnnnnnnnnnnnnnnnnnnnnnnnnnnnnnnnnnnnnnnnnnnnnnnnnnnnnnnnnnnnnnnnnnnnnnnnnnnnnnnnnnnnnnnnnnnnnnnnnnnnnnnnnnnnnnnnnnnnnnnnnnnnnnnnnnnnnnnnnnnnnnnnnnnnnnnnnnnnnnnnnnnnnnnnnnnnnnnnnnnnnnnnnnnnnnnnnnnnnnnnnnnnnnnnnnnnnnnnnnnnnnnnnnnnnnnnnnnnnnnnnnnnnnnnnnnnnnnnnnnnnnnnnnnnnnnnnnnnnnnnnnnnnnnnnnnnnnnnnnnnnnnnnnnnnnnnnnnnnnnnnnnnnnnnnnnnnnnnnnnnnnnnnnnnnnnnnnnnnnnnnnnnnnnnnnnnnnnnnnnnnnnnnnnnnnnnnnnnnnnnnnnnnnnnnnnnnnnnnnnnnnnnnnnnnnnnnnnnnnnnnnnnnnnnnnnnnnnnnnnnnnnnnnnnnnnnnnnnnnnnnnnnnnnnnnnnnnnnnnnnnnnnnnnnnnnnnnnnnnnnnnnnnnnnnnnnnnnnnnnnnnnnnnnnnnnnnnnnnnnnnnnnnnnnnnnnnnnnnnnnnnnnnnnnnnnnnnnnnnnnnnnnnnnnnnnnnnnnnnnnnnnnnnnnnnnnnnnnnnnnnnnnnnnnnnnnnnnnnnnnnnnnnnnnnnnnnnnnnnnnnnnnnnnnnnnnnnnnnnnnnnnnnnnnnnnnnnnnnnnnnnnnnnnnnnnnnnnnnnnnnnnnnnnnnnnnnnnnnnnnnnnnnnnnnnnnnnnnnnnnnnnnnnnnnnnnnnnnnnnnnnnnnnnnnnnnnnnnnnnnnnnnnnnnnnnnnnnnnnnnnnnnnnnnnnnnnnnnnnnnnnnnnnnnnnnnnnnnnnnnnnnnnnnnnnnnnnnnnnnnnnnnnnnnnnnnnnnnnnnnnnnnnnnnnnnnnnnnnnnnnnnnnnnnnnnnnnnnnnnnnnnnnnnnnnnnnnnnnnnnnnnnnnnnnnnnnnnnnnnnnnnnnnnnnnnnnnnnnnnnnnnnnnnnnnnnnnnnnnnnnnnnnnnnnnnnnnnnnnnnnnnnnnnnnnnnnnnnnnnnnnnnnnnnnnnnnnnnnnnnnnnnnnnnnnnnnnnnnnnnnnnnnnnnnnnnnnnnnnnnnnnnnnnnnnnnnnnnnnnnnnnnnnnnnnnnnnnnnnnnnnnnnnnnnnnnnnnnnnnnnnnnnnnnnnnnnnnnnnnnnnnnnnnnnnnnnnnnnnnnnnnnnnnnnnnnnnnnnnnnnnnnnnnnnnnnnnnnnnnnnnnnnnnnnnnnnnnnnnnnnnnnnnnnnnnnnnnnnnnnnnnnnnnnnnnnnnnnnnnnnnnnnnnnnnnnnnnnnnnnnnnnnnnnnnnnnnnnnnnnnnnnnnnnnnnnnnnnnnnnnnnnnnnnnnnnnnnnnnnnnnnnnnnnnnnnnnnnnnnnnnnnnnnnnnnnnnnnnnnnnnnnnnnnnnnnnnnnnnnnnnnnnnnnnnnnnnnnnnnnnnnnnnnnnnnnnnnnnnnnnnnnnnnnnnnnnnnnnnnnnnnnnnnnnnnnnnnnnnnnnnnnnnnnnnnnnnnnnnnnnnnnnnnnnnnnnnnnnnnnnnnnnnnnnnnnnnnnnnnnnnnnnnnnnnnnnnnnnnnnnnnnnnnnnnnnnnnnnnnnnnnnnnnnnnnnnnnnnnnnnnnnnnnnnnnnnnnnnnnnnnnnnnnnnnnnnnnnnnnnnnnnnnnnnnnnnnnnnnnnnnnnnnnnnnnnnnnnnnnnnnnnnnnnnnnnnnnnnnnnnnnnnnnnnnnnnnnnnnnnnnnnnnnnnnnnnnnnnnnnnnnnnnnnnnnnnnnnnnnnnnnnnnnnnnnnnnnnnnnnnnnnnnnnnnnnnnnnnnnnnnnnnnnnnnnnnnnnnnnnnnnnnnnnnnnnnnnnnnnnnnnnnnnnnnnnnnnnnnnnnnnnnnnnnnnnnnnnnnnnnnnnnnnnnnnnnnnnnnnnnnnnnnnnnnnnnnnnnnnnnnnnnnnnnnnnnnnnnnnnnnnnnnnnnnnnnnnnnnnnnnnnnnnnnnnnnnnnnnnnnnnnnnnnnnnnnnnnnnnnnnnnnnnnnnnnnnnnnnnnnnnnnnnnnnnnnnnnnnnnnnnnnnnnnnnnnnnnnnnnnnnnnnnnnnnnnnnnnnnnnnnnnnnnnnnnnnnnnnnnnnnnnnnnnnnnnnnnnnnnnnnnnnnnnnnnnnnnnnnnnnnnnnnnnnnnnnnnnnnnnnnnnnnnnnnnnnnnnnnnnnnnnnnnnnnnnnnnnnnnnnnnnnnnnnnnnnnnnnnnnnnnnnnnnnnnnnnnnnnnnnnnnnnnnnnnnnnnnnnnnnnnnnnnnnnnnnnnnnnnnnnnnnnnnnnnnnnnnnnnnnnnnnnnnnnnnnnnnnnnnnnnnnnnnnnnnnnnnnnnnnnnnnnnnnnnnnnnnnnnnnnnnnnnnnnnnnnnnnnnnnnnnnnnnnnnnnnnnnnnnnnnnnnnnnnnnnnnnnnnnnnnnnnnnnnnnnnnnnnnnnnnnnnnnnnnnnnnnnnnnnnnnnnnnnnnnnnnnnnnnnnnnnnnnnnnnnnnnnnnnnnnnnnnnnnnnnnnnnnnnnnnnnnnnnnnnnnnnnnnnnnnnnnnnnnnnnnnnnnnnnnnnnnnnnnnnnnnnnnnnnnnnnnnnnnnnnnnnnnnnnnnnnnnnnnnnnnnnnnnnnnnnnnnnnnnnnnnnnnnnnnnnnnnnnnnnnnnnnnnnnnnnnnnnnnnnnnnnnnnnnnnnnnnnnnnnnnnnnnnnnnnnnnnnnnnnnnnnnnnnnnnnnnnnnnnnnnnnnnnnnnnnnnnnnnnnnnnnnnnnnnnnnnnnnnnnnnnnnnnnnnnnnnnnnnnnnnnnnnnnnnnnnnnnnnnnnnnnnnnnnnnnnnnnnnnnnnnnnnnnnnnnnnnnnnnnnnnnnnnnnnnnnnnnnnnnnnnnnnnnnnnnnnnnnnnnnnnnnnnnnnnnnnnnnnnnnnnnnnnnnnnnnnnnnnnnnnnnnnnnnnnnnnnnnnnnnnnnnnnnnnnnnnnnnnnnnnnnnnnnnnnnnnnnnnnnnnnnnnnnnnnnnnnnnnnnnnnnnnnnnnnnnnnnnnnnnnnnnnnnnnnnnnnnnnnnnnnnnnnnnnnnnnnnnnnnnnnnnnnnnnnnnnnnnnnnnnnnnnnnnnnnnnnnnnnnnnnnnnnnnnnnnnnnnnnnnnnnnnnnnnnnnnnnnnnnnnnnnnnnnnnnnnnnnnnnnnnnnnnnnnnnnnnnnnnnnnnnnnnnnnnnnnnnnnnnnnnnnnnnnnnnnnnnnnnnnnnnnnnnnnnnnnnnnnnnnnnnnnnnnnnnnnnnnnnnnnnnnnnnnnnnnnnnnnnnnnnnnnnnnnnnnnnnnnnnnnnnnnnnnnnnnnnnnnnnnnnnnnnnnnnnnnnnnnnnnnnnnnnnnnnnnnnnnnnnnnnnnnnnnnnnnnnnnnnnnnnnnnnnnnnnnnnnnnnnnnnnnnnnnnnnnnnnnnnnnnnnnnnnnnnnnnnnnnnnnnnnnnnnnnnnnnnnnnnnnnnnnnnnnnnnnnnnnnnnnnnnnnnnnnnnnnnnnnnnnnnnnnnnnnnnnnnnnnnnnnnnnnnnnnnnnnnnnnnnnnnnnnnnnnnnnnnnnnnnnnnnnnnnnnnnnnnnnnnnnnnnnnnnnnnnnnnnnnnnnnnnnnnnnnnnnnnnnnnnnnnnnnnnnnnnnnnnnnnnnnnnnnnnnnnnnnnnnnnnnnnnnnnnnnnnnnnnnnnnnnnnnnnnnnnnnnnnnnnnnnnnnnnnnnnnnnnnnnnnnnnnnnnnnnnnnnnnnnnnnnnnnnnnnnnnnnnnnnnnnnnnnnnnnnnnnnnnnnnnnnnnnnnnnnnnnnnnnnnnnnnnnnnnnnnnnnnnnnnnnnnnnnnnnnnnnnnnnnnnnnnnnnnnnnnnnnnnnnnnnnnnnnnnnnnnnnnnnnnnnnnnnnnnnnnnnnnnnnnnnnnnnnnnnnnnnnnnnnnnnnnnnnnnnnnnnnnnnnnnnnnnnnnnnnnnnnnnnnnnnnnnnnnnnnnnnnnnnnnnnnnnnnnnnnnnnnnnnnnnnnnnnnnnnnnnnnnnnnnnnnnnnnnnnnnnnnnnnnnnnnnnnnnnnnnnnnnnnnnnnnnnnnnnnnnnnnnnnnnnnnnnnnnnnnnnnnnnnnnnnnnnnnnnnnnnnnnnnnnnnnnnnnnnnnnnnnnnnnnnnnnnnnnnnnnnnnnnnnnnnnnnnnnnnnnnnnnnnnnnnnnnnnnnnnnnnnnnnnnnnnnnnnnnnnnnnnnnnnnnnnnnnnnnnnnnnnnnnnnnnnnnnnnnnnnnnnnnnnnnnnnnnnnnnnnnnnnnnnnnnnnnnnnnnnnnnnnnnnnnnnnnnnnnnnnnnnnnnnnnnnnnnnnnnnnnnnnnnnnnnnnnnnnnnnnnnnnnnnnnnnnnnnnnnnnnnnnnnnnnnnnnnnnnnnnnnnnnnnnnnnnnnnnnnnnnnnnnnnnnnnnnnnnnnnnnnnnnnnnnnnnnnnnnnnnnnnnnnnnnnnnnnnnnnnnnnnnnnnnnnnnnnnnnnnnnnnnnnnnnnnnnnnnnnnnnnnnnnnnnnnnnnnnnnnnnnnnnnnnnnnnnnnnnnnnnnnnnnnnnnnnnnnnnnnnnnnnnnnnnnnnnnnnnnnnnnnnnnnnnnnnnnnnnnnnnnnnnnnnnnnnnnnnnnnnnnnnnnnnnnnnnnnnnnnnnnnnnnnnnnnnnnnnnnnnnnnnnnnnnnnnnnnnnnnnnnnnnnnnnnnnnnnnnnnnnnnnnnnnnnnnnnnnnnnnnnnnnnnnnnnnnnnnnnnnnnnnnnnnnnnnnnnnnnnnnnnnnnnnnnnnnnnnnnnnnnnnnnnnnnnnnnnnnnnnnnnnnnnnnnnnnnnnnnnnnnnnnnnnnnnnnnnnnnnnnnnnnnnnnnnnnnnnnnnnnnnnnnnnnnnnnnnnnnnnnnnnnnnnnnnnnnnnnnnnnnnnnnnnnnnnnnnnnnnnnnnnnnnnnnnnnnnnnnnnnnnnnnnnnnnnnnnnnnnnnnnnnnnnnnnnnnnnnnnnnnnnnnnnnnnnnnnnnnnnnnnnnnnnnnnnnnnnnnnnnnnnnnnnnnnnnnnnnnnnnnnnnnnnnnnnnnnnnnnnnnnnnnnnnnnnnnnnnnnnnnnnnnnnnnnnnnnnnnnnnnnnnnnnnnnnnnnnnnnnnnnnnnnnnnnnnnnnnnnnnnnnnnnnnnnnnnnnnnnnnnnnnnnnnnnnnnnnnnnnnnnnnnnnnnnnnnnnnnnnnnnnnnnnnnnnnnnnnnnnnnnnnnnnnnnnnnnnnnnnnnnnnnnnnnnnnnnnnnnnnnnnnnnnnnnnnnnnnnnnnnnnnnnnnnnnnnnnnnnnnnnnnnnnnnnnnnnnnnnnnnnnnnnnnnnnnnnnnnnnnnnnnnnnnnnnnnnnnnnnnnnnnnnnnnnnnnnnnnnnnnnnnnnnnnnnnnnnnnnnnnnnnnnnnnnnnnnnnnnnnnnnnnnnnnnnnnnnnnnnnnnnnnnnnnnnnnnnnnnnnnnnnnnnnnnnnnnnnnnnnnnnnnnnnnnnnnnnnnnnnnnnnnnnnnnnnnnnnnnnnnnnnnnnnnnnnnnnnnnnnnnnnnnnnnnnnnnnnnnnnnnnnnnnnnnnnnnnnnnnnnnnnnnnnnnnnnnnnnnnnnnnnnnnnnnnnnnnnnnnnnnnnnnnnnnnnnnnnnnnnnnnnnnnnnnnnnnnnnnnnnnnnnnnnnnnnnnnnnnnnnnnnnnnnnnnnnnnnnnnnnnnnnnnnnnnnnnnnnnnnnnnnnnnnnnnnnnnnnnnnnnnnnnnnnnnnnnnnnnnnnnnnnnnnnnnnnnnnnnnnnnnnnnnnnnnnnnnnnnnnnnnnnnnnnnnnnnnnnnnnnnnnnnnnnnnnnnnnnnnnnnnnnnnnnnnnnnnnnnnnnnnnnnnnnnnnnnnnnnnnnnnnnnnnnnnnnnnnnnnnnnnnnnnnnnnnnnnnnnnnnnnnnnnnnnnnnnnnnnnnnnnnnnnnnnnnnnnnnnnnnnnnnnnnnnnnnnnnnnnnnnnnnnnnnnnnnnnnnnnnnnnnnnnnnnnnnnnnnnnnnnnnnnnnnnnnnnnnnnnnnnnnnnnnnnnnnnnnnnnnnnnnnnnnnnnnnnnnnnnnnnnnnnnnnnnnnnnnnnnnnnnnnnnnnnnnnnnnnnnnnnnnnnnnnnnnnnnnnnnnnnnnnnnnnnnnnnnnnnnnnnnnnnnnnnnnnnnnnnnnnnnnnnnnnnnnnnnnnnnnnnnnnnnnnnnnnnnnnnnnnnnnnnnnnnnnnnnnnnnnnnnnnnnnnnnnnnnnnnnnnnnnnnnnnnnnnnnnnnnnnnnnnnnnnnnnnnnnnnnnnnnnnnnnnnnnnnnnnnnnnnnnnnnnnnnnnnnnnnnnnnnnnnnnnnnnnnnnnnnnnnnnnnnnnnnnnnnnnnnnnnnnnnnnnnnnnnnnnnnnnnnnnnnnnnnnnnnnnnnnnnnnnnnnnnnnnnnnnnnnnnnnnnnnnnnnnnnnnnnnnnnnnnnnnnnnnnnnnnnnnnnnnnnnnnnnnnnnnnnnnnnnnnnnnnnnnnnnnnnnnnnnnnnnnnnnnnnnnnnnnnnnnnnnnnnnnnnnnnnnnnnnnnnnnnnnnnnnnnnnnnnnnnnnnnnnnnnnnnnnnnnnnnnnnnnnnnnnnnnnnnnnnnnnnnnnnnnnnnnnnnnnnnnnnnnnnnnnnnnnnnnnnnnnnnnnnnnnnnnnnnnnnnnnnnnnnnnnnnnnnnnnnnnnnnnnnnnnnnnnnnnnnnnnnnnnnnnnnnnnnnnnnnnnnnnnnnnnnnnnnnnnnnnnnnnnnnnnnnnnnnnnnnnnnnnnnnnnnnnnnnnnnnnnnnnnnnnnnnnnnnnnnnnnnnnnnnnnnnnnnnnnnnnnnnnnnnnnnnnnnnnnnnnnnnnnnnnnnnnnnnnnnnnnnnnnnnnnnnnnnnnnnnnnnnnnnnnnnnnnnnnnnnnnnnnnnnnnnnnnnnnnnnnnnnnnnnnnnnnnnnnnnnnnnnnnnnnnnnnnnnnnnnnnnnnnnnnnnnnnnnnnnnnnnnnnnnnnnnnnnnnnnnnnnnnnnnnnnnnnnnnnnnnnnnnnnnnnnnnnnnnnnnnnnnnnnnnnnnnnnnnnnnnnnnnnnnnnnnnnnnnnnnnnnnnnnnnnnnnnnnnnnnnnnnnnnnnnnnnnnnnnnnnnnnnnnnnnnnnnnnnnnnnnnnnnnnnnnnnnnnnnnnnnnnnnnnnnnnnnnnnnnnnnnnnnnnnnnnnnnnnnnnnnnnnnnnnnnnnnnnnnnnnnnnnnnnnnnnnnnnnnnnnnnnnnnnnnnnnnnnnnnnnnnnnnnnnnnnnnnnnnnnnnnnnnnnnnnnnnnnnnnnnnnnnnnnnnnnnnnnnnnnnnnnnnnnnnnnnnnnnnnnnnnnnnnnnnnnnnnnnnnnnnnnnnnnnnnnnnnnnnnnnnnnnnnnnnnnnnnnnnnnnnnnnnnnnnnnnnnnnnnnnnnnnnnnnnnnnnnnnnnnnnnnnnnnnnnnnnnnnnnnnnnnnnnnnnnnnnnnnnnnnnnnnnnnnnnnnnnnnnnnnnnnnnnnnnnnnnnnnnnnnnnnnnnnnnnnnnnnnnnnnnnnnnnnnnnnnnnnnnnnnnnnnnnnnnnnnnnnnnnnnnnnnnnnnnnnnnnnnnnnnnnnnnnnnnnnnnnnnnnnnnnnnnnnnnnnnnnnnnnnnnnnnnnnnnnnnnnnnnnnnnnnnnnnnnnnnnnnnnnnnnnnnnnnnnnnnnnnnnnnnnnnnnnnnnnnnnnnnnnnnnnnnnnnnnnnnnnnnnnnnnnnnnnnnnnnnnnnnnnnnnnnnnnnnnnnnnnnnnnnnnnnnnnnnnnnnnnnnnnnnnnnnnnnnnnnnnnnnnnnnnnnnnnnnnnnnnnnnnnnnnnnnnnnnnnnnnnnnnnnnnnnnnnnnnnnnnnnnnnnnnnnnnnnnnnnnnnnnnnnnnnnnnnnnnnnnnnnnnnnnnnnnnnnnnnnnnnnnnnnnnnnnnnnnnnnnnnnnnnnnnnnnnnnnnnnnnnnnnnnnnnnnnnnnnnnnnnnnnnnnnnnnnnnnnnnnnnnnnnnnnnnnnnnnnnnnnnnnnnnnnnnnnnnnnnnnnnnnnnnnnnnnnnnnnnnnnnnnnnnnnnnnnnnnnnnnnnnnnnnnnnnnnnnnnnnnnnnnnnnnnnnnnnnnnnnnnnnnnnnnnnnnnnnnnnnnnnnnnnnnnnnnnnnnnnnnnnnnnnnnnnnnnnnnnnnnnnnnnnnnnnnnnnnnnnnnnnnnnnnnnnnnnnnnnnnnnnnnnnnnnnnnnnnnnnnnnnnnnnnnnnnnnnnnnnnnnnnnnnnnnnnnnnnnnnnnnnnnnnnnnnnnnnnnnnnnnnnnnnnnnnnnnnnnnnnnnnnnnnnnnnnnnnnnnnnnnnnnnnnnnnnnnnnnnnnnnnnnnnnnnnnnnnnnnnnnnnnnnnnnnnnnnnnnnnnnnnnnnnnnnnnnnnnnnnnnnnnnnnnnnnnnnnnnnnnnnnnnnnnnnnnnnnnnnnnnnnnnnnnnnnnnnnnnnnnnnnnnnnnnnnnnnnnnnnnnnnnnnnnnnnnnnnnnnnnnnnnnnnnnnnnnnnnnnnnnnnnnnnnnnnnnnnnnnnnnnnnnnnnnnnnnnnnnnnnnnnnnnnnnnnnnnnnnnnnnnnnnnnnnnnnnnnnnnnnnnnnnnnnnnnnnnnnnnnnnnnnnnnnnnnnnnnnnnnnnnnnnnnnnnnnnnnnnnnnnnnnnnnnnnnnnnnnnnnnnnnnnnnnnnnnnnnnnnnnnnnnnnnnnnnnnnnnnnnnnnnnnnnnnnnnnnnnnnnnnnnnnnnnnnnnnnnnnnnnnnnnnnnnnnnnnnnnnnnnnnnnnnnnnnnnnnnnnnnnnnnnnnnnnnnnnnnnnnnnnnnnnnnnnnnnnnnnnnnnnnnnnnnnnnnnnnnnnnnnnnnnnnnnnnnnnnnnnnnnnnnnnnnnnnnnnnnnnnnnnnnnnnnnnnnnnnnnnnnnnnnnnnnnnnnnnnnnnnnnnnnnnnnnnnnnnnnnnnnnnnnnnnnnnnnnnnnnnnnnnnnnnnnnnnnnnnnnnnnnnnnnnnnnnnnnnnnnnnnnnnnnnnnnnnnnnnnnnnnnnnnnnnnnnnnnnnnnnnnnnnnnnnnnnnnnnnnnnnnnnnnnnnnnnnnnnnnnnnnnnnnnnnnnnnnnnnnnnnnnnnnnnnnnnnnnnnnnnnnnnnnnnnnnnnnnnnnnnnnnnnnnnnnnnnnnnnnnnnnnnnnnnnnnnnnnnnnnnnnnnnnnnnnnnnnnnnnnnnnnnnnnnnnnnnnnnnnnnnnnnnnnnnnnnnnnnnnnnnnnnnnnnnnnnnnnnnnnnnnnnnnnnnnnnnnnnnnnnnnnnnnnnnnnnnnnnnnnnnnnnnnnnnnnnnnnnnnnnnnnnnnnnnnnnnnnnnnnnnnnnnnnnnnnnnnnnnnnnnnnnnnnnnnnnnnnnnnnnnnnnnnnnnnnnnnnnnnnnnnnnnnnnnnnnnnnnnnnnnnnnnnnnnnnnnnnnnnnnnnnnnnnnnnnnnnnnnnnnnnnnnnnnnnnnnnnnnnnnnnnnnnnnnnnnnnnnnnnnnnnnnnnnnnnnnnnnnnnnnnnnnnnnnnnnnnnnnnnnnnnnnnnnnnnnnnnnnnnnnnnnnnnnnnnnnnnnnnnnnnnnnnnnnnnnnnnnnnnnnnnnnnnnnnnnnnnnnnnnnnnnnnnnnnnnnnnnnnnnnnnnnnnnnnnnnnnnnnnnnnnnnnnnnnnnnnnnnnnnnnnnnnnnnnnnnnnnnnnnnnnnnnnnnnnnnnnnnnnnnnnnnnnnnnnnnnnnnnnnnnnnnnnnnnnnnnnnnnnnnnnnnnnnnnnnnnnnnnnnnnnnnnnnnnnnnnnnnnnnnnnnnnnnnnnnnnnnnnnnnnnnnnnnnnnnnnnnnnnnnnnnnnnnnnnnnnnnnnnnnnnnnnnnnnnnnnnnnnnnnnnnnnnnnnnnnnnnnnnnnnnnnnnnnnnnnnnnnnnnnnnnnnnnnnnnnnnnnnnnnnnnnnnnnnnnnnnnnnnnnnnnnnnnnnnnnnnnnnnnnnnnnnnnnnnnnnnnnnnnnnnnnnnnnnnnnnnnnnnnnnnnnnnnnnnnnnnnnnnnnnnnnnnnnnnnnnnnnnnnnnnnnnnnnnnnnnnnnnnnnnnnnnnnnnnnnnnnnnnnnnnnnnnnnnnnnnnnnnnnnnnnnnnnnnnnnnnnnnnnnnnnnnnnnnnnnnnnnnnnnnnnnnnnnnnnnnnnnnnnnnnnnnnnnnnnnnnnnnnnnnnnnnnnnnnnnnnnnnnnnnnnnnnnnnnnnnnnnnnnnnnnnnnnnnnnnnnnnnnnnnnnnnnnnnnnnnnnnnnnnnnnnnnnnnnnnnnnnnnnnnnnnnnnnnnnnnnnnnnnnnnnnnnnnnnnnnnnnnnnnnnnnnnnnnnnnnnnnnnnnnnnnnnnnnnnnnnnnnnnnnnnnnnnnnnnnnnnnnnnnnnnnnnnnnnnnnnnnnnnnnnnnnnnnnnnnnnnnnnnnnnnnnnnnnnnnnnnnnnnnnnnnnnnnnnnnnnnnnnnnnnnnnnnnnnnnnnnnnnnnnnnnnnnnnnnnnnnnnnnnnnnnnnnnnnnnnnnnnnnnnnnnnnnnnnnnnnnnnnnnnnnnnnnnnnnnnnnnnnnnnnnnnnnnnnnnnnnnnnnnnnnnnnnnnnnnnnnnnnnnnnnnnnnnnnnnnnnnnnnnnnnnnnnnnnnnnnnnnnnnnnnnnnnnnnnnnnnnnnnnnnnnnnnnnnnnnnnnnnnnnnnnnnnnnnnnnnnnnnnnnnnnnnnnnnnnnnnnnnnnnnnnnnnnnnnnnnnnnnnnnnnnnnnnnnnnnnnnnnnnnnnnnnnnnnnnnnnnnnnnnnnnnnnnnnnnnnnnnnnnnnnnnnnnnnnnnnnnnnnnnnnnnnnnnnnnnnnnnnnnnnnnnnnnnnnnnnnnnnnnnnnnnnnnnnnnnnnnnnnnnnnnnnnnnnnnnnnnnnnnnnnnnnnnnnnnnnnnnnnnnnnnnnnnnnnnnnnnnnnnnnnnnnnnnnnnnnnnnnnnnnnnnnnnnnnnnnnnnnnnnnnnnnnnnnnnnnnnnnnnnnnnnnnnnnnnnnnnnnnnnnnnnnnnnnnnnnnnnnnnnnnnnnnnnnnnnnnnnnnnnnnnnnnnnnnnnnnnnnnnnnnnnnnnnnnnnnnnnnnnnnnnnnnnnnnnnnnnnnnnnnnnnnnnnnnnnnnnnnnnnnnnnnnnnnnnnnnnnnnnnnnnnnnnnnnnnnnnnnnnnnnnnnnnnnnnnnnnnnnnnnnnnnnnnnnnnnnnnnnnnnnnnnnnnnnnnnnnnnnnnnnnnnnnnnnnnnnnnnnnnnnnnnnnnnnnnnnnnnnnnnnnnnnnnnnnnnnnnnnnnnnnnnnnnnnnnnnnnnnnnnnnnnnnnnnnnnnnnnnnnnnnnnnnnnnnnnnnnnnnnnnnnnnnnnnnnnnnnnnnnnnnnnnnnnnnnnnnnnnnnnnnnnnnnnnnnnnnnnnnnnnnnnnnnnnnnnnnnnnnnnnnnnnnnnnnnnnnnnnnnnnnnnnnnnnnnnnnnnnnnnnnnnnnnnnnnnnnnnnnnnnnnnnnnnnnnnnnnnnnnnnnnnnnnnnnnnnnnnnnnnnnnnnnnnnnnnnnnnnnnnnnnnnnnnnnnnnnnnnnnnnnnnnnnnnnnnnnnnnnnnnnnnnnnnnnnnnnnnnnnnnnnnnnnnnnnnnnnnnnnnnnnnnnnnnnnnnnnnnnnnnnnnnnnnnnnnnnnnnnnnnnnnnnnnnnnnnnnnnnnnnnnnnnnnnnnnnnnnnnnnnnnnnnnnnnnnnnnnnnnnnnnnnnnnnnnnnnnnnnnnnnnnnnnnnnnnnnnnnnnnnnnnnnnnnnnnnnnnnnnnnnnnnnnnnnnnnnnnnnnnnnnnnnnnnnnnnnnnnnnnnnnnnnnnnnnnnnnnnnnnnnnnnnnnnnnnnnnnnnnnnnnnnnnnnnnnnnnnnnnnnnnnnnnnnnnnnnnnnnnnnnnnnnnnnnnnnnnnnnnnnnnnnnnnnnnnnnnnnnnnnnnnnnnnnnnnnnnnnnnnnnnnnnnnnnnnnnnnnnnnnnnnnnnnnnnnnnnnnnnnnnnnnnnnnnnnnnnnnnnnnnnnnnnnnnnnnnnnnnnnnnnnnnnnnnnnnnnnnnnnnnnnnnnnnnnnnnnnnnnnnnnnnnnnnnnnnnnnnnnnnnnnnnnnnnnnnnnnnnnnnnnnnnnnnnnnnnnnnnnnnnnnnnnnnnnnnnnnnnnnnnnnnnnnnnnnnnnnnnnnnnnnnnnnnnnnnnnnnnnnnnnnnnnnnnnnnnnnnnnnnnnnnnnnnnnnnnnnnnnnnnnnnnnnnnnnnnnnnnnnnnnnnnnnnnnnnnnnnnnnnnnnnnnnnnnnnnnnnnnnnnnnnnnnnnnnnnnnnnnnnnnnnnnnnnnnnnnnnnnnnnnnnnnnnnnnnnnnnnnnnnnnnnnnnnnnnnnnnnnnnnnnnnnnnnnnnnnnnnnnnnnnnnnnnnnnnnnnnnnnnnnnnnnnnnnnnnnnnnnnnnnnnnnnnnnnnnnnnnnnnnnnnnnnnnnnnnnnnnnnnnnnnnnnnnnnnnnnnnnnnnnnnnnnnnnnnnnnnnnnnnnnnnnnnnnnnnnnnnnnnnnnnnnnnnnnnnnnnnnnnnnnnnnnnnnnnnnnnnnnnnnnnnnnnnnnnnnnnnnnnnnnnnnnnnnnnnnnnnnnnnnnnnnnnnnnnnnnnnnnnnnnnnnnnnnnnnnnnnnnnnnnnnnnnnnnnnnnnnnnnnnnnnnnnnnnnnnnnnnnnnnnnnnnnnnnnnnnnnnnnnnnnnnnnnnnnnnnnnnnnnnnnnnnnnnnnnnnnnnnnnnnnnnnnnnnnnnnnnnnnnnnnnnnnnnnnnnnnnnnnnnnnnnnnnnnnnnnnnnnnnnnnnnnnnnnnnnnnnnnnnnnnnnnnnnnnnnnnnnnnnnnnnnnnnnnnnnnnnnnnnnnnnnnnnnnnnnnnnnnnnnnnnnnnnnnnnnnnnnnnnnnnnnnnnnnnnnnnnnnnnnnnnnnnnnnnnnnnnnnnnnnnnnnnnnnnnnnnnnnnnnnnnnnnnnnnnnnnnnnnnnnnnnnnnnnnnnnnnnnnnnnnnnnnnnnnnnnnnnnnnnnnnnnnnnnnnnnnnnnnnnnnnnnnnnnnnnnnnnnnnnnnnnnnnnnnnnnnnnnnnnnnnnnnnnnnnnnnnnnnnnnnnnnnnnnnnnnnnnnnnnnnnnnnnnnnnnnnnnnnnnnnnnnnnnnnnnnnnnnnnnnnnnnnnnnnnnnnnnnnnnnnnnnnnnnnnnnnnnnnnnnnnnnnnnnnnnnnnnnnnnnnnnnnnnnnnnnnnnnnnnnnnnnnnnnnnnnnnnnnnnnnnnnnnnnnnnnnnnnnnnnnnnnnnnnnnnnnnnnnnnnnnnnnnnnnnnnnnnnnnnnnnnnnnnnnnnnnnnnnnnnnnnnnnnnnnnnnnnnnnnnnnnnnnnnnnnnnnnnnnnnnnnnnnnnnnnnnnnnnnnnnnnnnnnnnnnnnnnnnnnnnnnnnnnnnnnnnnnnnnnnnnnnnnnnnnnnnnnnnnnnnnnnnnnnnnnnnnnnnnnnnnnnnnnnnnnnnnnnnnnnnnnnnnnnnnnnnnnnnnnnnnnnnnnnnnnnnnnnnnnnnnnnnnnnnnnnnnnnnnnnnnnnnnnnnnnnnnnnnnnnnnnnnnnnnnnnnnnnnnnnnnnnnnnnnnnnnnnnnnnnnnnnnnnnnnnnnnnnnnnnnnnnnnnnnnnnnnnnnnnnnnnnnnnnnnnnnnnnnnnnnnnnnnnnnnnnnnnnnnnnnnnnnnnnnnnnnnnnnnnnnnnnnnnnnnnnnnnnnnnnnnnnnnnnnnnnnnnnnnnnnnnnnnnnnnnnnnnnnnnnnnnnnnnnnnnnnnnnnnnnnnnnnnnnnnnnnnnnnnnnnnnnnnnnnnnnnnnnnnnnnnnnnnnnnnnnnnnnnnnnnnnnnnnnnnnnnnnnnnnnnnnnnnnnnnnnnnnnnnnnnnnnnnnnnnnnnnnnnnnnnnnnnnnnnnnnnnnnnnnnnnnnnnnnnnnnnnnnnnnnnnnnnnnnnnnnnnnnnnnnnnnnnnnnnnnnnnnnnnnnnnnnnnnnnnnnnnnnnnnnnnnnnnnnnnnnnnnnnnnnnnnnnnnnnnnnnnnnnnnnnnnnnnnnnnnnnnnnnnnnnnnnnnnnnnnnnnnnnnnnnnnnnnnnnnnnnnnnnnnnnnnnnnnnnnnnnnnnnnnnnnnnnnnnnnnnnnnnnnnnnnnnnnnnnnnnnnnnnnnnnnnnnnnnnnnnnnnnnnnnnnnnnnnnnnnnnnnnnnnnnnnnnnnnnnnnnnnnnnnnnnnnnnnnnnnnnnnnnnnnnnnnnnnnnnnnnnnnnnnnnnnnnnnnnnnnnnnnnnnnnnnnnnnnnnnnnnnnnnnnnnnnnnnnnnnnnnnnnnnnnnnnnnnnnnnnnnnnnnnnnnnnnnnnnnnnnnnnnnnnnnnnnnnnnnnnnnnnnnnnnnnnnnnnnnnnnnnnnnnnnnnnnnnnnnnnnnnnnnnnnnnnnnnnnnnnnnnnnnnnnnnnnnnnnnnnnnnnnnnnnnnnnnnnnnnnnnnnnnnnnnnnnnnnnnnnnnnnnnnnnnnnnnnnnnnnnnnnnnnnnnnnnnnnnnnnnnnnnnnnnnnnnnnnnnnnnnnnnnnnnnnnnnnnnnnnnnnnnnnnnnnnnnnnnnnnnnnnnnnnnnnnnnnnnnnnnnnnnnnnnnnnnnnnnnnnnnnnnnnnnnnnnnnnnnnnnnnnnnnnnnnnnnnnnnnnnnnnnnnnnnnnnnnnnnnnnnnnnnnnnnnnnnnnnnnnnnnnnnnnnnnnnnnnnnnnnnnnnnnnnnnnnnnnnnnnnnnnnnnnnnnnnnnnnnnnnnnnnnnnnnnnnnnnnnnnnnnnnnnnnnnnnnnnnnnnnnnnnnnnnnnnnnnnnnnnnnnnnnnnnnnnnnnnnnnnnnnnnnnnnnnnnnnnnnnnnnnnnnnnnnnnnnnnnnnnnnnnnnnnnnnnnnnnnnnnnnnnnnnnnnnnnnnnnnnnnnnnnnnnnnnnnnnnnnnnnnnnnnnnnnnnnnnnnnnnnnnnnnnnnnnnnnnnnnnnnnnnnnnnnnnnnnnnnnnnnnnnnnnnnnnnnnnnnnnnnnnnnnnnnnnnnnnnnnnnnnnnnnnnnnnnnnnnnnnnnnnnnnnnnnnnnnnnnnnnnnnnnnnnnnnnnnnnnnnnnnnnnnnnnnnnnnnnnnnnnnnnnnnnnnnnnnnnnnnnnnnnnnnnnnnnnnnnnnnnnnnnnnnnnnnnnnnnnnnnnnnnnnnnnnnnnnnnnnnnnnnnnnnnnnnnnnnnnnnnnnnnnnnnnnnnnnnnnnnnnnnnnnnnnnnnnnnnnnnnnnnnnnnnnnnnnnnnnnnnnnnnnnnnnnnnnnnnnnnnnnnnnnnnnnnnnnnnnnnnnnnnnnnnnnnnnnnnnnnnnnnnnnnnnnnnnnnnnnnnnnnnnnnnnnnnnnnnnnnnnnnnnnnnnnnnnnnnnnnnnnnnnnnnnnnnnnnnnnnnnnnnnnnnnnnnnnnnnnnnnnnnnnnnnnnnnnnnnnnnnnnnnnnnnnnnnnnnnnnnnnnnnnnnnnnnnnnnnnnnnnnnnnnnnnnnnnnnnnnnnnnnnnnnnnnnnnnnnnnnnnnnnnnnnnnnnnnnnnnnnnnnnnnnnnnnnnnnnnnnnnnnnnnnnnnnnnnnnnnnnnnnnnnnnnnnnnnnnnnnnnnnnnnnnnnnnnnnnnnnnnnnnnnnnnnnnnnnnnnnnnnnnnnnnnnnnnnnnnnnnnnnnnnnnnnnnnnnnnnnnnnnnnnnnnnnnnnnnnnnnnnnnnnnnnnnnnnnnnnnnnnnnnnnnnnnnnnnnnnnnnnnnnnnnnnnnnnnnnnnnnnnnnnnnnnnnnnnnnnnnnnnnnnnnnnnnnnnnnnnnnnnnnnnnnnnnnnnnnnnnnnnnnnnnnnnnnnnnnnnnnnnnnnnnnnnnnnnnnnnnnnnnnnnnnnnnnnnnnnnnnnnnnnnnnnnnnnnnnnnnnnnnnnnnnnnnnnnnnnnnnnnnnnnnnnnnnnnnnnnnnnnnnnnnnnnnnnnnnnnnnnnnnnnnnnnnnnnnnnnnnnnnnnnnnnnnnnnnnnnnnnnnnnnnnnnnnnnnnnnnnnnnnnnnnnnnnnnnnnnnnnnnnnnnnnnnnnnnnnnnnnnnnnnnnnnnnnnnnnnnnnnnnnnnnnnnnnnnnnnnnnnnnnnnnnnnnnnnnnnnnnnnnnnnnnnnnnnnnnnnnnnnnnnnnnnnnnnnnnnnnnnnnnnnnnnnnnnnnnnnnnnnnnnnnnnnnnnnnnnnnnnnnnnnnnnnnnnnnnnnnnnnnnnnnnnnnnnnnnnnnnnnnnnnnnnnnnnnnnnnnnnnnnnnnnnnnnnnnnnnnnnnnnnnnnnnnnnnnnnnnnnnnnnnnnnnnnnnnnnnnnnnnnnnnnnnnnnnnnnnnnnnnnnnnnnnnnnnnnnnnnnnnnnnnnnnnnnnnnnnnnnnnnnnnnnnnnnnnnnnnnnnnnnnnnnnnnnnnnnnnnnnnnnnnnnnnnnnnnnnnnnnnnnnnnnnnnnnnnnnnnnnnnnnnnnnnnnnnnnnnnnnnnnnnnnnnnnnnnnnnnnnnnnnnnnnnnnnnnnnnnnnnnnnnnnnnnnnnnnnnnnnnnnnnnnnnnnnnnnnnnnnnnnnnnnnnnnnnnnnnnnnnnnnnnnnnnnnnnnnnnnnnnnnnnnnnnnnnnnnnnnnnnnnnnnnnnnnnnnnnnnnnnnnnnnnnnnnnnnnnnnnnnnnnnnnnnnnnnnnnnnnnnnnnnnnnnnnnnnnnnnnnnnnnnnnnnnnnnnnnnnnnnnnnnnnnnnnnnnnnnnnnnnnnnnnnnnnnnnnnnnnnnnnnnnnnnnnnnnnnnnnnnnnnnnnnnnnnnnnnnnnnnnnnnnnnnnnnnnnnnnnnnnnnnnnnnnnnnnnnnnnnnnnnnnnnnnnnnnnnnnnnnnnnnnnnnnnnnnnnnnnnnnnnnnnnnnnnnnnnnnnnnnnnnnnnnnnnnnnnnnnnnnnnnnnnnnnnnnnnnnnnnnnnnnnnnnnnnnnnnnnnnnnnnnnnnnnnnnnnnnnnnnnnnnnnnnnnnnnnnnnnnnnnnnnnnnnnnnnnnnnnnnnnnnnnnnnnnnnnnnnnnnnnnnnnnnnnnnnnnnnnnnnnnnnnnnnnnnnnnnnnnnnnnnnnnnnnnnnnnnnnnnnnnnnnnnnnnnnnnnnnnnnnnnnnnnnnnnnnnnnnnnnnnnnnnnnnnnnnnnnnnnnnnnnnnnnnnnnnnnnnnnnnnnnnnnnnnnnnnnnnnnnnnnnnnnnnnnnnnnnnnnnnnnnnnnnnnnnnnnnnnnnnnnnnnnnnnnnnnnnnnnnnnnnnnnnnnnnnnnnnnnnnnnnnnnnnnnnnnnnnnnnnnnnnnnnnnnnnnnnnnnnnnnnnnnnnnnnnnnnnnnnnnnnnnnnnnnnnnnnnnnnnnnnnnnnnnnnnnnnnnnnnnnnnnnnnnnnnnnnnnnnnnnnnnnnnnnnnnnnnnnnnnnnnnnnnnnnnnnnnnnnnnnnnnnnnnnnnnnnnnnnnnnnnnnnnnnnnnnnnnnnnnnnnnnnnnnnnnnnnnnnnnnnnnnnnnnnnnnnnnnnnnnnnnnnnnnnnnnnnnnnnnnnnnnnnnnnnnnnnnnnnnnnnnnnnnnnnnnnnnnnnnnnnnnnnnnnnnnnnnnnnnnnnnnnnnnnnnnnnnnnnnnnnnnnnnnnnnnnnnnnnnnnnnnnnnnnnnnnnnnnnnnnnnnnnnnnnnnnnnnnnnnnnnnnnnnnnnnnnnnnnnnnnnnnnnnnnnnnnnnnnnnnnnnnnnnnnnnnnnnnnnnnnnnnnnnnnnnnnnnnnnnnnnnnnnnnnnnnnnnnnnnnnnnnnnnnnnnnnnnnnnnnnnnnnnnnnnnnnnnnnnnnnnnnnnnnnnnnnnnnnnnnnnnnnnnnnnnnnnnnnnnnnnnnnnnnnnnnnnnnnnnnnnnnnnnnnnnnnnnnnnnnnnnnnnnnnnnnnnnnnnnnnnnnnnnnnnnnnnnnnnnnnnnnnnnnnnnnnnnnnnnnnnnnnnnnnnnnnnnnnnnnnnnnnnnnnnnnnnnnnnnnnnnnnnnnnnnnnnnnnnnnnnnnnnnnnnnnnnnnnnnnnnnnnnnnnnnnnnnnnnnnnnnnnnnnnnnnnnnnnnnnnnnnnnnnnnnnnnnnnnnnnnnnnnnnnnnnnnnnnnnnnnnnnnnnnnnnnnnnnnnnnnnnnnnnnnnnnnnnnnnnnnnnnnnnnnnnnnnnnnnnnnnnnnnnnnnnnnnnnnnnnnnnnnnnnnnnnnnnnnnnnnnnnnnnnnnnnnnnnnnnnnnnnnnnnnnnnnnnnnnnnnnnnnnnnnnnnnnnnnnnnnnnnnnnnnnnnnnnnnnnnnnnnnnnnnnnnnnnnnnnnnnnnnnnnnnnnnnnnnnnnnnnnnnnnnnnnnnnnnnnnnnnnnnnnnnnnnnnnnnnnnnnnnnnnnnnnnnnnnnnnnnnnnnnnnnnnnnnnnnnnnnnnnnnnnnnnnnnnnnnnnnnnnnnnnnnnnnnnnnnnnnnnnnnnnnnnnnnnnnnnnnnnnnnnnnnnnnnnnnnnnnnnnnnnnnnnnnnnnnnnnnnnnnnnnnnnnnnnnnnnnnnnnnnnnnnnnnnnnnnnnnnnnnnnnnnnnnnnnnnnnnnnnnnnnnnnnnnnnnnnnnnnnnnnnnnnnnnnnnnnnnnnnnnnnnnnnnnnnnnnnnnnnnnnnnnnnnnnnnnnnnnnnnnnnnnnnnnnnnnnnnnnnnnnnnnnnnnnnnnnnnnnnnnnnnnnnnnnnnnnnnnnnnnnnnnnnnnnnnnnnnnnnnnnnnnnnnnnnnnnnnnnnnnnnnnnnnnnnnnnnnnnnnnnnnnnnnnnnnnnnnnnnnnnnnnnnnnnnnnnnnnnnnnnnnnnnnnnnnnnnnnnnnnnnnnnnnnnnnnnnnnnnnnnnnnnnnnnnnnnnnnnnnnnnnnnnnnnnnnnnnnnnnnnnnnnnnnnnnnnnnnnnnnnnnnnnnnnnnnnnnnnnnnnnnnnnnnnnnnnnnnnnnnnnnnnnnnnnnnnnnnnnnnnnnnnnnnnnnnnnnnnnnnnnnnnnnnnnnnnnnnnnnnnnnnnnnnnnnnnnnnnnnnnnnnnnnnnnnnnnnnnnnnnnnnnnnnnnnnnnnnnnnnnnnnnnnnnnnnnnnnnnnnnnnnnnnnnnnnnnnnnnnnnnnnnnnnnnnnnnnnnnnnnnnnnnnnnnnnnnnnnnnnnnnnnnnnnnnnnnnnnnnnnnnnnnnnnnnnnnnnnnnnnnnnnnnnnnnnnnnnnnnnnnnnnnnnnnnnnnnnnnnnnnnnnnnnnnnnnnnnnnnnnnnnnnnnnnnnnnnnnnnnnnnnnnnnnnnnnnnnnnnnnnnnnnnnnnnnnnnnnnnnnnnnnnnnnnnnnnnnnnnnnnnnnnnnnnnnnnnnnnnnnnnnnnnnnnnnnnnnnnnnnnnnnnnnnnnnnnnnnnnnnnnnnnnnnnnnnnnnnnnnnnnnnnnnnnnnnnnnnnnnnnnnnnnnnnnnnnnnnnnnnnnnnnnnnnnnnnnnnnnnnnnnnnnnnnnnnnnnnnnnnnnnnnnnnnnnnnnnnnnnnnnnnnnnnnnnnnnnnnnnnnnnnnnnnnnnnnnnnnnnnnnnnnnnnnnnnnnnnnnnnnnnnnnnnnnnnnnnnnnnnnnnnnnnnnnnnnnnnnnnnnnnnnnnnnnnnnnnnnnnnnnnnnnnnnnnnnnnnnnnnnnnnnnnnnnnnnnnnnnnnnnnnnnnnnnnnnnnnnnnnnnnnnnnnnnnnnnnnnnnnnnnnnnnnnnnnnnnnnnnnnnnnnnnnnnnnnnnnnnnnnnnnnnnnnnnnnnnnnnnnnnnnnnnnnnnnnnnnnnnnnnnnnnnnnnnnnnnnnnnnnnnnnnnnnnnnnnnnnnnnnnnnnnnnnnnnnnnnnnnnnnnnnnnnnnnnnnnnnnnnnnnnnnnnnnnnnnnnnnnnnnnnnnnnnnnnnnnnnnnnnnnnnnnnnnnnnnnnnnnnnnnnnnnnnnnnnnnnnnnnnnnnnnnnnnnnnnnnnnnnnnnnnnnnnnnnnnnnnnnnnnnnnnnnnnnnnnnnnnnnnnnnnnnnnnnnnnnnnnnnnnnnnnnnnnnnnnnnnnnnnnnnnnnnnnnnnnnnnnnnnnnnnnnnnnnnnnnnnnnnnnnnnnnnnnnnnnnnnnnnnnnnnnnnnnnnnnnnnnnnnnnnnnnnnnnnnnnnnnnnnnnnnnnnnnnnnnnnnnnnnnnnnnnnnnnnnnnnnnnnnnnnnnnnnnnnnnnnnnnnnnnnnnnnnnnnnnnnnnnnnnnnnnnnnnnnnnnnnnnnnnnnnnnnnnnnnnnnnnnnnnnnnnnnnnnnnnnnnnnnnnnnnnnnnnnnnnnnnnnnnnnnnnnnnnnnnnnnnnnnnnnnnnnnnnnnnnnnnnnnnnnnnnnnnnnnnnnnnnnnnnnnnnnnnnnnnnnnnnnnnnnnnnnnnnnnnnnnnnnnnnnnnnnnnnnnnnnnnnnnnnnnnnnnnnnnnnnnnnnnnnnnnnnnnnnnnnnnnnnnnnnnnnnnnnnnnnnnnnnnnnnnnnnnnnnnnnnnnnnnnnnnnnnnnnnnnnnnnnnnnnnnnnnnnnnnnnnnnnnnnnnnnnnnnnnnnnnnnnnnnnnnnnnnnnnnnnnnnnnnnnnnnnnnnnnnnnnnnnnnnnnnnnnnnnnnnnnnnnnnnnnnnnnnnnnnnnnnnnnnnnnnnnnnnnnnnnnnnnnnnnnnnnnnnnnnnnnnnnnnnnnnnnnnnnnnnnnnnnnnnnnnnnnnnnnnnnnnnnnnnnnnnnnnnnnnnnnnnnnnnnnnnnnnnnnnnnnnnnnnnnnnnnnnnnnnnnnnnnnnnnnnnnnnnnnnnnnnnnnnnnnnnnnnnnnnnnnnnnnnnnnnnnnnnnnnnnnnnnnnnnnnnnnnnnnnnnnnnnnnnnnnnnnnnnnnnnnnnnnnnnnnnnnnnnnnnnnnnnnnnnnnnnnnnnnnnnnnnnnnnnnnnnnnnnnnnnnnnnnnnnnnnnnnnnnnnnnnnnnnnnnnnnnnnnnnnnnnnnnnnnnnnnnnnnnnnnnnnnnnnnnnnnnnnnnnnnnnnnnnnnnnnnnnnnnnnnnnnnnnnnnnnnnnnnnnnnnnnnnnnnnnnnnnnnnnnnnnnnnnnnnnnnnnnnnnnnnnnnnnnnnnnnnnnnnnnnnnnnnnnnnnnnnnnnnnnnnnnnnnnnnnnnnnnnnnnnnnnnnnnnnnnnnnnnnnnnnnnnnnnnnnnnnnnnnnnnnnnnnnnnnnnnnnnnnnnnnnnnnnnnnnnnnnnnnnnnnnnnnnnnnnnnnnnnnnnnnnnnnnnnnnnnnnnnnnnnnnnnnnnnnnnnnnnnnnnnnnnnnnnnnnnnnnnnnnnnnnnnnnnnnnnnnnnnnnnnnnnnnnnnnnnnnnnnnnnnnnnnnnnnnnnnnnnnnnnnnnnnnnnnnnnnnnnnnnnnnnnnnnnnnnnnnnnnnnnnnnnnnnnnnnnnnnnnnnnnnnnnnnnnnnnnnnnnnnnnnnnnnnnnnnnnnnnnnnnnnnnnnnnnnnnnnnnnnnnnnnnnnnnnnnnnnnnnnnnnnnnnnnnnnnnnnnnnnnnnnnnnnnnnnnnnnnnnnnnnnnnnnnnnnnnnnnnnnnnnnnnnnnnnnnnnnnnnnnnnnnnnnnnnnnnnnnnnnnnnnnnnnnnnnnnnnnnnnnnnnnnnnnnnnnnnnnnnnnnnnnnnnnnnnnnnnnnnnnnnnnnnnnnnnnnnnnnnnnnnnnnnnnnnnnnnnnnnnnnnnnnnnnnnnnnnnnnnnnnnnnnnnnnnnnnnnnnnnnnnnnnnnnnnnnnnnnnnnnnnnnnnnnnnnnnnnnnnnnnnnnnnnnnnnnnnnnnnnnnnnnnnnnnnnnnnnnnnnnnnnnnnnnnnnnnnnnnnnnnnnnnnnnnnnnnnnnnnnnnnnnnnnnnnnnnnnnnnnnnnnnnnnnnnnnnnnnnnnnnnnnnnnnnnnnnnnnnnnnnnnnnnnnnnnnnnnnnnnnnnnnnnnnnnnnnnnnnnnnnnnnnnnnnnnnnnnnnnnnnnnnnnnnnnnnnnnnnnnnnnnnnnnnnnnnnnnnnnnnnnnnnnnnnnnnnnnnnnnnnnnnnnnnnnnnnnnnnnnnnnnnnnnnnnnnnnnnnnnnnnnnnnnnnnnnnnnnnnnnnnnnnnnnnnnnnnnnnnnnnnnnnnnnnnnnnnnnnnnnnnnnnnnnnnnnnnnnnnnnnnnnnnnnnnnnnnnnnnnnnnnnnnnnnnnnnnnnnnnnnnnnnnnnnnnnnnnnnnnnnnnnnnnnnnnnnnnnnnnnnnnnnnnnnnnnnnnnnnnnnnnnnnnnnnnnnnnnnnnnnnnnnnnnnnnnnnnnnnnnnnnnnnnnnnnnnnnnnnnnnnnnnnnnnnnnnnnnnnnnnnnnnnnnnnnnnnnnnnnnnnnnnnnnnnnnnnnnnnnnnnnnnnnnnnnnnnnnnnnnnnnnnnnnnnnnnnnnnnnnnnnnnnnnnnnnnnnnnnnnnnnnnnnnnnnnnnnnnnnnnnnnnnnnnnnnnnnnnnnnnnnnnnnnnnnnnnnnnnnnnnnnnnnnnnnnnnnnnnnnnnnnnnnnnnnnnnnnnnnnnnnnnnnnnnnnnnnnnnnnnnnnnnnnnnnnnnnnnnnnnnnnnnnnnnnnnnnnnnnnnnnnnnnnnnnnnnnnnnnnnnnnnnnnnnnnnnnnnnnnnnnnnnnnnnnnnnnnnnnnnnnnnnnnnnnnnnnnnnnnnnnnnnnnnnnnnnnnnnnnnnnnnnnnnnnnnnnnnnnnnnnnnnnnnnnnnnnnnnnnnnnnnnnnnnnnnnnnnnnnnnnnnnnnnnnnnnnnnnnnnnnnnnnnnnnnnnnnnnnnnnnnnnnnnnnnnnnnnnnnnnnnnnnnnnnnnnnnnnnnnnnnnnnnnnnnnnnnnnnnnnnnnnnnnnnnnnnnnnnnnnnnnnnnnnnnnnnnnnnnnnnnnnnnnnnnnnnnnnnnnnnnnnnnnnnnnnnnnnnnnnnnnnnnnnnnnnnnnnnnnnnnnnnnnnnnnnnnnnnnnnnnnnnnnnnnnnnnnnnnnnnnnnnnnnnnnnnnnnnnnnnnnnnnnnnnnnnnnnnnnnnnnnnnnnnnnnnnnnnnnnnnnnnnnnnnnnnnnnnnnnnnnnnnnnnnnnnnnnnnnnnnnnnnnnnnnnnnnnnnnnnnnnnnnnnnnnnnnnnnnnnnnnnnnnnnnnnnnnnnnnnnnnnnnnnnnnnnnnnnnnnnnnnnnnnnnnnnnnnnnnnnnnnnnnnnnnnnnnnnnnnnnnnnnnnnnnnnnnnnnnnnnnnnnnnnnnnnnnnnnnnnnnnnnnnnnnnnnnnnnnnnnnnnnnnnnnnnnnnnnnnnnnnnnnnnnnnnnnnnnnnnnnnnnnnnnnnnnnnnnnnnnnnnnnnnnnnnnnnnnnnnnnnnnnnnnnnnnnnnnnnnnnnnnnnnnnnnnnnnnnnnnnnnnnnnnnnnnnnnnnnnnnnnnnnnnnnnnnnnnnnnnnnnnnnnnnnnnnnnnnnnnnnnnnnnnnnnnnnnnnnnnnnnnnnnnnnnnnnnnnnnnnnnnnnnnnnnnnnnnnnnnnnnnnnnnnnnnnnnnnnnnnnnnnnnnnnnnnnnnnnnnnnnnnnnnnnnnnnnnnnnnnnnnnnnnnnnnnnnnnnnnnnnnnnnnnnnnnnnnnnnnnnnnnnnnnnnnnnnnnnnnnnnnnnnnnnnnnnnnnnnnnnnnnnnnnnnnnnnnnnnnnnnnnnnnnnnnnnnnnnnnnnnnnnnnnnnnnnnnnnnnnnnnnnnnnnnnnnnnnnnnnnnnnnnnnnnnnnnnnnnnnnnnnnnnnnnnnnnnnnnnnnnnnnnnnnnnnnnnnnnnnnnnnnnnnnnnnnnnnnnnnnnnnnnnnnnnnnnnnnnnnnnnnnnnnnnnnnnnnnnnnnnnnnnnnnnnnnnnnnnnnnnnnnnnnnnnnnnnnnnnnnnnnnnnnnnnnnnnnnnnnnnnnnnnnnnnnnnnnnnnnnnnnnnnnnnnnnnnnnnnnnnnnnnnnnnnnnnnnnnnnnnnnnnnnnnnnnnnnnnnnnnnnnnnnnnnnnnnnnnnnnnnnnnnnnnnnnnnnnnnnnnnnnnnnnnnnnnnnnnnnnnnnnnnnnnnnnnnnnnnnnnnnnnnnnnnnnnnnnnnnnnnnnnnnnnnnnnnnnnnnnnnnnnnnnnnnnnnnnnnnnnnnnnnnnnnnnnnnnnnnnnnnnnnnnnnnnnnnnnnnnnnnnnnnnnnnnnnnnnnnnnnnnnnnnnnnnnnnnnnnnnnnnnnnnnnnnnnnnnnnnnnnnnnnnnnnnnnnnnnnnnnnnnnnnnnnnnnnnnnnnnnnnnnnnnnnnnnnnnnnnnnnnnnnnnnnnnnnnnnnnnnnnnnnnnnnnnnnnnnnnnnnnnnnnnnnnnnnnnnnnnnnnnnnnnnnnnnnnnnnnnnnnnnnnnnnnnnnnnnnnnnnnnnnnnnnnnnnnnnnnnnnnnnnnnnnnnnnnnnnnnnnnnnnnnnnnnnnnnnnnnnnnnnnnnnnnnnnnnnnnnnnnnnnnnnnnnnnnnnnnnnnnnnnnnnnnnnnnnnnnnnnnnnnnnnnnnnnnnnnnnnnnnnnnnnnnnnnnnnnnnnnnnnnnnnnnnnnnnnnnnnnnnnnnnnnnnnnnnnnnnnnnnnnnnnnnnnnnnnnnnnnnnnnnnnnnnnnnnnnnnnnnnnnnnnnnnnnnnnnnnnnnnnnnnnnnnnnnnnnnnnnnnnnnnnnnnnnnnnnnnnnnnnnnnnnnnnnnnnnnnnnnnnnnnnnnnnnnnnnnnnnnnnnnnnnnnnnnnnnnnnnnnnnnnnnnnnnnnnnnnnnnnnnnnnnnnnnnnnnnnnnnnnnnnnnnnnnnnnnnnnnnnnnnnnnnnnnnnnnnnnnnnnnnnnnnnnnnnnnnnnnnnnnnnnnnnnnnnnnnnnnnnnnnnnnnnnnnnnnnnnnnnnnnnnnnnnnnnnnnnnnnnnnnnnnnnnnnnnnnnnnnnnnnnnnnnnnnnnnnnnnnnnnnnnnnnnnnnnnnnnnnnnnnnnnnnnnnnnnnnnnnnnnnnnnnnnnnnnnnnnnnnnnnnnnnnnnnnnnnnnnnnnnnnnnnnnnnnnnnnnnnnnnnnnnnnnnnnnnnnnnnnnnnnnnnnnnnnnnnnnnnnnnnnnnnnnnnnnnnnnnnnnnnnnnnnnnnnnnnnnnnnnnnnnnnnnnnnnnnnnnnnnnnnnnnnnnnnnnnnnnnnnnnnnnnnnnnnnnnnnnnnnnnnnnnnnnnnnnnnnnnnnnnnnnnnnnnnnnnnnnnnnnnnnnnnnnnnnnnnnnnnnnnnnnnnnnnnnnnnnnnnnnnnnnnnnnnnnnnnnnnnnnnnnnnnnnnnnnnnnnnnnnnnnnnnnnnnnnnnnnnnnnnnnnnnnnnnnnnnnnnnnnnnnnnnnnnnnnnnnnnnnnnnnnnnnnnnnnnnnnnnnnnnnnnnnnnnnnnnnnnnnnnnnnnnnnnnnnnnnnnnnnnnnnnnnnnnnnnnnnnnnnnnnnnnnnnnnnnnnnnnnnnnnnnnnnnnnnnnnnnnnnnnnnnnnnnnnnnnnnnnnnnnnnnnnnnnnnnnnnnnnnnnnnnnnnnnnnnnnnnnnnnnnnnnnnnnnnnnnnnnnnnnnnnnnnnnnnnnnnnnnnnnnnnnnnnnnnnnnnnnnnnnnnnnnnnnnnnnnnnnnnnnnnnnnnnnnnnnnnnnnnnnnnnnnnnnnnnnnnnnnnnnnnnnnnnnnnnnnnnnnnnnnnnnnnnnnnnnnnnnnnnnnnnnnnnnnnnnnnnnnnnnnnnnnnnnnnnnnnnnnnnnnnnnnnnnnnnnnnnnnnnnnnnnnnnnnnnnnnnnnnnnnnnnnnnnnnnnnnnnnnnnnnnnnnnnnnnnnnnnnnnnnnnnnnnnnnnnnnnnnnnnnnnnnnnnnnnnnnnnnnnnnnnnnnnnnnnnnnnnnnnnnnnnnnnnnnnnnnnnnnnnnnnnnnnnnnnnnnnnnnnnnnnnnnnnnnnnnnnnnnnnnnnnnnnnnnnnnnnnnnnnnnnnnnnnnnnnnnnnnnnnnnnnnnnnnnnnnnnnnnnnnnnnnnnnnnnnnnnnnnnnnnnnnnnnnnnnnnnnnnnnnnnnnnnnnnnnnnnnnnnnnnnnnnnnnnnnnnnnnnnnnnnnnnnnnnnnnnnnnnnnnnnnnnnnnnnnnnnnnnnnnnnnnnnnnnnnnnnnnnnnnnnnnnnnnnnnnnnnnnnnnnnnnnnnnnnnnnnnnnnnnnnnnnnnnnnnnnnnnnnnnnnnnnnnnnnnnnnnnnnnnnnnnnnnnnnnnnnnnnnnnnnnnnnnnnnnnnnnnnnnnnnnnnnnnnnnnnnnnnnnnnnnnnnnnnnnnnnnnnnnnnnnnnnnnnnnnnnnnnnnnnnnnnnnnnnnnnnnnnnnnnnnnnnnnnnnnnnnnnnnnnnnnnnnnnnnnnnnnnnnnnnnnnnnnnnnnnnnnnnnnnnnnnnnnnnnnnnnnnnnnnnnnnnnnnnnnnnnnnnnnnnnnnnnnnnnnnnnnnnnnnnnnnnnnnnnnnnnnnnnnnnnnnnnnnnnnnnnnnnnnnnnnnnnnnnnnnnnnnnnnnnnnnnnnnnnnnnnnnnnnnnnnnnnnnnnnnnnnnnnnnnnnnnnnnnnnnnnnnnnnnnnnnnnnnnnnnnnnnnnnnnnnnnnnnnnnnnnnnnnnnnnnnnnnnnnnnnnnnnnnnnnnnnnnnnnnnnnnnnnnnnnnnnnnnnnnnnnnnnnnnnnnnnnnnnnnnnnnnnnnnnnnnnnnnnnnnnnnnnnnnnnnnnnnnnnnnnnnnnnnnnnnnnnnnnnnnnnnnnnnnnnnnnnnnnnnnnnnnnnnnnnnnnnnnnnnnnnnnnnnnnnnnnnnnnnnnnnnnnnnnnnnnnnnnnnnnnnnnnnnnnnnnnnnnnnnnnnnnnnnnnnnnnnnnnnnnnnnnnnnnnnnnnnnnnnnnnnnnnnnnnnnnnnnnnnnnnnnnnnnnnnnnnnnnnnnnnnnnnnnnnnnnnnnnnnnnnnnnnnnnnnnnnnnnnnnnnnnnnnnnnnnnnnnnnnnnnnnnnnnnnnnnnnnnnnnnnnnnnnnnnnnnnnnnnnnnnnnnnnnnnnnnnnnnnnnnnnnnnnnnnnnnnnnnnnnnnnnnnnnnnnnnnnnnnnnnnnnnnnnnnnnnnnnnnnnnnnnnnnnnnnnnnnnnnnnnnnnnnnnnnnnnnnnnnnnnnnnnnnnnnnnnnnnnnnnnnnnnnnnnnnnnnnnnnnnnnnnnnnnnnnnnnnnnnnnnnnnnnnnnnnnnnnnnnnnnnnnnnnnnnnnnnnnnnnnnnnnnnnnnnnnnnnnnnnnnnnnnnnnnnnnnnnnnnnnnnnnnnnnnnnnnnnnnnnnnnnnnnnnnnnnnnnnnnnnnnnnnnnnnnnnnnnnnnnnnnnnnnnnnnnnnnnnnnnnnnnnnnnnnnnnnnnnnnnnnnnnnnnnnnnnnnnnnnnnnnnnnnnnnnnnnnnnnnnnnnnnnnnnnnnnnnnnnnnnnnnnnnnnnnnnnnnnnnnnnnnnnnnnnnnnnnnnnnnnnnnnnnnnnnnnnnnnnnnnnnnnnnnnnnnnnnnnnnnnnnnnnnnnnnnnnnnnnnnnnnnnnnnnnnnnnnnnnnnnnnnnnnnnnnnnnnnnnnnnnnnnnnnnnnnnnnnnnnnnnnnnnnnnnnnnnnnnnnnnnnnnnnnnnnnnnnnnnnnnnnnnnnnnnnnnnnnnnnnnnnnnnnnnnnnnnnnnnnnnnnnnnnnnnnnnnnnnnnnnnnnnnnnnnnnnnnnnnnnnnnnnnnnnnnnnnnnnnnnnnnnnnnnnnnnnnnnnnnnnnnnnnnnnnnnnnnnnnnnnnnnnnnnnnnnnnnnnnnnnnnnnnnnnnnnnnnnnnnnnnnnnnnnnnnnnnnnnnnnnnnnnnnnnnnnnnnnnnnnnnnnnnnnnnnnnnnnnnnnnnnnnnnnnnnnnnnnnnnnnnnnnnnnnnnnnnnnnnnnnnnnnnnnnnnnnnnnnnnnnnnnnnnnnnnnnnnnnnnnnnnnnnnnnnnnnnnnnnnnnnnnnnnnnnnnnnnnnnnnnnnnnnnnnnnnnnnnnnnnnnnnnnnnnnnnnnnnnnnnnnnnnnnnnnnnnnnnnnnnnnnnnnnnnnnnnnnnnnnnnnnnnnnnnnnnnnnnnnnnnnnnnnnnnnnnnnnnnnnnnnnnnnnnnnnnnnnnnnnnnnnnnnnnnnnnnnnnnnnnnnnnnnnnnnnnnnnnnnnnnnnnnnnnnnnnnnnnnnnnnnnnnnnnnnnnnnnnnnnnnnnnnnnnnnnnnnnnnnnnnnnnnnnnnnnnnnnnnnnnnnnnnnnnnnnnnnnnnnnnnnnnnnnnnnnnnnnnnnnnnnnnnnnnnnnnnnnnnnnnnnnnnnnnnnnnnnnnnnnnnnnnnnnnnnnnnnnnnnnnnnnnnnnnnnnnnnnnnnnnnnnnnnnnnnnnnnnnnnnnnnnnnnnnnnnnnnnnnnnnnnnnnnnnnnnnnnnnnnnnnnnnnnnnnnnnnnnnnnnnnnnnnnnnnnnnnnnnnnnnnnnnnnnnnnnnnnnnnnnnnnnnnnnnnnnnnnnnnnnnnnnnnnnnnnnnnnnnnnnnnnnnnnnnnnnnnnnnnnnnnnnnnnnnnnnnnnnnnnnnnnnnnnnnnnnnnnnnnnnnnnnnnnnnnnnnnnnnnnnnnnnnnnnnnnnnnnnnnnnnnnnnnnnnnnnnnnnnnnnnnnnnnnnnnnnnnnnnnnnnnnnnnnnnnnnnnnnnnnnnnnnnnnnnnnnnnnnnnnnnnnnnnnnnnnnnnnnnnnnnnnnnnnnnnnnnnnnnnnnnnnnnnnnnnnnnnnnnnnnnnnnnnnnnnnnnnnnnnnnnnnnnnnnnnnnnnnnnnnnnnnnnnnnnnnnnnnnnnnnnnnnnnnnnnnnnnnnnnnnnnnnnnnnnnnnnnnnnnnnnnnnnnnnnnnnnnnnnnnnnnnnnnnnnnnnnnnnnnnnnnnnnnnnnnnnnnnnnnnnnnnnnnnnnnnnnnnnnnnnnnnnnnnnnnnnnnnnnnnnnnnnnnnnnnnnnnnnnnnnnnnnnnnnnnnnnnnnnnnnnnnnnnnnnnnnnnnnnnnnnnnnnnnnnnnnnnnnnnnnnnnnnnnnnnnnnnnnnnnnnnnnnnnnnnnnnnnnnnnnnnnnnnnnnnnnnnnnnnnnnnnnnnnnnnnnnnnnnnnnnnnnnnnnnnnnnnnnnnnnnnnnnnnnnnnnnnnnnnnnnnnnnnnnnnnnnnnnnnnnnnnnnnnnnnnnnnnnnnnnnnnnnnnnnnnnnnnnnnnnnnnnnnnnnnnnnnnnnnnnnnnnnnnnnnnnnnnnnnnnnnnnnnnnnnnnnnnnnnnnnnnnnnnnnnnnnnnnnnnnnnnnnnnnnnnnnnnnnnnnnnnnnnnnnnnnnnnnnnnnnnnnnnnnnnnnnnnnnnnnnnnnnnnnnnnnnnnnnnnnnnnnnnnnnnnnnnnnnnnnnnnnnnnnnnnnnnnnnnnnnnnnnnnnnnnnnnnnnnnnnnnnnnnnnnnnnnnnnnnnnnnnnnnnnnnnnnnnnnnnnnnnnnnnnnnnnnnnnnnnnnnnnnnnnnnnnnnnnnnnnnnnnnnnnnnnnnnnnnnnnnnnnnnnnnnnnnnnnnnnnnnnnnnnnnnnnnnnnnnnnnnnnnnnnnnnnnnnnnnnnnnnnnnnnnnnnnnnnnnnnnnnnnnnnnnnnnnnnnnnnnnnnnnnnnnnnnnnnnnnnnnnnnnnnnnnnnnnnnnnnnnnnnnnnnnnnnnnnnnnnnnnnnnnnnnnnnnnnnnnnnnnnnnnnnnnnnnnnnnnnnnnnnnnnnnnnnnnnnnnnnnnnnnnnnnnnnnnnnnnnnnnnnnnnnnnnnnnnnnnnnnnnnnnnnnnnnnnnnnnnnnnnnnnnnnnnnnnnnnnnnnnnnnnnnnnnnnnnnnnnnnnnnnnnnnnnnnnnnnnnnnnnnnnnnnnnnnnnnnnnnnnnnnnnnnnnnnnnnnnnnnnnnnnnnnnnnnnnnnnnnnnnnnnnnnnnnnnnnnnnnnnnnnnnnnnnnnnnnnnnnnnnnnnnnnnnnnnnnnnnnnnnnnnnnnnnnnnnnnnnnnnnnnnnnnnnnnnnnnnnnnnnnnnnnnnnnnnnnnnnnnnnnnnnnnnnnnnnnnnnnnnnnnnnnnnnnnnnnnnnnnnnnnnnnnnnnnnnnnnnnnnnnnnnnnnnnnnnnnnnnnnnnnnnnnnnnnnnnnnnnnnnnnnnnnnnnnnnnnnnnnnnnnnnnnnnnnnnnnnnnnnnnnnnnnnnnnnnnnnnnnnnnnnnnnnnnnnnnnnnnnnnnnnnnnnnnnnnnnnnnnnnnnnnnnnnnnnnnnnnnnnnnnnnnnnnnnnnnnnnnnnnnnnnnnnnnnnnnnnnnnnnnnnnnnnnnnnnnnnnnnnnnnnnnnnnnnnnnnnnnnnnnnnnnnnnnnnnnnnnnnnnnnnnnnnnnnnnnnnnnnnnnnnnnnnnnnnnnnnnnnnnnnnnnnnnnnnnnnnnnnnnnnnnnnnnnnnnnnnnnnnnnnnnnnnnnnnnnnnnnnnnnnnnnnnnnnnnnnnnnnnnnnnnnnnnnnnnnnnnnnnnnnnnnnnnnnnnnnnnnnnnnnnnnnnnnnnnnnnnnnnnnnnnnnnnnnnnnnnnnnnnnnnnnnnnnnnnnnnnnnnnnnnnnnnnnnnnnnnnnnnnnnnnnnnnnnnnnnnnnnnnnnnnnnnnnnnnnnnnnnnnnnnnnnnnnnnnnnnnnnnnnnnnnnnnnnnnnnnnnnnnnnnnnnnnnnnnnnnnnnnnnnnnnnnnnnnnnnnnnnnnnnnnnnnnnnnnnnnnnnnnnnnnnnnnnnnnnnnnnnnnnnnnnnnnnnnnnnnnnnnnnnnnnnnnnnnnnnnnnnnnnnnnnnnnnnnnnnnnnnnnnnnnnnnnnnnnnnnnnnnnnnnnnnnnnnnnnnnnnnnnnnnnnnnnnnnnnnnnnnnnnnnnnnnnnnnnnnnnnnnnnnnnnnnnnnnnnnnnnnnnnnnnnnnnnnnnnnnnnnnnnnnnnnnnnnnnnnnnnnnnnnnnnnnnnnnnnnnnnnnnnnnnnnnnnnnnnnnnnnnnnnnnnnnnnnnnnnnnnnnnnnnnnnnnnnnnnnnnnnnnnnnnnnnnnnnnnnnnnnnnnnnnnnnnnnnnnnnnnnnnnnnnnnnnnnnnnnnnnnnnnnnnnnnnnnnnnnnnnnnnnnnnnnnnnnnnnnnnnnnnnnnnnnnnnnnnnnnnnnnnnnnnnnnnnnnnnnnnnnnnnnnnnnnnnnnnnnnnnnnnnnnnnnnnnnnnnnnnnnnnnnnnnnnnnnnnnnnnnnnnnnnnnnnnnnnnnnnnnnnnnnnnnnnnnnnnnnnnnnnnnnnnnnnnnnnnnnnnnnnnnnnnnnnnnnnnnnnnnnnnnnnnnnnnnnnnnnnnnnnnnnnnnnnnnnnnnnnnnnnnnnnnnnnnnnnnnnnnnnnnnnnnnnnnnnnnnnnnnnnnnnnnnnnnnnnnnnnnnnnnnnnnnnnnnnnnnnnnnnnnnnnnnnnnnnnnnnnnnnnnnnnnnnnnnnnnnnnnnnnnnnnnnnnnnnnnnnnnnnnnnnnnnnnnnnnnnnnnnnnnnnnnnnnnnnnnnnnnnnnnnnnnnnnnnnnnnnnnnnnnnnnnnnnnnnnnnnnnnnnnnnnnnnnnnnnnnnnnnnnnnnnnnnnnnnnnnnnnnnnnnnnnnnnnnnnnnnnnnnnnnnnnnnnnnnnnnnnnnnnnnnnnnnnnnnnnnnnnnnnnnnnnnnnnnnnnnnnnnnnnnnnnnnnnnnnnnnnnnnnnnnnnnnnnnnnnnnnnnnnnnnnnnnnnnnnnnnnnnnnnnnnnnnnnnnnnnnnnnnnnnnnnnnnnnnnnnnnnnnnnnnnnnnnnnnnnnnnnnnnnnnnnnnnnnnnnnnnnnnnnnnnnnnnnnnnnnnnnnnnnnnnnnnnnnnnnnnnnnnnnnnnnnnnnnnnnnnnnnnnnnnnnnnnnnnnnnnnnnnnnnnnnnnnnnnnnnnnnnnnnnnnnnnnnnnnnnnnnnnnnnnnnnnnnnnnnnnnnnnnnnnnnnnnnnnnnnnnnnnnnnnnnnnnnnnnnnnnnnnnnnnnnnnnnnnnnnnnnnnnnnnnnnnnnnnnnnnnnnnnnnnnnnnnnnnnnnnnnnnnnnnnnnnnnnnnnnnnnnnnnnnnnnnnnnnnnnnnnnnnnnnnnnnnnnnnnnnnnnnnnnnnnnnnnnnnnnnnnnnnnnnnnnnnnnnnnnnnnnnnnnnnnnnnnnnnnnnnnnnnnnnnnnnnnnnnnnnnnnnnnnnnnnnnnnnnnnnnnnnnnnnnnnnnnnnnnnnnnnnnnnnnnnnnnnnnnnnnnnnnnnnnnnnnnnnnnnnnnnnnnnnnnnnnnnnnnnnnnnnnnnnnnnnnnnnnnnnnnnnnnnnnnnnnnnnnnnnnnnnnnnnnnnnnnnnnnnnnnnnnnnnnnnnnnnnnnnnnnnnnnnnnnnnnnnnnnnnnnnnnnnnnnnnnnnnnnnnnnnnnnnnnnnnnnnnnnnnnnnnnnnnnnnnnnnnnnnnnnnnnnnnnnnnnnnnnnnnnnnnnnnnnnnnnnnnnnnnnnnnnnnnnnnnnnnnnnnnnnnnnnnnnnnnnnnnnnnnnnnnnnnnnnnnnnnnnnnnnnnnnnnnnnnnnnnnnnnnnnnnnnnnnnnnnnnnnnnnnnnnnnnnnnnnnnnnnnnnnnnnnnnnnnnnnnnnnnnnnnnnnnnnnnnnnnnnnnnnnnnnnnnnnnnnnnnnnnnnnnnnnnnnnnnnnnnnnnnnnnnnnnnnnnnnnnnnnnnnnnnnnnnnnnnnnnnnnnnnnnnnnnnnnnnnnnnnnnnnnnnnnnnnnnnnnnnnnnnnnnnnnnnnnnnnnnnnnnnnnnnnnnnnnnnnnnnnnnnnnnnnnnnnnnnnnnnnnnnnnnnnnnnnnnnnnnnnnnnnnnnnnnnnnnnnnnnnnnnnnnnnnnnnnnnnnnnnnnnnnnnnnnnnnnnnnnnnnnnnnnnnnnnnnnnnnnnnnnnnnnnnnnnnnnnnnnnnnnnnnnnnnnnnnnnnnnnnnnnnnnnnnnnnnnnnnnnnnnnnnnnnnnnnnnnnnnnnnnnnnnnnnnnnnnnnnnnnnnnnnnnnnnnnnnnnnnnnnnnnnnnnnnnnnnnnnnnnnnnnnnnnnnnnnnnnnnnnnnnnnnnnnnnnnnnnnnnnnnnnnnnnnnnnnnnnnnnnnnnnnnnnnnnnnnnnnnnnnnnnnnnnnnnnnnnnnnnnnnnnnnnnnnnnnnnnnnnnnnnnnnnnnnnnnnnnnnnnnnnnnnnnnnnnnnnnnnnnnnnnnnnnnnnnnnnnnnnnnnnnnnnnnnnnnnnnnnnnnnnnnnnnnnnnnnnnnnnnnnnnnnnnnnnnnnnnnnnnnnnnnnnnnnnnnnnnnnnnnnnnnnnnnnnnnnnnnnnnnnnnnnnnnnnnnnnnnnnnnnnnnnnnnnnnnnnnnnnnnnnnnnnnnnnnnnnnnnnnnnnnnnnnnnnnnnnnnnnnnnnnnnnnnnnnnnnnnnnnnnnnnnnnnnnnnnnnnnnnnnnnnnnnnnnnnnnnnnnnnnnnnnnnnnnnnnnnnnnnnnnnnnnnnnnnnnnnnnnnnnnnnnnnnnnnnnnnnnnnnnnnnnnnnnnnnnnnnnnnnnnnnnnnnnnnnnnnnnnnnnnnnnnnnnnnnnnnnnnnnnnnnnnnnnnnnnnnnnnnnnnnnnnnnnnnnnnnnnnnnnnnnnnnnnnnnnnnnnnnnnnnnnnnnnnnnnnnnnnnnnnnnnnnnnnnnnnnnnnnnnnnnnnnnnnnnnnnnnnnnnnnnnnnnnnnnnnnnnnnnnnnnnnnnnnnnnnnnnnnnnnnnnnnnnnnnnnnnnnnnnnnnnnnnnnnnnnnnnnnnnnnnnnnnnnnnnnnnnnnnnnnnnnnnnnnnnnnnnnnnnnnnnnnnnnnnnnnnnnnnnnnnnnnnnnnnnnnnnnnnnnnnnnnnnnnnnnnnnnnnnnnnnnnnnnnnnnnnnnnnnnnnnnnnnnnnnnnnnnnnnnnnnnnnnnnnnnnnnnnnnnnnnnnnnnnnnnnnnnnnnnnnnnnnnnnnnnnnnnnnnnnnnnnnnnnnnnnnnnnnnnnnnnnnnnnnnnnnnnnnnnnnnnnnnnnnnnnnnnnnnnnnnnnnnnnnnnnnnnnnnnnnnnnnnnnnnnnnnnnnnnnnnnnnnnnnnnnnnnnnnnnnnnnnnnnnnnnnnnnnnnnnnnnnnnnnnnnnnnnnnnnnnnnnnnnnnnnnnnnnnnnnnnnnnnnnnnnnnnnnnnnnnnnnnnnnnnnnnnnnnnnnnnnnnnnnnnnnnnnnnnnnnnnnnnnnnnnnnnnnnnnnnnnnnnnnnnnnnnnnnnnnnnnnnnnnnnnnnnnnnnnnnnnnnnnnnnnnnnnnnnnnnnnnnnnnnnnnnnnnnnnnnnnnnnnnnnnnnnnnnnnnnnnnnnnnnnnnnnnnnnnnnnnnnnnnnnnnnnnnnnnnnnnnnnnnnnnnnnnnnnnnnnnnnnnnnnnnnnnnnnnnnnnnnnnnnnnnnnnnnnnnnnnnnnnnnnnnnnnnnnnnnnnnnnnnnnnnnnnnnnnnnnnnnnnnnnnnnnnnnnnnnnnnnnnnnnnnnnnnnnnnnnnnnnnnnnnnnnnnnnnnnnnnnnnnnnnnnnnnnnnnnnnnnnnnnnnnnnnnnnnnnnnnnnnnnnnnnnnnnnnnnnnnnnnnnnnnnnnnnnnnnnnnnnnnnnnnnnnnnnnnnnnnnnnnnnnnnnnnnnnnnnnnnnnnnnnnnnnnnnnnnnnnnnnnnnnnnnnnnnnnnnnnnnnnnnnnnnnnnnnnnnnnnnnnnnnnnnnnnnnnnnnnnnnnnnnnnnnnnnnnnnnnnnnnnnnnnnnnnnnnnnnnnnnnnnnnnnnnnnnnnnnnnnnnnnnnnnnnnnnnnnnnnnnnnnnnnnnnnnnnnnnnnnnnnnnnnnnnnnnnnnnnnnnnnnnnnnnnnnnnnnnnnnnnnnnnnnnnnnnnnnnnnnnnnnnnnnnnnnnnnnnnnnnnnnnnnnnnnnnnnnnnnnnnnnnnnnnnnnnnnnnnnnnnnnnnnnnnnnnnnnnnnnnnnnnnnnnnnnnnnnnnnnnnnnnnnnnnnnnnnnnnnnnnnnnnnnnnnnnnnnnnnnnnnnnnnnnnnnnnnnnnnnnnnnnnnnnnnnnnnnnnnnnnnnnnnnnnnnnnnnnnnnnnnnnnnnnnnnnnnnnnnnnnnnnnnnnnnnnnnnnnnnnnnnnnnnnnnnnnnnnnnnnnnnnnnnnnnnnnnnnnnnnnnnnnnnnnnnnnnnnnnnnnnnnnnnnnnnnnnnnnnnnnnnnnnnnnnnnnnnnnnnnnnnnnnnnnnnnnnnnnnnnnnnnnnnnnnnnnnnnnnnnnnnnnnnnnnnnnnnnnnnnnnnnnnnnnnnnnnnnnnnnnnnnnnnnnnnnnnnnnnnnnnnnnnnnnnnnnnnnnnnnnnnnnnnnnnnnnnnnnnnnnnnnnnnnnnnnnnnnnnnnnnnnnnnnnnnnnnnnnnnnnnnnnnnnnnnnnnnnnnnnnnnnnnnnnnnnnnnnnnnnnnnnnnnnnnnnnnnnnnnnnnnnnnnnnnnnnnnnnnnnnnnnnnnnnnnnnnnnnnnnnnnnnnnnnnnnnnnnnnnnnnnnnnnnnnnnnnnnnnnnnnnnnnnnnnnnnnnnnnnnnnnnnnnnnnnnnnnnnnnnnnnnnnnnnnnnnnnnnnnnnnnnnnnnnnnnnnnnnnnnnnnnnnnnnnnnnnnnnnnnnnnnnnnnnnnnnnnnnnnnnnnnnnnnnnnnnnnnnnnnnnnnnnnnnnnnnnnnnnnnnnnnnnnnnnnnnnnnnnnnnnnnnnnnnnnnnnnnnnnnnnnnnnnnnnnnnnnnnnnnnnnnnnnnnnnnnnnnnnnnnnnnnnnnnnnnnnnnnnnnnnnnnnnnnnnnnnnnnnnnnnnnnnnnnnnnnnnnnnnnnnnnnnnnnnnnnnnnnnnnnnnnnnnnnnnnnnnnnnnnnnnnnnnnnnnnnnnnnnnnnnnnnnnnnnnnnnnnnnnnnnnnnnnnnnnnnnnnnnnnnnnnnnnnnnnnnnnnnnnnnnnnnnnnnnnnnnnnnnnnnnnnnnnnnnnnnnnnnnnnnnnnnnnnnnnnnnnnnnnnnnnnnnnnnnnnnnnnnnnnnnnnnnnnnnnnnnnnnnnnnnnnnnnnnnnnnnnnnnnnnnnnnnnnnnnnnnnnnnnnnnnnnnnnnnnnnnnnnnnnnnnnnnnnnnnnnnnnnnnnnnnnnnnnnnnnnnnnnnnnnnnnnnnnnnnnnnnnnnnnnnnnnnnnnnnnnnnnnnnnnnnnnnnnnnnnnnnnnnnnnnnnnnnnnnnnnnnnnnnnnnnnnnnnnnnnnnnnnnnnnnnnnnnnnnnnnnnnnnnnnnnnnnnnnnnnnnnnnnnnnnnnnnnnnnnnnnnnnnnnnnnnnnnnnnnnnnnnnnnnnnnnnnnnnnnnnnnnnnnnnnnnnnnnnnnnnnnnnnnnnnnnnnnnnnnnnnnnnnnnnnnnnnnnnnnnnnnnnnnnnnnnnnnnnnnnnnnnnnnnnnnnnnnnnnnnnnnnnnnnnnnnnnnnnnnnnnnnnnnnnnnnnnnnnnnnnnnnnnnnnnnnnnnnnnnnnnnnnnnnnnnnnnnnnnnnnnnnnnnnnnnnnnnnnnnnnnnnnnnnnnnnnnnnnnnnnnnnnnnnnnnnnnnnnnnnnnnnnnnnnnnnnnnnnnnnnnnnnnnnnnnnnnnnnnnnnnnnnnnnnnnnnnnnnnnnnnnnnnnnnnnnnnnnnnnnnnnnnnnnnnnnnnnnnnnnnnnnnnnnnnnnnnnnnnnnnnnnnnnnnnnnnnnnnnnnnnnnnnnnnnnnnnnnnnnnnnnnnnnnnnnnnnnnnnnnnnnnnnnnnnnnnnnnnnnnnnnnnnnnnnnnnnnnnnnnnnnnnnnnnnnnnnnnnnnnnnnnnnnnnnnnnnnnnnnnnnnnnnnnnnnnnnnnnnnnnnnnnnnnnnnnnnnnnnnnnnnnnnnnnnnnnnnnnnnnnnnnnnnnnnnnnnnnnnnnnnnnnnnnnnnnnnnnnnnnnnnnnnnnnnnnnnnnnnnnnnnnnnnnnnnnnnnnnnnnnnnnnnnnnnnnnnnnnnnnnnnnnnnnnnnnnnnnnnnnnnnnnnnnnnnnnnnnnnnnnnnnnnnnnnnnnnnnnnnnnnnnnnnnnnnnnnnnnnnnnnnnnnnnnnnnnnnnnnnnnnnnnnnnnnnnnnnnnnnnnnnnnnnnnnnnnnnnnnnnnnnnnnnnnnnnnnnnnnnnnnnnnnnnnnnnnnnnnnnnnnnnnnnnnnnnnnnnnnnnnnnnnnnnnnnnnnnnnnnnnnnnnnnnnnnnnnnnnnnnnnnnnnnnnnnnnnnnnnnnnnnnnnnnnnnnnnnnnnnnnnnnnnnnnnnnnnnnnnnnnnnnnnnnnnnnnnnnnnnnnnnnnnnnnnnnnnnnnnnnnnnnnnnnnnnnnnnnnnnnnnnnnnnnnnnnnnnnnnnnnnnnnnnnnnnnnnnnnnnnnnnnnnnnnnnnnnnnnnnnnnnnnnnnnnnnnnnnnnnnnnnnnnnnnnnnnnnnnnnnnnnnnnnnnnnnnnnnnnnnnnnnnnnnnnnnnnnnnnnnnnnnnnnnnnnnnnnnnnnnnnnnnnnnnnnnnnnnnnnnnnnnnnnnnnnnnnnnnnnnnnnnnnnnnnnnnnnnnnnnnnnnnnnnnnnnnnnnnnnnnnnnnnnnnnnnnnnnnnnnnnnnnnnnnnnnnnnnnnnnnnnnnnnnnnnnnnnnnnnnnnnnnnnnnnnnnnnnnnnnnnnnnnnnnnnnnnnnnnnnnnnnnnnnnnnnnnnnnnnnnnnnnnnnnnnnnnnnnnnnnnnnnnnnnnnnnnnnnnnnnnnnnnnnnnnnnnnnnnnnnnnnnnnnnnnnnnnnnnnnnnnnnnnnnnnnnnnnnnnnnnnnnnnnnnnnnnnnnnnnnnnnnnnnnnnnnnnnnnnnnnnnnnnnnnnnnnnnnnnnnnnnnnnnnnnnnnnnnnnnnnnnnnnnnnnnnnnnnnnnnnnnnnnnnnnnnnnnnnnnnnnnnnnnnnnnnnnnnnnnnnnnnnnnnnnnnnnnnnnnnnnnnnnnnnnnnnnnnnnnnnnnnnnnnnnnnnnnnnnnnnnnnnnnnnnnnnnnnnnnnnnnnnnnnnnnnnnnnnnnnnnnnnnnnnnnnnnnnnnnnnnnnnnnnnnnnnnnnnnnnnnnnnnnnnnnnnnnnnnnnnnnnnnnnnnnnnnnnnnnnnnnnnnnnnnnnnnnnnnnnnnnnnnnnnnnnnnnnnnnnnnnnnnnnnnnnnnnnnnnnnnnnnnnnnnnnnnnnnnnnnnnnnnnnnnnnnnnnnnnnnnnnnnnnnnnnnnnnnnnnnnnnnnnnnnnnnnnnnnnnnnnnnnnnnnnnnnnnnnnnnnnnnnnnnnnnnnnnnnnnnnnnnnnnnnnnnnnnnnnnnnnnnnnnnnnnnnnnnnnnnnnnnnnnnnnnnnnnnnnnnnnnnnnnnnnnnnnnnnnnnnnnnnnnnnnnnnnnnnnnnnnnnnnnnnnnnnnnnnnnnnnnnnnnnnnnnnnnnnnnnnnnnnnnnnnnnnnnnnnnnnnnnnnnnnnnnnnnnnnnnnnnnnnnnnnnnnnnnnnnnnnnnnnnnnnnnnnnnnnnnnnnnnnnnnnnnnnnnnnnnnnnnnnnnnnnnnnnnnnnnnnnnnnnnnnnnnnnnnnnnnnnnnnnnnnnnnnnnnnnnnnnnnnnnnnnnnnnnnnnnnnnnnnnnnnnnnnnnnnnnnnnnnnnnnnnnnnnnnnnnnnnnnnnnnnnnnnnnnnnnnnnnnnnnnnnnnnnnnnnnnnnnnnnnnnnnnnnnnnnnnnnnnnnnnnnnnnnnnnnnnnnnnnnnnnnnnnnnnnnnnnnnnnnnnnnnnnnnnnnnnnnnnnnnnnnnnnnnnnnnnnnnnnnnnnnnnnnnnnnnnnnnnnnnnnnnnnnnnnnnnnnnnnnnnnnnnnnnnnnnnnnnnnnnnnnnnnnnnnnnnnnnnnnnnnnnnnnnnnnnnnnnnnnnnnnnnnnnnnnnnnnnnnnnnnnnnnnnnnnnnnnnnnnnnnnnnnnnnnnnnnnnnnnnnnnnnnnnnnnnnnnnnnnnnnnnnnnnnnnnnnnnnnnnnnnnnnnnnnnnnnnnnnnnnnnnnnnnnnnnnnnnnnnnnnnnnnnnnnnnnnnnnnnnnnnnnnnnnnnnnnnnnnnnnnnnnnnnnnnnnnnnnnnnnnnnnnnnnnnnnnnnnnnnnnnnnnnnnnnnnnnnnnnnnnnnnnnnnnnnnnnnnnnnnnnnnnnnnnnnnnnnnnnnnnnnnnnnnnnnnnnnnnnnnnnnnnnnnnnnnnnnnnnnnnnnnnnnnnnnnnnnnnnnnnnnnnnnnnnnnnnnnnnnnnnnnnnnnnnnnnnnnnnnnnnnnnnnnnnnnnnnnnnnnnnnnnnnnnnnnnnnnnnnnnnnnnnnnnnnnnnnnnnnnnnnnnnnnnnnnnnnnnnnnnnnnnnnnnnnnnnnnnnnnnnnnnnnnnnnnnnnnnnnnnnnnnnnnnnnnnnnnnnnnnnnnnnnnnnnnnnnnnnnnnnnnnnnnnnnnnnnnnnnnnnnnnnnnnnnnnnnnnnnnnnnnnnnnnnnnnnnnnnnnnnnnnnnnnnnnnnnnnnnnnnnnnnnnnnnnnnnnnnnnnnnnnnnnnnnnnnnnnnnnnnnnnnnnnnnnnnnnnnnnnnnnnnnnnnnnnnnnnnnnnnnnnnnnnnnnnnnnnnnnnnnnnnnnnnnnnnnnnnnnnnnnnnnnnnnnnnnnnnnnnnnnnnnnnnnnnnnnnnnnnnnnnnnnnnnnnnnnnnnnnnnnnnnnnnnnnnnnnnnnnnnnnnnnnnnnnnnnnnnnnnnnnnnnnnnnnnnnnnnnnnnnnnnnnnnnnnnnnnnnnnnnnnnnnnnnnnnnnnnnnnnnnnnnnnnnnnnnnnnnnnnnnnnnnnnnnnnnnnnnnnnnnnnnnnnnnnnnnnnnnnnnnnnnnnnnnnnnnnnnnnnnnnnnnnnnnnnnnnnnnnnnnnnnnnnnnnnnnnnnnnnnnnnnnnnnnnnnnnnnnnnnnnnnnnnnnnnnnnnnnnnnnnnnnnnnnnnnnnnnnnnnnnnnnnnnnnnnnnnnnnnnnnnnnnnnnnnnnnnnnnnnnnnnnnnnnnnnnnnnnnnnnnnnnnnnnnnnnnnnnnnnnnnnnnnnnnnnnnnnnnnnnnnnnnnnnnnnnnnnnnnnnnnnnnnnnnnnnnnnnnnnnnnnnnnnnnnnnnnnnnnnnnnnnnnnnnnnnnnnnnnnnnnnnnnnnnnnnnnnnnnnnnnnnnnnnnnnnnnnnnnnnnnnnnnnnnnnnnnnnnnnnnnnnnnnnnnnnnnnnnnnnnnnnnnnnnnnnnnnnnnnnnnnnnnnnnnnnnnnnnnnnnnnnnnnnnnnnnnnnnnnnnnnnnnnnnnnnnnnnnnnnnnnnnnnnnnnnnnnnnnnnnnnnnnnnnnnnnnnnnnnnnnnnnnnnnnnnnnnnnnnnnnnnnnnnnnnnnnnnnnnnnnnnnnnnnnnnnnnnnnnnnnnnnnnnnnnnnnnnnnnnnnnnnnnnnnnnnnnnnnnnnnnnnnnnnnnnnnnnnnnnnnnnnnnnnnnnnnnnnnnnnnnnnnnnnnnnnnnnnnnnnnnnnnnnnnnnnnnnnnnnnnnnnnnnnnnnnnnnnnnnnnnnnnnnnnnnnnnnnnnnnnnnnnnnnnnnnnnnnnnnnnnnnnnnnnnnnnnnnnnnnnnnnnnnnnnnnnnnnnnnnnnnnnnnnnnnnnnnnnnnnnnnnnnnnnnnnnnnnnnnnnnnnnnnnnnnnnnnnnnnnnnnnnnnnnnnnnnnnnnnnnnnnnnnnnnnnnnnnnnnnnnnnnnnnnnnnnnnnnnnnnnnnnnnnnnnnnnnnnnnnnnnnnnnnnnnnnnnnnnnnnnnnnnnnnnnnnnnnnnnnnnnnnnnnnnnnnnnnnnnnnnnnnnnnnnnnnnnnnnnnnnnnnnnnnnnnnnnnnnnnnnnnnnnnnnnnnnnnnnnnnnnnnnnnnnnnnnnnnnnnnnnnnnnnnnnnnnnnnnnnnnnnnnnnnnnnnnnnnnnnnnnnnnnnnnnnnnnnnnnnnnnnnnnnnnnnnnnnnnnnnnnnnnnnnnnnnnnnnnnnnnnnnnnnnnnnnnnnnnnnnnnnnnnnnnnnnnnnnnnnnnnnnnnnnnnnnnnnnnnnnnnnnnnnnnnnnnnnnnnnnnnnnnnnnnnnnnnnnnnnnnnnnnnnnnnnnnnnnnnnnnnnnnnnnnnnnnnnnnnnnnnnnnnnnnnnnnnnnnnnnnnnnnnnnnnnnnnnnnnnnnnnnnnnnnnnnnnnnnnnnnnnnnnnnnnnnnnnnnnnnnnnnnnnnnnnnnnnnnnnnnnnnnnnnnnnnnnnnnnnnnnnnnnnnnnnnnnnnnnnnnnnnnnnnnnnnnnnnnnnnnnnnnnnnnnnnnnnnnnnnnnnnnnnnnnnnnnnnnnnnnnnnnnnnnnnnnnnnnnnnnnnnnnnnnnnnnnnnnnnnnnnnnnnnnnnnnnnnnnnnnnnnnnnnnnnnnnnnnnnnnnnnnnnnnnnnnnnnnnnnnnnnnnnnnnnnnnnnnnnnnnnnnnnnnnnnnnnnnnnnnnnnnnnnnnnnnnnnnnnnnnnnnnnnnnnnnnnnnnnnnnnnnnnnnnnnnnnnnnnnnnnnnnnnnnnnnnnnnnnnnnnnnnnnnnnnnnnnnnnnnnnnnnnnnnnnnnnnnnnnnnnnnnnnnnnnnnnnnnnnnnnnnnnnnnnnnnnnnnnnnnnnnnnnnnnnnnnnnnnnnnnnnnnnnnnnnnnnnnnnnnnnnnnnnnnnnnnnnnnnnnnnnnnnnnnnnnnnnnnnnnnnnnnnnnnnnnnnnnnnnnnnnnnnnnnnnnnnnnnnnnnnnnnnnnnnnnnnnnnnnnnnnnnnnnnnnnnnnnnnnnnnnnnnnnnnnnnnnnnnnnnnnnnnnnnnnnnnnnnnnnnnnnnnnnnnnnnnnnnnnnnnnnnnnnnnnnnnnnnnnnnnnnnnnnnnnnnnnnnnnnnnnnnnnnnnnnnnnnnnnnnnnnnnnnnnnnnnnnnnnnnnnnnnnnnnnnnnnnnnnnnnnnnnnnnnnnnnnnnnnnnnnnnnnnnnnnnnnnnnnnnnnnnnnnnnnnnnnnnnnnnnnnnnnnnnnnnnnnnnnnnnnnnnnnnnnnnnnnnnnnnnnnnnnnnnnnnnnnnnnnnnnnnnnnnnnnnnnnnnnnnnnnnnnnnnnnnnnnnnnnnnnnnnnnnnnnnnnnnnnnnnnnnnnnnnnnnnnnnnnnnnnnnnnnnnnnnnnnnnnnnnnnnnnnnnnnnnnnnnnnnnnnnnnnnnnnnnnnnnnnnnnnnnnnnnnnnnnnnnnnnnnnnnnnnnnnnnnnnnnnnnnnnnnnnnnnnnnnnnnnnnnnnnnnnnnnnnnnnnnnnnnnnnnnnnnnnnnnnnnnnnnnnnnnnnnnnnnnnnnnnnnnnnnnnnnnnnnnnnnnnnnnnnnnnnnnnnnnnnnnnnnnnnnnnnnnnnnnnnnnnnnnnnnnnnnnnnnnnnnnnnnnnnnnnnnnnnnnnnnnnnnnnnnnnnnnnnnnnnnnnnnnnnnnnnnnnnnnnnnnnnnnnnnnnnnnnnnnnnnnnnnnnnnnnnnnnnnnnnnnnnnnnnnnnnnnnnnnnnnnnnnnnnnnnnnnnnnnnnnnnnnnnnnnnnnnnnnnnnnnnnnnnnnnnnnnnnnnnnnnnnnnnnnnnnnnnnnnnnnnnnnnnnnnnnnnnnnnnnnnnnnnnnnnnnnnnnnnnnnnnnnnnnnnnnnnnnnnnnnnnnnnnnnnnnnnnnnnnnnnnnnnnnnnnnnnnnnnnnnnnnnnnnnnnnnnnnnnnnnnnnnnnnnnnnnnnnnnnnnnnnnnnnnnnnnnnnnnnnnnnnnnnnnnnnnnnnnnnnnnnnnnnnnnnnnnnnnnnnnnnnnnnnnnnnnnnnnnnnnnnnnnnnnnnnnnnnnnnnnnnnnnnnnnnnnnnnnnnnnnnnnnnnnnnnnnnnnnnnnnnnnnnnnnnnnnnnnnnnnnnnnnnnnnnnnnnnnnnnnnnnnnnnnnnnnnnnnnnnnnnnnnnnnnnnnnnnnnnnnnnnnnnnnnnnnnnnnnnnnnnnnnnnnnnnnnnnnnnnnnnnnnnnnnnnnnnnnnnnnnnnnnnnnnnnnnnnnnnnnnnnnnnnnnnnnnnnnnnnnnnnnnnnnnnnnnnnnnnnnnnnnnnnnnnnnnnnnnnnnnnnnnnnnnnnnnnnnnnnnnnnnnnnnnnnnnnnnnnnnnnnnnnnnnnnnnnnnnnnnnnnnnnnnnnnnnnnnnnnnnnnnnnnnnnnnnnnnnnnnnnnnnnnnnnnnnnnnnnnnnnnnnnnnnnnnnnnnnnnnnnnnnnnnnnnnnnnnnnnnnnnnnnnnnnnnnnnnnnnnnnnnnnnnnnnnnnnnnnnnnnnnnnnnnnnnnnnnnnnnnnnnnnnnnnnnnnnnnnnnnnnnnnnnnnnnnnnnnnnnnnnnnnnnnnnnnnnnnnnnnnnnnnnnnnnnnnnnnnnnnnnnnnnnnnnnnnnnnnnnnnnnnnnnnnnnnnnnnnnnnnnnnnnnnnnnnnnnnnnnnnnnnnnnnnnnnnnnnnnnnnnnnnnnnnnnnnnnnnnnnnnnnnnnnnnnnnnnnnnnnnnnnnnnnnnnnnnnnnnnnnnnnnnnnnnnnnnnnnnnnnnnnnnnnnnnnnnnnnnnnnnnnnnnnnnnnnnnnnnnnnnnnnnnnnnnnnnnnnnnnnnnnnnnnnnnnnnnnnnnnnnnnnnnnnnnnnnnnnnnnnnnnnnnnnnnnnnnnnnnnnnnnnnnnnnnnnnnnnnnnnnnnnnnnnnnnnnnnnnnnnnnnnnnnnnnnnnnnnnnnnnnnnnnnnnnnnnnnnnnnnnnnnnnnnnnnnnnnnnnnnnnnnnnnnnnnnnnnnnnnnnnnnnnnnnnnnnnnnnnnnnnnnnnnnnnnnnnnnnnnnnnnnnnnnnnnnnnnnnnnnnnnnnnnnnnnnnnnnnnnnnnnnnnnnnnnnnnnnnnnnnnnnnnnnnnnnnnnnnnnnnnnnnnnnnnnnnnnnnnnnnnnnnnnnnnnnnnnnnnnnnnnnnnnnnnnnnnnnnnnnnnnnnnnnnnnnnnnnnnnnnnnnnnnnnnnnnnnnnnnnnnnnnnnnnnnnnnnnnnnnnnnnnnnnnnnnnnnnnnnnnnnnnnnnnnnnnnnnnnnnnnnnnnnnnnnnnnnnnnnnnnnnnnnnnnnnnnnnnnnnnnnnnnnnnnnnnnnnnnnnnnnnnnnnnnnnnnnnnnnnnnnnnnnnnnnnnnnnnnnnnnnnnnnnnnnnnnnnnnnnnnnnnnnnnnnnnnnnnnnnnnnnnnnnnnnnnnnnnnnnnnnnnnnnnnnnnnnnnnnnnnnnnnnnnnnnnnnnnnnnnnnnnnnnnnnnnnnnnnnnnnnnnnnnnnnnnnnnnnnnnnnnnnnnnnnnnnnnnnnnnnnnnnnnnnnnnnnnnnnnnnnnnnnnnnnnnnnnnnnnnnnnnnnnnnnnnnnnnnnnnnnnnnnnnnnnnnnnnnnnnnnnnnnnnnnnnnnnnnnnnnnnnnnnnnnnnnnnnnnnnnnnnnnnnnnnnnnnnnnnnnnnnnnnnnnnnnnnnnnnnnnnnnnnnnnnnnnnnnnnnnnnnnnnnnnnnnnnnnnnnnnnnnnnnnnnnnnnnnnnnnnnnnnnnnnnnnnnnnnnnnnnnnnnnnnnnnnnnnnnnnnnnnnnnnnnnnnnnnnnnnnnnnnnnnnnnnnnnnnnnnnnnnnnnnnnnnnnnnnnnnnnnnnnnnnnnnnnnnnnnnnnnnnnnnnnnnnnnnnnnnnnnnnnnnnnnnnnnnnnnnnnnnnnnnnnnnnnnnnnnnnnnnnnnnnnnnnnnnnnnnnnnnnnnnnnnnnnnnnnnnnnnnnnnnnnnnnnnnnnnnnnnnnnnnnnnnnnnnnnnnnnnnnnnnnnnnnnnnnnnnnnnnnnnnnnnnnnnnnnnnnnnnnnnnnnnnnnnnnnnnnnnnnnnnnnnnnnnnnnnnnnnnnnnnnnnnnnnnnnnnnnnnnnnnnnnnnnnnnnnnnnnnnnnnnnnnnnnnnnnnnnnnnnnnnnnnnnnnnnnnnnnnnnnnnnnnnnnnnnnnnnnnnnnnnnnnnnnnnnnnnnnnnnnnnnnnnnnnnnnnnnnnnnnnnnnnnnnnnnnnnnnnnnnnnnnnnnnnnnnnnnnnnnnnnnnnnnnnnnnnnnnnnnnnnnnnnnnnnnnnnnnnnnnnnnnnnnnnnnnnnnnnnnnnnnnnnnnnnnnnnnnnnnnnnnnnnnnnnnnnnnnnnnnnnnnnnnnnnnnnnnnnnnnnnnnnnnnnnnnnnnnnnnnnnnnnnnnnnnnnnnnnnnnnnnnnnnnnnnnnnnnnnnnnnnnnnnnnnnnnnnnnnnnnnnnnnnnnnnnnnnnnnnnnnnnnnnnnnnnnnnnnnnnnnnnnnnnnnnnnnnnnnnnnnnnnnnnnnnnnnnnnnnnnnnnnnnnnnnnnnnnnnnnnnnnnnnnnnnnnnnnnnnnnnnnnnnnnnnnnnnnnnnnnnnnnnnnnnnnnnnnnnnnnnnnnnnnnnnnnnnnnnnnnnnnnnnnnnnnnnnnnnnnnnnnnnnnnnnnnnnnnnnnnnnnnnnnnnnnnnnnnnnnnnnnnnnnnnnnnnnnnnnnnnnnnnnnnnnnnnnnnnnnnnnnnnnnnnnnnnnnnnnnnnnnnnnnnnnnnnnnnnnnnnnnnnnnnnnnnnnnnnnnnnnnnnnnnnnnnnnnnnnnnnnnnnnnnnnnnnnnnnnnnnnnnnnnnnnnnnnnnnnnnnnnnnnnnnnnnnnnnnnnnnnnnnnnnnnnnnnnnnnnnnnnnnnnnnnnnnnnnnnnnnnnnnnnnnnnnnnnnnnnnnnnnnnnnnnnnnnnnnnnnnnnnnnnnnnnnnnnnnnnnnnnnnnnnnnnnnnnnnnnnnnnnnnnnnnnnnnnnnnnnnnnnnnnnnnnnnnnnnnnnnnnnnnnnnnnnnnnnnnnnnnnnnnnnnnnnnnnnnnnnnnnnnnnnnnnnnnnnnnnnnnnnnnnnnnnnnnnnnnnnnnnnnnnnnnnnnnnnnnnnnnnnnnnnnnnnnnnnnnnnnnnnnnnnnnnnnnnnnnnnnnnnnnnnnnnnnnnnnnnnnnnnnnnnnnnnnnnnnnnnnnnnnnnnnnnnnnnnnnnnnnnnnnnnnnnnnnnnnnnnnnnnnnnnnnnnnnnnnnnnnnnnnnnnnnnnnnnnnnnnnnnnnnnnnnnnnnnnnnnnnnnnnnnnnnnnnnnnnnnnnnnnnnnnnnnnnnnnnnnnnnnnnnnnnnnnnnnnnnnnnnnnnnnnnnnnnnnnnnnnnnnnnnnnnnnnnnnnnnnnnnnnnnnnnnnnnnnnnnnnnnnnnnnnnnnnnnnnnnnnnnnnnnnnnnnnnnnnnnnnnnnnnnnnnnnnnnnnnnnnnnnnnnnnnnnnnnnnnnnnnnnnnnnnnnnnnnnnnnnnnnnnnnnnnnnnnnnnnnnnnnnnnnnnnnnnnnnnnnnnnnnnnnnnnnnnnnnnnnnnnnnnnnnnnnnnnnnnnnnnnnnnnnnnnnnnnnnnnnnnnnnnnnnnnnnnnnnnnnnnnnnnnnnnnnnnnnnnnnnnnnnnnnnnnnnnnnnnnnnnnnnnnnnnnnnnnnnnnnnnnnnnnnnnnnnnnnnnnnnnnnnnnnnnnnnnnnnnnnnnnnnnnnnnnnnnnnnnnnnnnnnnnnnnnnnnnnnnnnnnnnnnnnnnnnnnnnnnnnnnnnnnnnnnnnnnnnnnnnnnnnnnnnnnnnnnnnnnnnnnnnnnnnnnnnnnnnnnnnnnnnnnnnnnnnnnnnnnnnnnnnnnnnnnnnnnnnnnnnnnnnnnnnnnnnnnnnnnnnnnnnnnnnnnnnnnnnnnnnnnnnnnnnnnnnnnnnnnnnnnnnnnnnnnnnnnnnnnnnnnnnnnnnnnnnnnnnnnnnnnnnnnnnnnnnnnnnnnnnnnnnnnnnnnnnnnnnnnnnnnnnnnnnnnnnnnnnnnnnnnnnnnnnnnnnnnnnnnnnnnnnnnnnnnnnnnnnnnnnnnnnnnnnnnnnnnnnnnnnnnnnnnnnnnnnnnnnnnnnnnnnnnnnnnnnnnnnnnnnnnnnnnnnnnnnnnnnnnnnnnnnnnnnnnnnnnnnnnnnnnnnnnnnnnnnnnnnnnnnnnnnnnnnnnnnnnnnnnnnnnnnnnnnnnnnnnnnnnnnnnnnnnnnnnnnnnnnnnnnnnnnnnnnnnnnnnnnnnnnnnnnnnnnnnnnnnnnnnnnnnnnnnnnnnnnnnnnnnnnnnnnnnnnnnnnnnnnnnnnnnnnnnnnnnnnnnnnnnnnnnnnnnnnnnnnnnnnnnnnnnnnnnnnnnnnnnnnnnnnnnnnnnnnnnnnnnnnnnnnnnnnnnnnnnnnnnnnnnnnnnnnnnnnnnnnnnnnnnnnnnnnnnnnnnnnnnnnnnnnnnnnnnnnnnnnnnnnnnnnnnnnnnnnnnnnnnnnnnnnnnnnnnnnnnnnnnnnnnnnnnnnnnnnnnnnnnnnnnnnnnnnnnnnnnnnnnnnnnnnnnnnnnnnnnnnnnnnnnnnnnnnnnnnnnnnnnnnnnnnnnnnnnnnnnnnnnnnnnnnnnnnnnnnnnnnnnnnnnnnnnnnnnnnnnnnnnnnnnnnnnnnnnnnnnnnnnnnnnnnnnnnnnnnnnnnnnnnnnnnnnnnnnnnnnnnnnnnnnnnnnnnnnnnnnnnnnnnnnnnnnnnnnnnnnnnnnnnnnnnnnnnnnnnnnnnnnnnnnnnnnnnnnnnnnnnnnnnnnnnnnnnnnnnnnnnnnnnnnnnnnnnnnnnnnnnnnnnnnnnnnnnnnnnnnnnnnnnnnnnnnnnnnnnnnnnnnnnnnnnnnnnnnnnnnnnnnnnnnnnnnnnnnnnnnnnnnnnnnnnnnnnnnnnnnnnnnnnnnnnnnnnnnnnnnnnnnnnnnnnnnnnnnnnnnnnnnnnnnnnnnnnnnnnnnnnnnnnnnnnnnnnnnnnnnnnnnnnnnnnnnnnnnnnnnnnnnnnnnnnnnnnnnnnnnnnnnnnnnnnnnnnnnnnnnnnnnnnnnnnnnnnnnnnnnnnnnnnnnnnnnnnnnnnnnnnnnnnnnnnnnnnnnnnnnnnnnnnnnnnnnnnnnnnnnnnnnnnnnnnnnnnnnnnnnnnnnnnnnnnnnnnnnnnnnnnnnnnnnnnnnnnnnnnnnnnnnnnnnnnnnnnnnnnnnnnnnnnnnnnnnnnnnnnnnnnnnnnnnnnnnnnnnnnnnnnnnnnnnnnnnnnnnnnnnnnnnnnnnnnnnnnnnnnnnnnnnnnnnnnnnnnnnnnnnnnnnnnnnnnnnnnnnnnnnnnnnnnnnnnnnnnnnnnnnnnnnnnnnnnnnnnnnnnnnnnnnnnnnnnnnnnnnnnnnnnnnnnnnnnnnnnnnnnnnnnnnnnnnnnnnnnnnnnnnnnnnnnnnnnnnnnnnnnnnnnnnnnnnnnnnnnnnnnnnnnnnnnnnnnnnnnnnnnnnnnnnnnnnnnnnnnnnnnnnnnnnnnnnnnnnnnnnnnnnnnnnnnnnnnnnnnnnnnnnnnnnnnnnnnnnnnnnnnnnnnnnnnnnnnnnnnnnnnnnnnnnnnnnnnnnnnnnnnnnnnnnnnnnnnnnnnnnnnnnnnnnnnnnnnnnnnnnnnnnnnnnnnnnnnnnnnnnnnnnnnnnnnnnnnnnnnnnnnnnnnnnnnnnnnnnnnnnnnnnnnnnnnnnnnnnnnnnnnnnnnnnnnnnnnnnnnnnnnnnnnnnnnnnnnnnnnnnnnnnnnnnnnnnnnnnnnnnnnnnnnnnnnnnnnnnnnnnnnnnnnnnnnnnnnnnnnnnnnnnnnnnnnnnnnnnnnnnnnnnnnnnnnnnnnnnnnnnnnnnnnnnnnnnnnnnnnnnnnnnnnnnnnnnnnnnnnnnnnnnnnnnnnnnnnnnnnnnnnnnnnnnnnnnnnnnnnnnnnnnnnnnnnnnnnnnnnnnnnnnnnnnnnnnnnnnnnnnnnnnnnnnnnnnnnnnnnnnnnnnnnnnnnnnnnnnnnnnnnnnnnnnnnnnnnnnnnnnnnnnnnnnnnnnnnnnnnnnnnnnnnnnnnnnnnnnnnnnnnnnnnnnnnnnnnnnnnnnnnnnnnnnnnnnnnnnnnnnnnnnnnnnnnnnnnnnnnnnnnnnnnnnnnnnnnnnnnnnnnnnnnnnnnnnnnnnnnnnnnnnnnnnnnnnnnnnnnnnnnnnnnnnnnnnnnnnnnnnnnnnnnnnnnnnnnnnnnnnnnnnnnnnnnnnnnnnnnnnnnnnnnnnnnnnnnnnnnnnnnnnnnnnnnnnnnnnnnnnnnnnnnnnnnnnnnnnnnnnnnnnnnnnnnnnnnnnnnnnnnnnnnnnnnnnnnnnnnnnnnnnnnnnnnnnnnnnnnnnnnnnnnnnnnnnnnnnnnnnnnnnnnnnnnnnnnnnnnnnnnnnnnnnnnnnnnnnnnnnnnnnnnnnnnnnnnnnnnnnnnnnnnnnnnnnnnnnnnnnnnnnnnnnnnnnnnnnnnnnnnnnnnnnnnnnnnnnnnnnnnnnnnnnnnnnnnnnnnnnnnnnnnnnnnnnnnnnnnnnnnnnnnnnnnnnnnnnnnnnnnnnnnnnnnnnnnnnnnnnnnnnnnnnnnnnnnnnnnnnnnnnnnnnnnnnnnnnnnnnnnnnnnnnnnnnnnnnnnnnnnnnnnnnnnnnnnnnnnnnnnnnnnnnnnnnnnnnnnnnnnnnnnnnnnnnnnnnnnnnnnnnnnnnnnnnnnnnnnnnnnnnnnnnnnnnnnnnnnnnnnnnnnnnnnnnnnnnnnnnnnnnnnnnnnnnnnnnnnnnnnnnnnnnnnnnnnnnnnnnnnnnnnnnnnnnnnnnnnnnnnnnnnnnnnnnnnnnnnnnnnnnnnnnnnnnnnnnnnnnnnnnnnnnnnnnnnnnnnnnnnnnnnnnnnnnnnnnnnnnnnnnnnnnnnnnnnnnnnnnnnnnnnnnnnnnnnnnnnnnnnnnnnnnnnnnnnnnnnnnnnnnnnnnnnnnnnnnnnnnnnnnnnnnnnnnnnnnnnnnnnnnnnnnnnnnnnnnnnnnnnnnnnnnnnnnnnnnnnnnnnnnnnnnnnnnnnnnnnnnnnnnnnnnnnnnnnnnnnnnnnnnnnnnnnnnnnnnnnnnnnnnnnnnnnnnnnnnnnnnnnnnnnnnnnnnnnnnnnnnnnnnnnnnnnnnnnnnnnnnnnnnnnnnnnnnnnnnnnnnnnnnnnnnnnnnnnnnnnnnnnnnnnnnnnnnnnnnnnnnnnnnnnnnnnnnnnnnnnnnnnnnnnnnnnnnnnnnnnnnnnnnnnnnnnnnnnnnnnnnnnnnnnnnnnnnnnnnnnnnnnnnnnnnnnnnnnnnnnnnnnnnnnnnnnnnnnnnnnnnnnnnnnnnnnnnnnnnnnnnnnnnnnnnnnnnnnnnnnnnnnnnnnnnnnnnnnnnnnnnnnnnnnnnnnnnnnnnnnnnnnnnnnnnnnnnnnnnnnnnnnnnnnnnnnnnnnnnnnnnnnnnnnnnnnnnnnnnnnnnnnnnnnnnnnnnnnnnnnnnnnnnnnnnnnnnnnnnnnnnnnnnnnnnnnnnnnnnnnnnnnnnnnnnnnnnnnnnnnnnnnnnnnnnnnnnnnnnnnnnnnnnnnnnnnnnnnnnnnnnnnnnnnnnnnnnnnnnnnnnnnnnnnnnnnnnnnnnnnnnnnnnnnnnnnnnnnnnnnnnnnnnnnnnnnnnnnnnnnnnnnnnnnnnnnnnnnnnnnnnnnnnnnnnnnnnnnnnnnnnnnnnnnnnnnnnnnnnnnnnnnnnnnnnnnnnnnnnnnnnnnnnnnnnnnnnnnnnnnnnnnnnnnnnnnnnnnnnnnnnnnnnnnnnnnnnnnnnnnnnnnnnnnnnnnnnnnnnnnnnnnnnnnnnnnnnnnnnnnnnnnnnnnnnnnnnnnnnnnnnnnnnnnnnnnnnnnnnnnnnnnnnnnnnnnnnnnnnnnnnnnnnnnnnnnnnnnnnnnnnnnnnnnnnnnnnnnnnnnnnnnnnnnnnnnnnnnnnnnnnnnnnnnnnnnnnnnnnnnnnnnnnnnnnnnnnnnnnnnnnnnnnnnnnnnnnnnnnnnnnnnnnnnnnnnnnnnnnnnnnnnnnnnnnnnnnnnnnnnnnnnnnnnnnnnnnnnnnnnnnnnnnnnnnnnnnnnnnnnnnnnnnnnnnnnnnnnnnnnnnnnnnnnnnnnnnnnnnnnnnnnnnnnnnnnnnnnnnnnnnnnnnnnnnnnnnnnnnnnnnnnnnnnnnnnnnnnnnnnnnnnnnnnnnnnnnnnnnnnnnnnnnnnnnnnnnnnnnnnnnnnnnnnnnnnnnnnnnnnnnnnnnnnnnnnnnnnnnnnnnnnnnnnnnnnnnnnnnnnnnnnnnnnnnnnnnnnnnnnnnnnnnnnnnnnnnnnnnnnnnnnnnnnnnnnnnnnnnnnnnnnnnnnnnnnnnnnnnnnnnnnnnnnnnnnnnnnnnnnnnnnnnnnnnnnnnnnnnnnnnnnnnnnnnnnnnnnnnnnnnnnnnnnnnnnnnnnnnnnnnnnnnnnnnnnnnnnnnnnnnnnnnnnnnnnnnnnnnnnnnnnnnnnnnnnnnnnnnnnnnnnnnnnnnnnnnnnnnnnnnnnnnnnnnnnnnnnnnnnnnnnnnnnnnnnnnnnnnnnnnnnnnnnnnnnnnnnnnnnnnnnnnnnnnnnnnnnnnnnnnnnnnnnnnnnnnnnnnnnnnnnnnnnnnnnnnnnnnnnnnnnnnnnnnnnnnnnnnnnnnnnnnnnnnnnnnnnnnnnnnnnnnnnnnnnnnnnnnnnnnnnnnnnnnnnnnnnnnnnnnnnnnnnnnnnnnnnnnnnnnnnnnnnnnnnnnnnnnnnnnnnnnnnnnnnnnnnnnnnnnnnnnnnnnnnnnnnnnnnnnnnnnnnnnnnnnnnnnnnnnnnnnnnnnnnnnnnnnnnnnnnnnnnnnnnnnnnnnnnnnnnnnnnnnnnnnnnnnnnnnnnnnnnnnnnnnnnnnnnnnnnnnnnnnnnnnnnnnnnnnnnnnnnnnnnnnnnnnnnnnnnnnnnnnnnnnnnnnnnnnnnnnnnnnnnnnnnnnnnnnnnnnnnnnnnnnnnnnnnnnnnnnnnnnnnnnnnnnnnnnnnnnnnnnnnnnnnnnnnnnnnnnnnnnnnnnnnnnnnnnnnnnnnnnnnnnnnnnnnnnnnnnnnnnnnnnnnnnnnnnnnnnnnnnnnnnnnnnnnnnnnnnnnnnnnnnnnnnnnnnnnnnnnnnnnnnnnnnnnnnnnnnnnnnnnnnnnnnnnnnnnnnnnnnnnnnnnnnnnnnnnnnnnnnnnnnnnnnnnnnnnnnnnnnnnnnnnnnnnnnnnnnnnnnnnnnnnnnnnnnnnnnnnnnnnnnnnnnnnnnnnnnnnnnnnnnnnnnnnnnnnnnnnnnnnnnnnnnnnnnnnnnnnnnnnnnnnnnnnnnnnnnnnnnnnnnnnnnnnnnnnnnnnnnnnnnnnnnnnnnnnnnnnnnnnnnnnnnnnnnnnnnnnnnnnnnnnnnnnnnnnnnnnnnnnnnnnnnnnnnnnnnnnnnnnnnnnnnnnnnnnnnnnnnnnnnnnnnnnnnnnnnnnnnnnnnnnnnnnnnnnnnnnnnnnnnnnnnnnnnnnnnnnnnnnnnnnnnnnnnnnnnnnnnnnnnnnnnnnnnnnnnnnnnnnnnnnnnnnnnnnnnnnnnnnnnnnnnnnnnnnnnnnnnnnnnnnnnnnnnnnnnnnnnnnnnnnnnnnnnnnnnnnnnnnnnnnnnnnnnnnnnnnnnnnnnnnnnnnnnnnnnnnnnnnnnnnnnnnnnnnnnnnnnnnnnnnnnnnnnnnnnnnnnnnnnnnnnnnnnnnnnnnnnnnnnnnnnnnnnnnnnnnnnnnnnnnnnnnnnnnnnnnnnnnnnnnnnnnnnnnnnnnnnnnnnnnnnnnnnnnnnnnnnnnnnnnnnnnnnnnnnnnnnnnnnnnnnnnnnnnnnnnnnnnnnnnnnnnnnnnnnnnnnnnnnnnnnnnnnnnnnnnnnnnnnnnnnnnnnnnnnnnnnnnnnnnnnnnnnnnnnnnnnnnnnnnnnnnnnnnnnnnnnnnnnnnnnnnnnnnnnnnnnnnnnnnnnnnnnnnnnnnnnnnnnnnnnnnnnnnnnnnnnnnnnnnnnnnnnnnnnnnnnnnnnnnnnnnnnnnnnnnnnnnnnnnnnnnnnnnnnnnnnnnnnnnnnnnnnnnnnnnnnnnnnnnnnnnnnnnnnnnnnnnnnnnnnnnnnnnnnnnnnnnnnnnnnnnnnnnnnnnnnnnnnnnnnnnnnnnnnnnnnnnnnnnnnnnnnnnnnnnnnnnnnnnnnnnnnnnnnnnnnnnnnnnnnnnnnnnnnnnnnnnnnnnnnnnnnnnnnnnnnnnnnnnnnnnnnnnnnnnnnnnnnnnnnnnnnnnnnnnnnnnnnnnnnnnnnnnnnnnnnnnnnnnnnnnnnnnnnnnnnnnnnnnnnnnnnnnnnnnnnnnnnnnnnnnnnnnnnnnnnnnnnnnnnnnnnnnnnnnnnnnnnnnnnnnnnnnnnnnnnnnnnnnnnnnnnnnnnnnnnnnnnnnnnnnnnnnnnnnnnnnnnnnnnnnnnnnnnnnnnnnnnnnnnnnnnnnnnnnnnnnnnnnnnnnnnnnnnnnnnnnnnnnnnnnnnnnnnnnnnnnnnnnnnnnnnnnnnnnnnnnnnnnnnnnnnnnnnnnnnnnnnnnnnnnnnnnnnnnnnnnnnnnnnnnnnnnnnnnnnnnnnnnnnnnnnnnnnnnnnnnnnnnnnnnnnnnnnnnnnnnnnnnnnnnnnnnnnnnnnnnnnnnnnnnnnnnnnnnnnnnnnnnnnnnnnnnnnnnnnnnnnnnnnnnnnnnnnnnnnnnnnnnnnnnnnnnnnnnnnnnnnnnnnnnnnnnnnnnnnnnnnnnnnnnnnnnnnnnnnnnnnnnnnnnnnnnnnnnnnnnnnnnnnnnnnnnnnnnnnnnnnnnnnnnnnnnnnnnnnnnnnnnnnnnnnnnnnnnnnnnnnnnnnnnnnnnnnnnnnnnnnnnnnnnnnnnnnnnnnnnnnnnnnnnnnnnnnnnnnnnnnnnnnnnnnnnnnnnnnnnnnnnnnnnnnnnnnnnnnnnnnnnnnnnnnnnnnnnnnnnnnnnnnnnnnnnnnnnnnnnnnnnnnnnnnnnnnnnnnnnnnnnnnnnnnnnnnnnnnnnnnnnnnnnnnnnnnnnnnnnnnnnnnnnnnnnnnnnnnnnnnnnnnnnnnnnnnnnnnnnnnnnnnnnnnnnnnnnnnnnnnnnnnnnnnnnnnnnnnnnnnnnnnnnnnnnnnnnnnnnnnnnnnnnnnnnnnnnnnnnnnnnnnnnnnnnnnnnnnnnnnnnnnnnnnnnnnnnnnnnnnnnnnnnnnnnnnnnnnnnnnnnnnnnnnnnnnnnnnnnnnnnnnnnnnnnnnnnnnnnnnnnnnnnnnnnnnnnnnnnnnnnnnnnnnnnnnnnnnnnnnnnnnnnnnnnnnnnnnnnnnnnnnnnnnnnnnnnnnnnnnnnnnnnnnnnnnnnnnnnnnnnnnnnnnnnnnnnnnnnnnnnnnnnnnnnnnnnnnnnnnnnnnnnnnnnnnnnnnnnnnnnnnnnnnnnnnnnnnnnnnnnnnnnnnnnnnnnnnnnnnnnnnnnnnnnnnnnnnnnnnnnnnnnnnnnnnnnnnnnnnnnnnnnnnnnnnnnnnnnnnnnnnnnnnnnnnnnnnnnnnnnnnnnnnnnnnnnnnnnnnnnnnnnnnnnnnnnnnnnnnnnnnnnnnnnnnnnnnnnnnnnnnnnnnnnnnnnnnnnnnnnnnnnnnnnnnnnnnnnnnnnnnnnnnnnnnnnnnnnnnnnnnnnnnnnnnnnnnnnnnnnnnnnnnnnnnnnnnnnnnnnnnnnnnnnnnnnnnnnnnnnnnnnnnnnnnnnnnnnnnnnnnnnnnnnnnnnnnnnnnnnnnnnnnnnnnnnnnnnnnnnnnnnnnnnnnnnnnnnnnnnnnnnnnnnnnnnnnnnnnnnnnnnnnnnnnnnnnnnnnnnnnnnnnnnnnnnnnnnnnnnnnnnnnnnnnnnnnnnnnnnnnnnnnnnnnnnnnnnnnnnnnnnnnnnnnnnnnnnnnnnnnnnnnnnnnnnnnnnnnnnnnnnnnnnnnnnnnnnnnnnnnnnnnnnnnnnnnnnnnnnnnnnnnnnnnnnnnnnnnnnnnnnnnnnnnnnnnnnnnnnnnnnnnnnnnnnnnnnnnnnnnnnnnnnnnnnnnnnnnnnnnnnnnnnnnnnnnnnnnnnnnnnnnnnnnnnnnnnnnnnnnnnnnnnnnnnnnnnnnnnnnnnnnnnnnnnnnnnnnnnnnnnnnnnnnnnnnnnnnnnnnnnnnnnnnnnnnnnnnnnnnnnnnnnnnnnnnnnnnnnnnnnnnnnnnnnnnnnnnnnnnnnnnnnnnnnnnnnnnnnnnnnnnnnnnnnnnnnnnnnnnnnnnnnnnnnnnnnnnnnnnnnnnnnnnnnnnnnnnnnnnnnnnnnnnnnnnnnnnnnnnnnnnnnnnnnnnnnnnnnnnnnnnnnnnnnnnnnnnnnnnnnnnnnnnnnnnnnnnnnnnnnnnnnnnnnnnnnnnnnnnnnnnnnnnnnnnnnnnnnnnnnnnnnnnnnnnnnnnnnnnnnnnnnnnnnnnnnnnnnnnnnnnnnnnnnnnnnnnnnnnnnnnnnnnnnnnnnnnnnnnnnnnnnnnnnnnnnnnnnnnnnnnnnnnnnnnnnnnnnnnnnnnnnnnnnnnnnnnnnnnnnnnnnnnnnnnnnnnnnnnnnnnnnnnnnnnnnnnnnnnnnnnnnnnnnnnnnnnnnnnnnnnnnnnnnnnnnnnnnnnnnnnnnnnnnnnnnnnnnnnnnnnnnnnnnnnnnnnnnnnnnnnnnnnnnnnnnnnnnnnnnnnnnnnnnnnnnnnnnnnnnnnnnnnnnnnnnnnnnnnnnnnnnnnnnnnnnnnnnnnnnnnnnnnnnnnnnnnnnnnnnnnnnnnnnnnnnnnnnnnnnnnnnnnnnnnnnnnnnnnnnnnnnnnnnnnnnnnnnnnnnnnnnnnnnnnnnnnnnnnnnnnnnnnnnnnnnnnnnnnnnnnnnnnnnnnnnnnnnnnnnnnnnnnnnnnnnnnnnnnnnnnnnnnnnnnnnnnnnnnnnnnnnnnnnnnnnnnnnnnnnnnnnnnnnnnnnnnnnnnnnnnnnnnnnnnnnnnnnnnnnnnnnnnnnnnnnnnnnnnnnnnnnnnnnnnnnnnnnnnnnnnnnnnnnnnnnnnnnnnnnnnnnnnnnnnnnnnnnnnnnnnnnnnnnnnnnnnnnnnnnnnnnnnnnnnnnnnnnnnnnnnnnnnnnnnnnnnnnnnnnnnnnnnnnnnnnnnnnnnnnnnnnnnnnnnnnnnnnnnnnnnnnnnnnnnnnnnnnnnnnnnnnnnnnnnnnnnnnnnnnnnnnnnnnnnnnnnnnnnnnnnnnnnnnnnnnnnnnnnnnnnnnnnnnnnnnnnnnnnnnnnnnnnnnnnnnnnnnnnnnnnnnnnnnnnnnnnnnnnnnnnnnnnnnnnnnnnnnnnnnnnnnnnnnnnnnnnnnnnnnnnnnnnnnnnnnnnnnnnnnnnnnnnnnnnnnnnnnnnnnnnnnnnnnnnnnnnnnnnnnnnnnnnnnnnnnnnnnnnnnnnnnnnnnnnnnnnnnnnnnnnnnnnnnnnnnnnnnnnnnnnnnnnnnnnnnnnnnnnnnnnnnnnnnnnnnnnnnnnnnnnnnnnnnnnnnnnnnnnnnnnnnnnnnnnnnnnnnnnnnnnnnnnnnnnnnnnnnnnnnnnnnnnnnnnnnnnnnnnnnnnnnnnnnnnnnnnnnnnnnnnnnnnnnnnnnnnnnnnnnnnnnnnnnnnnnnnnnnnnnnnnnnnnnnnnnnnnnnnnnnnnnnnnnnnnnnnnnnnnnnnnnnnnnnnnnnnnnnnnnnnnnnnnnnnnnnnnnnnnnnnnnnnnnnnnnnnnnnnnnnnnnnnnnnnnnnnnnnnnnnnnnnnnnnnnnnnnnnnnnnnnnnnnnnnnnnnnnnnnnnnnnnnnnnnnnnnnnnnnnnnnnnnnnnnnnnnnnnnnnnnnnnnnnnnnnnnnnnnnnnnnnnnnnnnnnnnnnnnnnnnnnnnnnnnnnnnnnnnnnnnnnnnnnnnnnnnnnnnnnnnnnnnnnnnnnnnnnnnnnnnnnnnnnnnnnnnnnnnnnnnnnnnnnnnnnnnnnnnnnnnnnnnnnnnnnnnnnnnnnnnnnnnnnnnnnnnnnnnnnnnnnnnnnnnnnnnnnnnnnnnnnnnnnnnnnnnnnnnnnnnnnnnnnnnnnnnnnnnnnnnnnnnnnnnnnnnnnnnnnnnnnnnnnnnnnnnnnnnnnnnnnnnnnnnnnnnnnnnnnnnnnnnnnnnnnnnnnnnnnnnnnnnnnnnnnnnnnnnnnnnnnnnnnnnnnnnnnnnnnnnnnnnnnnnnnnnnnnnnnnnnnnnnnnnnnnnnnnnnnnnnnnnnnnnnnnnnnnnnnnnnnnnnnnnnnnnnnnnnnnnnnnnnnnnnnnnnnnnnnnnnnnnnnnnnnnnnnnnnnnnnnnnnnnnnnnnnnnnnnnnnnnnnnnnnnnnnnnnnnnnnnnnnnnnnnnnnnnnnnnnnnnnnnnnnnnnnnnnnnnnnnnnnnnnnnnnnnnnnnnnnnnnnnnnnnnnnnnnnnnnnnnnnnnnnnnnnnnnnnnnnnnnnnnnnnnnnnnnnnnnnnnnnnnnnnnnnnnnnnnnnnnnnnnnnnnnnnnnnnnnnnnnnnnnnnnnnnnnnnnnnnnnnnnnnnnnnnnnnnnnnnnnnnnnnnnnnnnnnnnnnnnnnnnnnnnnnnnnnnnnnnnnnnnnnnnnnnnnnnnnnnnnnnnnnnnnnnnnnnnnnnnnnnnnnnnnnnnnnnnnnnnnnnnnnnnnnnnnnnnnnnnnnnnnnnnnnnnnnnnnnnnnnnnnnnnnnnnnnnnnnnnnnnnnnnnnnnnnnnnnnnnnnnnnnnnnnnnnnnnnnnnnnnnnnnnnnnnnnnnnnnnnnnnnnnnnnnnnnnnnnnnnnnnnnnnnnnnnnnnnnnnnnnnnnnnnnnnnnnnnnnnnnnnnnnnnnnnnnnnnnnnnnnnnnnnnnnnnnnnnnnnnnnnnnnnnnnnnnnnnnnnnnnnnnnnnnnnnnnnnnnnnnnnnnnnnnnnnnnnnnnnnnnnnnnnnnnnnnnnnnnnnnnnnnnnnnnnnnnnnnnnnnnnnnnnnnnnnnnnnnnnnnnnnnnnnnnnnnnnnnnnnnnnnnnnnnnnnnnnnnnnnnnnnnnnnnnnnnnnnnnnnnnnnnnnnnnnnnnnnnnnnnnnnnnnnnnnnnnnnnnnnnnnnnnnnnnnnnnnnnnnnnnnnnnnnnnnnnnnnnnnnnnnnnnnnnnnnnnnnnnnnnnnnnnnnnnnnnnnnnnnnnnnnnnnnnnnnnnnnnnnnnnnnnnnnnnnnnnnnnnnnnnnnnnnnnnnnnnnnnnnnnnnnnnnnnnnnnnnnnnnnnnnnnnnnnnnnnnnnnnnnnnnnnnnnnnnnnnnnnnnnnnnnnnnnnnnnnnnnnnnnnnnnnnnnnnnnnnnnnnnnnnnnnnnnnnnnnnnnnnnnnnnnnnnnnnnnnnnnnnnnnnnnnnnnnnnnnnnnnnnnnnnnnnnnnnnnnnnnnnnnnnnnnnnnnnnnnnnnnnnnnnnnnnnnnnnnnnnnnnnnnnnnnnnnnnnnnnnnnnnnnnnnnnnnnnnnnnnnnnnnnnnnnnnnnnnnnnnnnnnnnnnnnnnnnnnnnnnnnnnnnnnnnnnnnnnnnnnnnnnnnnnnnnnnnnnnnnnnnnnnnnnnnnnnnnnnnnnnnnnnnnnnnnnnnnnnnnnnnnnnnnnnnnnnnnnnnnnnnnnnnnnnnnnnnnnnnnnnnnnnnnnnnnnnnnnnnnnnnnnnnnnnnnnnnnnnnnnnnnnnnnnnnnnnnnnnnnnnnnnnnnnnnnnnnnnnnnnnnnnnnnnnnnnnnnnnnnnnnnnnnnnnnnnnnnnnnnnnnnnnnnnnnnnnnnnnnnnnnnnnnnnnnnnnnnnnnnnnnnnnnnnnnnnnnnnnnnnnnnnnnnnnnnnnnnnnnnnnnnnnnnnnnnnnnnnnnnnnnnnnnnnnnnnnnnnnnnnnnnnnnnnnnnnnnnnnnnnnnnnnnnnnnnnnnnnnnnnnnnnnnnnnnnnnnnnnnnnnnnnnnnnnnnnnnnnnnnnnnnnnnnnnnnnnnnnnnnnnnnnnnnnnnnnnnnnnnnnnnnnnnnnnnnnnnnnnnnnnnnnnnnnnnnnnnnnnnnnnnnnnnnnnnnnnnnnnnnnnnnnnnnnnnnnnnnnnnnnnnnnnnnnnnnnnnnnnnnnnnnnnnnnnnnnnnnnnnnnnnnnnnnnnnnnnnnnnnnnnnnnnnnnnnnnnnnnnnnnnnnnnnnnnnnnnnnnnnnnnnnnnnnnnnnnnnnnnnnnnnnnnnnnnnnnnnnnnnnnnnnnnnnnnnnnnnnnnnnnnnnnnnnnnnnnnnnnnnnnnnnnnnnnnnnnnnnnnnnnnnnnnnnnnnnnnnnnnnnnnnnnnnnnnnnnnnnnnnnnnnnnnnnnnnnnnnnnnnnnnnnnnnnnnnnnnnnnnnnnnnnnnnnnnnnnnnnnnnnnnnnnnnnnnnnnnnnnnnnnnnnnnnnnnnnnnnnnnnnnnnnnnnnnnnnnnnnnnnnnnnnnnnnnnnnnnnnnnnnnnnnnnnnnnnnnnnnnnnnnnnnnnnnnnnnnnnnnnnnnnnnnnnnnnnnnnnnnnnnnnnnnnnnnnnnnnnnnnnnnnnnnnnnnnnnnnnnnnnnnnnnnnnnnnnnnnnnnnnnnnnnnnnnnnnnnnnnnnnnnnnnnnnnnnnnnnnnnnnnnnnnnnnnnnnnnnnnnnnnnnnnnnnnnnnnnnnnnnnnnnnnnnnnnnnnnnnnnnnnnnnnnnnnnnnnnnnnnnnnnnnnnnnnnnnnnnnnnnnnnnnnnnnnnnnnnnnnnnnnnnnnnnnnnnnnnnnnnnnnnnnnnnnnnnnnnnnnnnnnnnnnnnnnnnnnnnnnnnnnnnnnnnnnnnnnnnnnnnnnnnnnnnnnnnnnnnnnnnnnnnnnnnnnnnnnnnnnnnnnnnnnnnnnnnnnnnnnnnnnnnnnnnnnnnnnnnnnnnnnnnnnnnnnnnnnnnnnnnnnnnnnnnnnnnnnnnnnnnnnnnnnnnnnnnnnnnnnnnnnnnnnnnnnnnnnnnnnnnnnnnnnnnnnnnnnnnnnnnnnnnnnnnnnnnnnnnnnnnnnnnnnnnnnnnnnnnnnnnnnnnnnnnnnnnnnnnnnnnnnnnnnnnnnnnnnnnnnnnnnnnnnnnnnnnnnnnnnnnnnnnnnnnnnnnnnnnnnnnnnnnnnnnnnnnnnnnnnnnnnnnnnnnnnnnnnnnnnnnnnnnnnnnnnnnnnnnnnnnnnnnnnnnnnnnnnnnnnnnnnnnnnnnnnnnnnnnnnnnnnnnnnnnnnnnnnnnnnnnnnnnnnnnnnnnnnnnnnnnnnnnnnnnnnnnnnnnnnnnnnnnnnnnnnnnnnnnnnnnnnnnnnnnnnnnnnnnnnnnnnnnnnnnnnnnnnnnnnnnnnnnnnnnnnnnnnnnnnnnnnnnnnnnnnnnnnnnnnnnnnnnnnnnnnnnnnnnnnnnnnnnnnnnnnnnnnnnnnnnnnnnnnnnnnnnnnnnnnnnnnnnnnnnnnnnnnnnnnnnnnnnnnnnnnnnnnnnnnnnnnnnnnnnnnnnnnnnnnnnnnnnnnnnnnnnnnnnnnnnnnnnnnnnnnnnnnnnnnnnnnnnnnnnnnnnnnnnnnnnnnnnnnnnnnnnnnnnnnnnnnnnnnnnnnnnnnnnnnnnnnnnnnnnnnnnnnnnnnnnnnnnnnnnnnnnnnnnnnnnnnnnnnnnnnnnnnnnnnnnnnnnnnnnnnnnnnnnnnnnnnnnnnnnnnnnnnnnnnnnnnnnnnnnnnnnnnnnnnnnnnnnnnnnnnnnnnnnnnnnnnnnnnnnnnnnnnnnnnnnnnnnnnnnnnnnnnnnnnnnnnnnnnnnnnnnnnnnnnnnnnnnnnnnnnnnnnnnnnnnnnnnnnnnnnnnnnnnnnnnnnnnnnnnnnnnnnnnnnnnnnnnnnnnnnnnnnnnnnnnnnnnnnnnnnnnnnnnnnnnnnnnnnnnnnnnnnnnnnnnnnnnnnnnnnnnnnnnnnnnnnnnnnnnnnnnnnnnnnnnnnnnnnnnnnnnnnnnnnnnnnnnnnnnnnnnnnnnnnnnnnnnnnnnnnnnnnnnnnnnnnnnnnnnnnnnnnnnnnnnnnnnnnnnnnnnnnnnnnnnnnnnnnnnnnnnnnnnnnnnnnnnnnnnnnnnnnnnnnnnnnnnnnnnnnnnnnnnnnnnnnnnnnnnnnnnnnnnnnnnnnnnnnnnnnnnnnnnnnnnnnnnnnnnnnnnnnnnnnnnnnnnnnnnnnnnnnnnnnnnnnnnnnnnnnnnnnnnnnnnnnnnnnnnnnnnnnnnnnnnnnnnnnnnnnnnnnnnnnnnnnnnnnnnnnnnnnnnnnnnnnnnnnnnnnnnnnnnnnnnnnnnnnnnnnnnnnnnnnnnnnnnnnnnnnnnnnnnnnnnnnnnnnnnnnnnnnnnnnnnnnnnnnnnnnnnnnnnnnnnnnnnnnnnnnnnnnnnnnnnnnnnnnnnnnnnnnnnnnnnnnnnnnnnnnnnnnnnnnnnnnnnnnnnnnnnnnnnnnnnnnnnnnnnnnnnnnnnnnnnnnnnnnnnnnnnnnnnnnnnnnnnnnnnnnnnnnnnnnnnnnnnnnnnnnnnnnnnnnnnnnnnnnnnnnnnnnnnnnnnnnnnnnnnnnnnnnnnnnnnnnnnnnnnnnnnnnnnnnnnnnnnnnnnnnnnnnnnnnnnnnnnnnnnnnnnnnnnnnnnnnnnnnnnnnnnnnnnnnnnnnnnnnnnnnnnnnnnnnnnnnnnnnnnnnnnnnnnnnnnnnnnnnnnnnnnnnnnnnnnnnnnnnnnnnnnnnnnnnnnnnnnnnnnnnnnnnnnnnnnnnnnnnnnnnnnnnnnnnnnnnnnnnnnnnnnnnnnnnnnnnnnnnnnnnnnnnnnnnnnnnnnnnnnnnnnnnnnnnnnnnnnnnnnnnnnnnnnnnnnnnnnnnnnnnnnnnnnnnnnnnnnnnnnnnnnnnnnnnnnnnnnnnnnnnnnnnnnnnnnnnnnnnnnnnnnnnnnnnnnnnnnnnnnnnnnnnnnnnnnnnnnnnnnnnnnnnnnnnnnnnnnnnnnnnnnnnnnnnnnnnnnnnnnnnnnnnnnnnnnnnnnnnnnnnnnnnnnnnnnnnnnnnnnnnnnnnnnnnnnnnnnnnnnnnnnnnnnnnnnnnnnnnnnnnnnnnnnnnnnnnnnnnnnnnnnnnnnnnnnnnnnnnnnnnnnnnnnnnnnnnnnnnnnnnnnnnnnnnnnnnnnnnnnnnnnnnnnnnnnnnnnnnnnnnnnnnnnnnnnnnnnnnnnnnnnnnnnnnnnnnnnnnnnnnnnnnnnnnnnnnnnnnnnnnnnnnnnnnnnnnnnnnnnnnnnnnnnnnnnnnnnnnnnnnnnnnnnnnnnnnnnnnnnnnnnnnnnnnnnnnnnnnnnnnnnnnnnnnnnnnnnnnnnnnnnnnnnnnnnnnnnnnnnnnnnnnnnnnnnnnnnnnnnnnnnnnnnnnnnnnnnnnnnnnnnnnnnnnnnnnnnnnnnnnnnnnnnnnnnnnnnnnnnnnnnnnnnnnnnnnnnnnnnnnnnnnnnnnnnnnnnnnnnnnnnnnnnnnnnnnnnnnnnnnnnnnnnnnnnnnnnnnnnnnnnnnnnnnnnnnnnnnnnnnnnnnnnnnnnnnnnnnnnnnnnnnnnnnnnnnnnnnnnnnnnnnnnnnnnnnnnnnnnnnnnnnnnnnnnnnnnnnnnnnnnnnnnnnnnnnnnnnnnnnnnnnnnnnnnnnnnnnnnnnnnnnnnnnnnnnnnnnnnnnnnnnnnnnnnnnnnnnnnnnnnnnnnnnnnnnnnnnnnnnnnnnnnnnnnnnnnnnnnnnnnnnnnnnnnnnnnnnnnnnnnnnnnnnnnnnnnnnnnnnnnnnnnnnnnnnnnnnnnnnnnnnnnnnnnnnnnnnnnnnnnnnnnnnnnnnnnnnnnnnnnnnnnnnnnnnnnnnnnnnnnnnnnnnnnnnnnnnnnnnnnnnnnnnnnnnnnnnnnnnnnnnnnnnnnnnnnnnnnnnnnnnnnnnnnnnnnnnnnnnnnnnnnnnnnnnnnnnnnnnnnnnnnnnnnnnnnnnnnnnnnnnnnnnnnnnnnnnnnnnnnnnnnnnnnnnnnnnnnnnnnnnnnnnnnnnnnnnnnnnnnnnnnnnnnnnnnnnnnnnnnnnnnnnnnnnnnnnnnnnnnnnnnnnnnnnnnnnnnnnnnnnnnnnnnnnnnnnnnnnnnnnnnnnnnnnnnnnnnnnnnnnnnnnnnnnnnnnnnnnnnnnnnnnnnnnnnnnnnnnnnnnnnnnnnnnnnnnnnnnnnnnnnnnnnnnnnnnnnnnnnnnnnnnnnnnnnnnnnnnnnnnnnnnnnnnnnnnnnnnnnnnnnnnnnnnnnnnnnnnnnnnnnnnnnnnnnnnnnnnnnnnnnnnnnnnnnnnnnnnnnnnnnnnnnnnnnnnnnnnnnnnnnnnnnnnnnnnnnnnnnnnnnnnnnnnnnnnnnnnnnnnnnnnnnnnnnnnnnnnnnnnnnnnnnnnnnnnnnnnnnnnnnnnnnnnnnnnnnnnnnnnnnnnnnnnnnnnnnnnnnnnnnnnnnnnnnnnnnnnnnnnnnnnnnnnnnnnnnnnnnnnnnnnnnnnnnnnnnnnnnnnnnnnnnnnnnnnnnnnnnnnnnnnnnnnnnnnnnnnnnnnnnnnnnnnnnnnnnnnnnnnnnnnnnnnnnnnnnnnnnnnnnnnnnnnnnnnnnnnnnnnnnnnnnnnnnnnnnnnnnnnnnnnnnnnnnnnnnnnnnnnnnnnnnnnnnnnnnnnnnnnnnnnnnnnnnnnnnnnnnnnnnnnnnnnnnnnnnnnnnnnnnnnnnnnnnnnnnnnnnnnnnnnnnnnnnnnnnnnnnnnnnnnnnnnnnnnnnnnnnnnnnnnnnnnnnnnnnnnnnnnnnnnnnnnnnnnnnnnnnnnnnnnnnnnnnnnnnnnnnnnnnnnnnnnnnnnnnnnnnnnnnnnnnnnnnnnnnnnnnnnnnnnnnnnnnnnnnnnnnnnnnnnnnnnnnnnnnnnnnnnnnnnnnnnnnnnnnnnnnnnnnnnnnnnnnnnnnnnnnnnnnnnnnnnnnnnnnnnnnnnnnnnnnnnnnnnnnnnnnnnnnnnnnnnnnnnnnnnnnnnnnnnnnnnnnnnnnnnnnnnnnnnnnnnnnnnnnnnnnnnnnnnnnnnnnnnnnnnnnnnnnnnnnnnnnnnnnnnnnnnnnnnnnnnnnnnnnnnnnnnnnnnnnnnnnnnnnnnnnnnnnnnnnnnnnnnnnnnnnnnnnnnnnnnnnnnnnnnnnnnnnnnnnnnnnnnnnnnnnnnnnnnnnnnnnnnnnnnnnnnnnnnnnnnnnnnnnnnnnnnnnnnnnnnnnnnnnnnnnnnnnnnnnnnnnnnnnnnnnnnnnnnnnnnnnnnnnnnnnnnnnnnnnnnnnnnnnnnnnnnnnnnnnnnnnnnnnnnnnnnnnnnnnnnnnnnnnnnnnnnnnnnnnnnnnnnnnnnnnnnnnnnnnnnnnnnnnnnnnnnnnnnnnnnnnnnnnnnnnnnnnnnnnnnnnnnnnnnnnnnnnnnnnnnnnnnnnnnnnnnnnnnnnnnnnnnnnnnnnnnnnnnnnnnnnnnnnnnnnnnnnnnnnnnnnnnnnnnnnnnnnnnnnnnnnnnnnnnnnnnnnnnnnnnnnnnnnnnnnnnnnnnnnnnnnnnnnnnnnnnnnnnnnnnnnnnnnnnnnnnnnnnnnnnnnnnnnnnnnnnnnnnnnnnnnnnnnnnnnnnnnnnnnnnnnnnnnnnnnnnnnnnnnnnnnnnnnnnnnnnnnnnnnnnnnnnnnnnnnnnnnnnnnnnnnnnnnnnnnnnnnnnnnnnnnnnnnnnnnnnnnnnnnnnnnnnnnnnnnnnnnnnnnnnnnnnnnnnnnnnnnnnnnnnnnnnnnnnnnnnnnnnnnnnnnnnnnnnnnnnnnnnnnnnnnnnnnnnnnnnnnnnnnnnnnnnnnnnnnnnnnnnnnnnnnnnnnnnnnnnnnnnnnnnnnnnnnnnnnnnnnnnnnnnnnnnnnnnnnnnnnnnnnnnnnnnnnnnnnnnnnnnnnnnnnnnnnnnnnnnnnnnnnnnnnnnnnnnnnnnnnnnnnnnnnnnnnnnnnnnnnnnnnnnnnnnnnnnnnnnnnnnnnnnnnnnnnnnnnnnnnnnnnnnnnnnnnnnnnnnnnnnnnnnnnnnnnnnnnnnnnnnnnnnnnnnnnnnnnnnnnnnnnnnnnnnnnnnnnnnnnnnnnnnnnnnnnnnnnnnnnnnnnnnnnnnnnnnnnnnnnnnnnnnnnnnnnnnnnnnnnnnnnnnnnnnnnnnnnnnnnnnnnnnnnnnnnnnnnnnnnnnnnnnnnnnnnnnnnnnnnnnnnnnnnnnnnnnnnnnnnnnnnnnnnnnnnnnnnnnnnnnnnnnnnnnnnnnnnnnnnnnnnnnnnnnnnnnnnnnnnnnnnnnnnnnnnnnnnnnnnnnnnnnnnnnnnnnnnnnnnnnnnnnnnnnnnnnnnnnnnnnnnnnnnnnnnnnnnnnnnnnnnnnnnnnnnnnnnnnnnnnnnnnnnnnnnnnnnnnnnnnnnnnnnnnnnnnnnnnnnnnnnnnnnnnnnnnnnnnnnnnnnnnnnnnnnnnnnnnnnnnnnnnnnnnnnnnnnnnnnnnnnnnnnnnnnnnnnnnnnnnnnnnnnnnnnnnnnnnnnnnnnnnnnnnnnnnnnnnnnnnnnnnnnnnnnnnnnnnnnnnnnnnnnnnnnnnnnnnnnnnnnnnnnnnnnnnnnnnnnnnnnnnnnnnnnnnnnnnnnnnnnnnnnnnnnnnnnnnnnnnnnnnnnnnnnnnnnnnnnnnnnnnnnnnnnnnnnnnnnnnnnnnnnnnnnnnnnnnnnnnnnnnnnnnnnnnnnnnnnnnnnnnnnnnnnnnnnnnnnnnnnnnnnnnnnnnnnnnnnnnnnnnnnnnnnnnnnnnnnnnnnnnnnnnnnnnnnnnnnnnnnnnnnnnnnnnnnnnnnnnnnnnnnnnnnnnnnnnnnnnnnnnnnnnnnnnnnnnnnnnnnnnnnnnnnnnnnnnnnnnnnnnnnnnnnnnnnnnnnnnnnnnnnnnnnnnnnnnnnnnnnnnnnnnnnnnnnnnnnnnnnnnnnnnnnnnnnnnnnnnnnnnnnnnnnnnnnnnnnnnnnnnnnnnnnnnnnnnnnnnnnnnnnnnnnnnnnnnnnnnnnnnnnnnnnnnnnnnnnnnnnnnnnnnnnnnnnnnnnnnnnnnnnnnnnnnnnnnnnnnnnnnnnnnnnnnnnnnnnnnnnnnnnnnnnnnnnnnnnnnnnnnnnnnnnnnnnnnnnnnnnnnnnnnnnnnnnnnnnnnnnnnnnnnnnnnnnnnnnnnnnnnnnnnnnnnnnnnnnnnnnnnnnnnnnnnnnnnnnnnnnnnnnnnnnnnnnnnnnnnnnnnnnnnnnnnnnnnnnnnnnnnnnnnnnnnnnnnnnnnnnnnnnnnnnnnnnnnnnnnnnnnnnnnnnnnnnnnnnnnnnnnnnnnnnnnnnnnnnnnnnnnnnnnnnnnnnnnnnnnnnnnnnnnnnnnnnnnnnnnnnnnnnnnnnnnnnnnnnnnnnnnnnnnnnnnnnnnnnnnnnnnnnnnnnnnnnnnnnnnnnnnnnnnnnnnnnnnnnnnnnnnnnnnnnnnnnnnnnnnnnnnnnnnnnnnnnnnnnnnnnnnnnnnnnnnnnnnnnnnnnnnnnnnnnnnnnnnnnnnnnnnnnnnnnnnnnnnnnnnnnnnnnnnnnnnnnnnnnnnnnnnnnnnnnnnnnnnnnnnnnnnnnnnnnnnnnnnnnnnnnnnnnnnnnnnnnnnnnnnnnnnnnnnnnnnnnnnnnnnnnnnnnnnnnnnnnnnnnnnnnnnnnnnnnnnnnnnnnnnnnnnnnnnnnnnnnnnnnnnnnnnnnnnnnnnnnnnnnnnnnnnnnnnnnnnnnnnnnnnnnnnnnnnnnnnnnnnnnnnnnnnnnnnnnnnnnnnnnnnnnnnnnnnnnnnnnnnnnnnnnnnnnnnnnnnnnnnnnnnnnnnnnnnnnnnnnnnnnnnnnnnnnnnnnnnnnnnnnnnnnnnnnnnnnnnnnnnnnnnnnnnnnnnnnnnnnnnnnnnnnnnnnnnnnnnnnnnnnnnnnnnnnnnnnnnnnnnnnnnnnnnnnnnnnnnnnnnnnnnnnnnnnnnnnnnnnnnnnnnnnnnnnnnnnnnnnnnnnnnnnnnnnnnnnnnnnnnnnnnnnnnnnnnnnnnnnnnnnnnnnnnnnnnnnnnnnnnnnnnnnnnnnnnnnnnnnnnnnnnnnnnnnnnnnnnnnnnnnnnnnnnnnnnnnnnnnnnnnnnnnnnnnnnnnnnnnnnnnnnnnnnnnnnnnnnnnnnnnnnnnnnnnnnnnnnnnnnnnnnnnnnnnnnnnnnnnnnnnnnnnnnnnnnnnnnnnnnnnnnnnnnnnnnnnnnnnnnnnnnnnnnnnnnnnnnnnnnnnnnnnnnnnnnnnnnnnnnnnnnnnnnnnnnnnnnnnnnnnnnnnnnnnnnnnnnnnnnnnnnnnnnnnnnnnnnnnnnnnnnnnnnnnnnnnnnnnnnnnnnnnnnnnnnnnnnnnnnnnnnnnnnnnnnnnnnnnnnnnnnnnnnnnnnnnnnnnnnnnnnnnnnnnnnnnnnnnnnnnnnnnnnnnnnnnnnnnnnnnnnnnnnnnnnnnnnnnnnnnnnnnnnnnnnnnnnnnnnnnnnnnnnnnnnnnnnnnnnnnnnnnnnnnnnnnnnnnnnnnnnnnnnnnnnnnnnnnnnnnnnnnnnnnnnnnnnnnnnnnnnnnnnnnnnnnnnnnnnnnnnnnnnnnnnnnnnnnnnnnnnnnnnnnnnnnnnnnnnnnnnnnnnnnnnnnnnnnnnnnnnnnnnnnnnnnnnnnnnnnnnnnnnnnnnnnnnnnnnnnnnnnnnnnnnnnnnnnnnnnnnnnnnnnnnnnnnnnnnnnnnnnnnnnnnnnnnnnnnnnnnnnnnnnnnnnnnnnnnnnnnnnnnnnnnnnnnnnnnnnnnnnnnnnnnnnnnnnnnnnnnnnnnnnnnnnnnnnnnnnnnnnnnnnnnnnnnnnnnnnnnnnnnnnnnnnnnnnnnnnnnnnnnnnnnnnnnnnnnnnnnnnnnnnnnnnnnnnnnnnnnnnnnnnnnnnnnnnnnnnnnnnnnnnnnnnnnnnnnnnnnnnnnnnnnnnnnnnnnnnnnnnnnnnnnnnnnnnnnnnnnnnnnnnnnnnnnnnnnnnnnnnnnnnnnnnnnnnnnnnnnnnnnnnnnnnnnnnnnnnnnnnnnnnnnnnnnnnnnnnnnnnnnnnnnnnnnnnnnnnnnnnnnnnnnnnnnnnnnnnnnnnnnnnnnnnnnnnnnnnnnnnnnnnnnnnnnnnnnnnnnnnnnnnnnnnnnnnnnnnnnnnnnnnnnnnnnnnnnnnnnnnnnnnnnnnnnnnnnnnnnnnnnnnnnnnnnnnnnnnnnnnnnnnnnnnnnnnnnnnnnnnnnnnnnnnnnnnnnnnnnnnnnnnnnnnnnnnnnnnnnnnnnnnnnnnnnnnnnnnnnnnnnnnnnnnnnnnnnnnnnnnnnnnnnnnnnnnnnnnnnnnnnnnnnnnnnnnnnnnnnnnnnnnnnnnnnnnnnnnnnnnnnnnnnnnnnnnnnnnnnnnnnnnnnnnnnnnnnnnnnnnnnnnnnnnnnnnnnnnnnnnnnnnnnnnnnnnnnnnnnnnnnnnnnnnnnnnnnnnnnnnnnnnnnnnnnnnnnnnnnnnnnnnnnnnnnnnnnnnnnnnnnnnnnnnnnnnnnnnnnnnnnnnnnnnnnnnnnnnnnnnnnnnnnnnnnnnnnnnnnnnnnnnnnnnnnnnnnnnnnnnnnnnnnnnnnnnnnnnnnnnnnnnnnnnnnnnnnnnnnnnnnnnnnnnnnnnnnnnnnnnnnnnnnnnnnnnnnnnnnnnnnnnnnnnnnnnnnnnnnnnnnnnnnnnnnnnnnnnnnnnnnnnnnnnnnnnnnnnnnnnnnnnnnnnnnnnnnnnnnnnnnnnnnnnnnnnnnnnnnnnnnnnnnnnnnnnnnnnnnnnnnnnnnnnnnnnnnnnnnnnnnnnnnnnnnnnnnnnnnnnnnnnnnnnnnnnnnnnnnnnnnnnnnnnnnnnnnnnnnnnnnnnnnnnnnnnnnnnnnnnnnnnnnnnnnnnnnnnnnnnnnnnnnnnnnnnnnnnnnnnnnnnnnnnnnnnnnnnnnnnnnnnnnnnnnnnnnnnnnnnnnnnnnnnnnnnnnnnnnnnnnnnnnnnnnnnnnnnnnnnnnnnnnnnnnnnnnnnnnnnnnnnnnnnnnnnnnnnnnnnnnnnnnnnnnnnnnnnnnnnnnnnnnnnnnnnnnnnnnnnnnnnnnnnnnnnnnnnnnnnnnnnnnnnnnnnnnnnnnnnnnnnnnnnnnnnnnnnnnnnnnnnnnnnnnnnnnnnnnnnnnnnnnnnnnnnnnnnnnnnnnnnnnnnnnnnnnnnnnnnnnnnnnnnnnnnnnnnnnnnnnnnnnnnnnnnnnnnnnnnnnnnnnnnnnnnnnnnnnnnnnnnnnnnnnnnnnnnnnnnnnnnnnnnnnnnnnnnnnnnnnnnnnnnnnnnnnnnnnnnnnnnnnnnnnnnnnnnnnnnnnnnnnnnnnnnnnnnnnnnnnnnnnnnnnnnnnnnnnnnnnnnnnnnnnnnnnnnnnnnnnnnnnnnnnnnnnnnnnnnnnnnnnnnnnnnnnnnnnnnnnnnnnnnnnnnnnnnnnnnnnnnnnnnnnnnnnnnnnnnnnnnnnnnnnnnnnnnnnnnnnnnnnnnnnnnnnnnnnnnnnnnnnnnnnnnnnnnnnnnnnnnnnnnnnnnnnnnnnnnnnnnnnnnnnnnnnnnnnnnnnnnnnnnnnnnnnnnnnnnnnnnnnnnnnnnnnnnnnnnnnnnnnnnnnnnnnnnnnnnnnnnnnnnnnnnnnnnnnnnnnnnnnnnnnnnnnnnnnnnnnnnnnnnnnnnnnnnnnnnnnnnnnnnnnnnnnnnnnnnnnnnnnnnnnnnnnnnnnnnnnnnnnnnnnnnnnnnnnnnnnnnnnnnnnnnnnnnnnnnnnnnnnnnnnnnnnnnnnnnnnnnnnnnnnnnnnnnnnnnnnnnnnnnnnnnnnnnnnnnnnnnnnnnnnnnnnnnnnnnnnnnnnnnnnnnnnnnnnnnnnnnnnnnnnnnnnnnnnnnnnnnnnnnnnnnnnnnnnnnnnnnnnnnnnnnnnnnnnnnnnnnnnnnnnnnnnnnnnnnnnnnnnnnnnnnnnnnnnnnnnnnnnnnnnnnnnnnnnnnnnnnnnnnnnnnnnnnnnnnnnnnnnnnnnnnnnnnnnnnnnnnnnnnnnnnnnnnnnnnnnnnnnnnnnnnnnnnnnnnnnnnnnnnnnnnnnnnnnnnnnnnnnnnnnnnnnnnnnnnnnnnnnnnnnnnnnnnnnnnnnnnnnnnnnnnnnnnnnnnnnnnnnnnnnnnnnnnnnnnnnnnnnnnnnnnnnnnnnnnnnnnnnnnnnnnnnnnnnnnnnnnnnnnnnnnnnnnnnnnnnnnnnnnnnnnnnnnnnnnnnnnnnnnnnnnnnnnnnnnnnnnnnnnnnnnnnnnnnnnnnnnnnnnnnnnnnnnnnnnnnnnnnnnnnnnnnnnnnnnnnnnnnnnnnnnnnnnnnnnnnnnnnnnnnnnnnnnnnnnnnnnnnnnnnnnnnnnnnnnnnnnnnnnnnnnnnnnnnnnnnnnnnnnnnnnnnnnnnnnnnnnnnnnnnnnnnnnnnnnnnnnnnnnnnnnnnnnnnnnnnnnnnnnnnnnnnnnnnnnnnnnnnnnnnnnnnnnnnnnnnnnnnnnnnnnnnnnnnnnnnnnnnnnnnnnnnnnnnnnnnnnnnnnnnnnnnnnnnnnnnnnnnnnnnnnnnnnnnnnnnnnnnnnnnnnnnnnnnnnnnnnnnnnnnnnnnnnnnnnnnnnnnnnnnnnnnnnnnnnnnnnnnnnnnnnnnnnnnnnnnnnnnnnnnnnnnnnnnnnnnnnnnnnnnnnnnnnnnnnnnnnnnnnnnnnnnnnnnnnnnnnnnnnnnnnnnnnnnnnnnnnnnnnnnnnnnnnnnnnnnnnnnnnnnnnnnnnnnnnnnnnnnnnnnnnnnnnnnnnnnnnnnnnnnnnnnnnnnnnnnnnnnnnnnnnnnnnnnnnnnnnnnnnnnnnnnnnnnnnnnnnnnnnnnnnnnnnnnnnnnnnnnnnnnnnnnnnnnnnnnnnnnnnnnnnnnnnnnnnnnnnnnnnnnnnnnnnnnnnnnnnnnnnnnnnnnnnnnnnnnnnnnnnnnnnnnnnnnnnnnnnnnnnnnnnnnnnnnnnnnnnnnnnnnnnnnnnnnnnnnnnnnnnnnnnnnnnnnnnnnnnnnnnnnnnnnnnnnnnnnnnnnnnnnnnnnnnnnnnnnnnnnnnnnnnnnnnnnnnnnnnnnnnnnnnnnnnnnnnnnnnnnnnnnnnnnnnnnnnnnnnnnnnnnnnnnnnnnnnnnnnnnnnnnnnnnnnnnnnnnnnnnnnnnnnnnnnnnnnnnnnnnnnnnnnnnnnnnnnnnnnnnnnnnnnnnnnnnnnnnnnnnnnnnnnnnnnnnnnnnnnnnnnnnnnnnnnnnnnnnnnnnnnnnnnnnnnnnnnnnnnnnnnnnnnnnnnnnnnnnnnnnnnnnnnnnnnnnnnnnnnnnnnnnnnnnnnnnnnnnnnnnnnnnnnnnnnnnnnnnnnnnnnnnnnnnnnnnnnnnnnnnnnnnnnnnnnnnnnnnnnnnnnnnnnnnnnnnnnnnnnnnnnnnnnnnnnnnnnnnnnnnnnnnnnnnnnnnnnnnnnnnnnnnnnnnnnnnnnnnnnnnnnnnnnnnnnnnnnnnnnnnnnnnnnnnnnnnnnnnnnnnnnnnnnnnnnnnnnnnnnnnnnnnnnnnnnnnnnnnnnnnnnnnnnnnnnnnnnnnnnnnnnnnnnnnnnnnnnnnnnnnnnnnnnnnnnnnnnnnnnnnnnnnnnnnnnnnnnnnnnnnnnnnnnnnnnnnnnnnnnnnnnnnnnnnnnnnnnnnnnnnnnnnnnnnnnnnnnnnnnnnnnnnnnnnnnnnnnnnnnnnnnnnnnnnnnnnnnnnnnnnnnnnnnnnnnnnnnnnnnnnnnnnnnnnnnnnnnnnnnnnnnnnnnnnnnnnnnnnnnnnnnnnnnnnnnnnnnnnnnnnnnnnnnnnnnnnnnnnnnnnnnnnnnnnnnnnnnnnnnnnnnnnnnnnnnnnnnnnnnnnnnnnnnnnnnnnnnnnnnnnnnnnnnnnnnnnnnnnnnnnnnnnnnnnnnnnnnnnnnnnnnnnnnnnnnnnnnnnnnnnnnnnnnnnnnnnnnnnnnnnnnnnnnnnnnnnnnnnnnnnnnnnnnnnnnnnnnnnnnnnnnnnnnnnnnnnnnnnnnnnnnnnnnnnnnnnnnnnnnnnnnnnnnnnnnnnnnnnnnnnnnnnnnnnnnnnnnnnnnnnnnnnnnnnnnnnnnnnnnnnnnnnnnnnnnnnnnnnnnnnnnnnnnnnnnnnnnnnnnnnnnnnnnnnnnnnnnnnnnnnnnnnnnnnnnnnnnnnnnnnnnnnnnnnnnnnnnnnnnnnnnnnnnnnnnnnnnnnnnnnnnnnnnnnnnnnnnnnnnnnnnnnnnnnnnnnnnnnnnnnnnnnnnnnnnnnnnnnnnnnnnnnnnnnnnnnnnnnnnnnnnnnnnnnnnnnnnnnnnnnnnnnnnnnnnnnnnnnnnnnnnnnnnnnnnnnnnnnnnnnnnnnnnnnnnnnnnnnnnnnnnnnnnnnnnnnnnnnnnnnnnnnnnnnnnnnnnnnnnnnnnnnnnnnnnnnnnnnnnnnnnnnnnnnnnnnnnnnnnnnnnnnnnnnnnnnnnnnnnnnnnnnnnnnnnnnnnnnnnnnnnnnnnnnnnnnnnnnnnnnnnnnnnnnnnnnnnnnnnnnnnnnnnnnnnnnnnnnnnnnnnnnnnnnnnnnnnnnnnnnnnnnnnnnnnnnnnnnnnnnnnnnnnnnnnnnnnnnnnnnnnnnnnnnnnnnnnnnnnnnnnnnnnnnnnnnnnnnnnnnnnnnnnnnnnnnnnnnnnnnnnnnnnnnnnnnnnnnnnnnnnnnnnnnnnnnnnnnnnnnnnnnnnnnnnnnnnnnnnnnnnnnnnnnnnnnnnnnnnnnnnnnnnnnnnnnnnnnnnnnnnnnnnnnnnnnnnnnnnnnnnnnnnnnnnnnnnnnnnnnnnnnnnnnnnnnnnnnnnnnnnnnnnnnnnnnnnnnnnnnnnnnnnnnnnnnnnnnnnnnnnnnnnnnnnnnnnnnnnnnnnnnnnnnnnnnnnnnnnnnnnnnnnnnnnnnnnnnnnnnnnnnnnnnnnnnnnnnnnnnnnnnnnnnnnnnnnnnnnnnnnnnnnnnnnnnnnnnnnnnnnnnnnnnnnnnnnnnnnnnnnnnnnnnnnnnnnnnnnnnnnnnnnnnnnnnnnnnnnnnnnnnnnnnnnnnnnnnnnnnnnnnnnnnnnnnnnnnnnnnnnnnnnnnnnnnnnnnnnnnnnnnnnnnnnnnnnnnnnnnnnnnnnnnnnnnnnnnnnnnnnnnnnnnnnnnnnnnnnnnnnnnnnnnnnnnnnnnnnnnnnnnnnnnnnnnnnnnnnnnnnnnnnnnnnnnnnnnnnnnnnnnnnnnnnnnnnnnnnnnnnnnnnnnnnnnnnnnnnnnnnnnnnnnnnnnnnnnnnnnnnnnnnnnnnnnnnnnnnnnnnnnnnnnnnnnnnnnnnnnnnnnnnnnnnnnnnnnnnnnnnnnnnnnnnnnnnnnnnnnnnnnnnnnnnnnnnnnnnnnnnnnnnnnnnnnnnnnnnnnnnnnnnnnnnnnnnnnnnnnnnnnnnnnnnnnnnnnnnnnnnnnnnnnnnnnnnnnnnnnnnnnnnnnnnnnnnnnnnnnnnnnnnnnnnnnnnnnnnnnnnnnnnnnnnnnnnnnnnnnnnnnnnnnnnnnnnnnnnnnnnnnnnnnnnnnnnnnnnnnnnnnnnnnnnnnnnnnnnnnnnnnnnnnnnnnnnnnnnnnnnnnnnnnnnnnnnnnnnnnnnnnnnnnnnnnnnnnnnnnnnnnnnnnnnnnnnnnnnnnnnnnnnnnnnnnnnnnnnnnnnnnnnnnnnnnnnnnnnnnnnnnnnnnnnnnnnnnnnnnnnnnnnnnnnnnnnnnnnnnnnnnnnnnnnnnnnnnnnnnnnnnnnnnnnnnnnnnnnnnnnnnnnnnnnnnnnnnnnnnnnnnnnnnnnnnnnnnnnnnnnnnnnnnnnnnnnnnnnnnnnnnnnnnnnnnnnnnnnnnnnnnnnnnnnnnnnnnnnnnnnnnnnnnnnnnnnnnnnnnnnnnnnnnnnnnnnnnnnnnnnnnnnnnnnnnnnnnnnnnnnnnnnnnnnnnnnnnnnnnnnnnnnnnnnnnnnnnnnnnnnnnnnnnnnnnnnnnnnnnnnnnnnnnnnnnnnnnnnnnnnnnnnnnnnnnnnnnnnnnnnnnnnnnnnnnnnnnnnnnnnnnnnnnnnnnnnnnnnnnnnnnnnnnnnnnnnnnnnnnnnnnnnnnnnnnnnnnnnnnnnnnnnnnnnnnnnnnnnnnnnnnnnnnnnnnnnnnnnnnnnnnnnnnnnnnnnnnnnnnnnnnnnnnnnnnnnnnnnnnnnnnnnnnnnnnnnnnnnnnnnnnnnnnnnnnnnnnnnnnnnnnnnnnnnnnnnnnnnnnnnnnnnnnnnnnnnnnnnnnnnnnnnnnnnnnnnnnnnnnnnnnnnnnnnnnnnnnnnnnnnnnnnnnnnnnnnnnnnnnnnnnnnnnnnnnnnnnnnnnnnnnnnnnnnnnnnnnnnnnnnnnnnnnnnnnnnnnnnnnnnnnnnnnnnnnnnnnnnnnnnnnnnnnnnnnnnnnnnnnnnnnnnnnnnnnnnnnnnnnnnnnnnnnnnnnnnnnnnnnnnnnnnnnnnnnnnnnnnnnnnnnnnnnnnnnnnnnnnnnnnnnnnnnnnnnnnnnnnnnnnnnnnnnnnnnnnnnnnnnnnnnnnnnnnnnnnnnnnnnnnnnnnnnnnnnnnnnnnnnnnnnnnnnnnnnnnnnnnnnnnnnnnnnnnnnnnnnnnnnnnnnnnnnnnnnnnnnnnnnnnnnnnnnnnnnnnnnnnnnnnnnnnnnnnnnnnnnnnnnnnnnnnnnnnnnnnnnnnnnnnnnnnnnnnnnnnnnnnnnnnnnnnnnnnnnnnnnnnnnnnnnnnnnnnnnnnnnnnnnnnnnnnnnnnnnnnnnnnnnnnnnnnnnnnnnnnnnnnnnnnnnnnnnnnnnnnnnnnnnnnnnnnnnnnnnnnnnnnnnnnnnnnnnnnnnnnnnnnnnnnnnnnnnnnnnnnnnnnnnnnnnnnnnnnnnnnnnnnnnnnnnnnnnnnnnnnnnnnnnnnnnnnnnnnnnnnnnnnnnnnnnnnnnnnnnnnnnnnnnnnnnnnnnnnnnnnnnnnnnnnnnnnnnnnnnnnnnnnnnnnnnnnnnnnnnnnnnnnnnnnnnnnnnnnnnnnnnnnnnnnnnnnnnnnnnnnnnnnnnnnnnnnnnnnnnnnnnnnnnnnnnnnnnnnnnnnnnnnnnnnnnnnnnnnnnnnnnnnnnnnnnnnnnnnnnnnnnnnnnnnnnnnnnnnnnnnnnnnnnnnnnnnnnnnnnnnnnnnnnnnnnnnnnnnnnnnnnnnnnnnnnnnnnnnnnnnnnnnnnnnnnnnnnnnnnnnnnnnnnnnnnnnnnnnnnnnnnnnnnnnnnnnnnnnnnnnnnnnnnnnnnnnnnnnnnnnnnnnnnnnnnnnnnnnnnnnnnnnnnnnnnnnnnnnnnnnnnnnnnnnnnnnnnnnnnnnnnnnnnnnnnnnnnnnnnnnnnnnnnnnnnnnnnnnnnnnnnnnnnnnnnnnnnnnnnnnnnnnnnnnnnnnnnnnnnnnnnnnnnnnnnnnnnnnnnnnnnnnnnnnnnnnnnnnnnnnnnnnnnnnnnnnnnnnnnnnnnnnnnnnnnnnnnnnnnnnnnnnnnnnnnnnnnnnnnnnnnnnnnnnnnnnnnnnnnnnnnnnnnnnnnnnnnnnnnnnnnnnnnnnnnnnnnnnnnnnnnnnnnnnnnnnnnnnnnnnnnnnnnnnnnnnnnnnnnnnnnnnnnnnnnnnnnnnnnnnnnnnnnnnnnnnnnnnnnnnnnnnnnnnnnnnnnnnnnnnnnnnnnnnnnnnnnnnnnnnnnnnnnnnnnnnnnnnnnnnnnnnnnnnnnnnnnnnnnnnnnnnnnnnnnnnnnnnnnnnnnnnnnnnnnnnnnnnnnnnnnnnnnnnnnnnnnnnnnnnnnnnnnnnnnnnnnnnnnnnnnnnnnnnnnnnnnnnnnnnnnnnnnnnnnnnnnnnnnnnnnnnnnnnnnnnnnnnnnnnnnnnnnnnnnnnnnnnnnnnnnnnnnnnnnnnnnnnnnnnnnnnnnnnnnnnnnnnnnnnnnnnnnnnnnnnnnnnnnnnnnnnnnnnnnnnnnnnnnnnnnnnnnnnnnnnnnnnnnnnnnnnnnnnnnnnnnnnnnnnnnnnnnnnnnnnnnnnnnnnnnnnnnnnnnnnnnnnnnnnnnnnnnnnnnnnnnnnnnnnnnnnnnnnnnnnnnnnnnnnnnnnnnnnnnnnnnnnnnnnnnnnnnnnnnnnnnnnnnnnnnnnnnnnnnnnnnnnnnnnnnnnnnnnnnnnnnnnnnnnnnnnnnnnnnnnnnnnnnnnnnnnnnnnnnnnnnnnnnnnnnnnnnnnnnnnnnnnnnnnnnnnnnnnnnnnnnnnnnnnnnnnnnnnnnnnnnnnnnnnnnnnnnnnnnnnnnnnnnnnnnnnnnnnnnnnnnnnnnnnnnnnnnnnnnnnnnnnnnnnnnnnnnnnnnnnnnnnnnnnnnnnnnnnnnnnnnnnnnnnnnnnnnnnnnnnnnnnnnnnnnnnnnnnnnnnnnnnnnnnnnnnnnnnnnnnnnnnnnnnnnatctgccacaataactgcggattcctttcccaaagcctttttcgcccacggacaggccgtttgccccttcccactaacatcccgtaaacctccccttaaattcccgcccggccaatgggaactcagcgggaagtattttagatgtgtatgggatggggcaaatggggcttctattgatagtgggtatcaaaatgggaggaagtccacaaattgcgcgaattcatacgaattgcttttccagttacgctaccaactgtggtagataacctaaaataaaggacttacttcccaatcgggcaagtaatccatatgtttggagcccgaaggtcccagaacgattggccgacggggacatcgaccttcctgacgctggcgtcgagcgaggcacgagcatggacgccagcaacatctcctgtagtccatactcgcaagctcgctgcactccaggctcaccaacgttggaaggcaaattcacaaattcacaaccggtaaatatggcttgtgaatttgcaacctgctgatagacgggtaattatgaggctaattcacaaaaaaggggtctcttatacatccgcggaagccgattgtaaacaggatatgatgtatccacgctaccagtctataatacatatagaaatagtatatataatatataatagtattatatattattatatattgatattatatcatctctaccttcccttcatctcttgtttgcggcatgagccactgcaaaccggcattctcccctggtccggctggatataagagataagcgtattttgtgaatttgtcccccaactcactgtgccacaataacacacggattcacaagccatatttaccggttgtgaatttgtgaatctgaccttgccggccttaaggaagtttgaaattagagccctattttggacttgacaaattattccttggtaaatttggtgtataatagctatggggcataatgatgttagcctgtggaacggcctctgtaaaggatcaacaagctatcaaccctccccatgcgacaggagcttcaatgtattataatttgacagacaaaccctggatcagtgtgctacagcttgacgggcattctgccaggctcggcctggctgaggtcctgcgaaaagcacacacactgcgtttggcttacggcaatccgatggaccgcatgtccgttttccgtttcctcctcgccctgggctattggtgttttgccaatacaaaacaagcgccggtatcagataagccactgcctcaggcatggacggactggcttgaacaaaaccaagaatatttcgaattgttcggtgatggccccagattctaccaatccccaggaacatccagaatacgccccagcacggaccttatccacgagcttcccacggcaaacaatttctggcacttccgccatgtgaccgatttcatcgatggcatttgcccagcttgctgcgttaccggtctgctgcgcctgccactctttaccaccgtaggcggcagcggaatcggagccggcatcaacagaactcctcccttctatgccatctggcagggtgatagtctgtcggaatcgatattcctgaattgggaacccacttcccggttgggtgttcctgcctggctgaacccgtttggatcccaaaacgagaaggatgtagccttgctgactggcctcacctggctgccccgcaaggtattcctgcttggcccggtgtcagacggagcaaaatgcagcgcctgcggagaagagcatgagcctctggtctatgcctgcaacaatgaggcggtgaaagtgcctccgaaccttgtctggaacgaccctcacgcgatttaccgggatgacaataatggcctgactgcccaggtggctctgatgtccggggacaaatacactttcgctaacagggattggcataaacccctggtcggcttcttacgggcgaaaggcatgtctcggaccgccacgctgtttttagtgggcttcacaagcgttcaagccaaatgtgtggacgtttgggaaaagaccattgccctatccggaaaaacaagctccgaggaactgctggaccagatatccgaaagagcctactccctgcacaggatgaggaaacaagaccgccggggcgattacaaggaatccgtgggaatcaccgccgtggcggacatcatcccgcacgtagagcatcgggttgacgtccattcgggcgagatggtggaaaacagcggcaatgtctggcaggaagcggatgaagattacggattcttcatgaagcgttttgccgtttctctagtgccggaaattacggttgccgccaagcttgaacgagaacaactggctcggcgcaagccctggcccctaaaaccaaaatcaattaaaaaaccttcatccggaggcgataatgaatgagagcaccgtgaaatttgttcggagcctgggcgaactcaaagagggcgacctgggcttgctcagaaagctcaggggtcgccgtctggatgaatccctgccgggtttcgacctgttttccggcctgtggtggccactccgcagtataagccccaaaacccccaggcggaaggtggtctggctagtcaccaagcttttcgcggaattccgctttgagcaaaagaaaggcgccagcctgccttggctcatgggcagaatatgccgtggacttaaagaagaaaaagagttcccacgtgttttagccaggttcgaccgcttgctcacgctcgagttgaaccaactggaggaaccgctggcgcaagtgctcgcgattttaaaaagacatgacattgccagtctggactgggttgccctcatcgatgacctctccgcttgggaacgggaatcaaacagagcgatatggtcagacacatttatttcagcatttaataatcagcaaggaggaatcaaatgttgattgaaatacacatgatccaaaaccacagcccggccaacctgaaccgggacgacctgggcgcgcccaagacctgttatttcggtggggtgttgcggtcccgcatctccagccagtgcctaaagcggagcatcaggatgagcgatgaattcaaaaacttgctcgggggtatccgtacccgtcggttggccgagttgattacaaaagctacaggacaggactgcaggaatcaggcagaggaagttctgaacaaagccggtttgaaacacgaaaacggacatagtaagatgctggtgttcatgacccggaacaagatcgatgcccttgctcaaattgtcaccagcgaaggcctgagtgttgcagagaaagccaagaaagcggcagatgtaatatcgggggcaatacattcccctgacatcgctctgtgcggaagaatgctcgagcccgataccaaggacaagaacacagacaaggtcaagtgggaaaataccactgttgaagcagccctgcaggtgtcgcacgccatttcaacccacatcgcccgcccagaaatagattactatgtagcagctgatgacgagcctggcgacgacacaggtgctggattcatagacgaggcgatgtttgcttcggcctgtttctacaaatattactcaattgattggaataccttgataatcaacctccagggtaatgaaaagttggcagctcatactgtcggagcctttatccaggccgctgcactcactaatcccagcggaaagcagaacagctttgccgcacataaccttcccgatggaatattggtagaaataaaagagacacctgtcagctatgcaaatgcctttgtgcgaccggtgggaatcgttaaggattctgacttggtagaacaaagcattggccaactggccaactatgtgaaggatataagtgccggtttcttccctggacagatgaaaggcaacgctctgtggttctcgcccaatggacgttatcccctaaagcctcaacagggcacgctggacataaagccagtttgcaacctgctagaacttgttcgcgaagcagttgagatgttgggttttgaatgggatgatgtaaaaaacgagaaagtagagagttgaaatgtcttctccgcctaataccctgttcctgagattggaggctccccttcaggcctggggaagcaatgaggccaaattcgccgtgcgcaggacagccgacgcgcccaccaaatccggagtggcaggcctgctctgcgctgccctgggaatcagccgggccgaagccggacagtattggctgggtgaaattgccaaattgcgcatgggggtgcggatagaccgcccgggcatccgctggtgggattaccatactgtgggagcggagcagaagctgcgcatttctgacctgaaaatgcccaacggcctagttctggttggcactgccctggccaaaaacctgggcgcggacaagatcaaatccaaacccggggctttgctctcccgacgcgagtatttggctgatgccagcttcctggttgcgctccagggtgaaccggatatcgtggcacaactggctgaagcgctgaaaaaaccagtctggacgctttatctggggcgaaaatcctgtcccccctcccgtccggtggatgaacacccgccagggttttatgccagtctgaaagaggctttgcggtcgatcccggcgcaactgagggaaaaaggcgaaccgatacctgacagtgttccctgtgtgctcgactgggttccggcccatgatgacgtgcacgctccgccgaacgccgaagcgcattacgacgtgccggtgtcctttgagcctccccaccacttgccccggctggtgatccgctgtaacctgccattggaccgcaacttcgaggcagagaccgtgctttccggcaaagcctggcaaccgccccgcaaccgggcaaattacgacaatcctgaatacaaaagggtccgcgctgagcgtttggtgatggacaatgccgcctgcatgttctgcaaggcacccgccactactgtgcagcacgtgaattaccgacgcgccggaggcagcgagaagccggaggacttgcgcgccctctgccgcctctgccacgatgcctgcaccatgctggaatatggcagcggcatgaccatggaccgcatagatccctgtgaccccgcctggcgtgagcgcatcttggccaaacgcgaggaaataatcaaattccgctcgctggagcagcgcaggcgcaaactcgatccgaaggaggagaacggatgatgtatctatcccaactgctcatcgacacaggcggcaaccctgaccggccaaggcccgggcgcttgtggctgaacaatatctataatgtccaccggcggctcagcatggctttccccatgcgcaagcgcaaggaaggagacccgaggtttctgcagccctttgaccccgcagattttgaaaagcgccagttcctctttcgggtggacaacaacaccgatggagaaaatcaaagggcgatggttttggtgcagtcgtccctgccgccggattgggactgggctttccagaatgccacgggatttttggcagcccctccccaggttaaggaatacgatccccagttctcagcaggtcagcggctgcgcttccgcatcctcgtgaatgccagtgtcaaacgcaaaatcgacgagttgcgggaaggacccggaggaaaggaaaaaacgggaagggttctgcacaaacgggtcgcccttacctgggacacaaattccaacccaaaggatgcggtggcgcaatggtttgccgccaaggctggcagactgggcttcacgcccggggagaccgaactggtaagcctgggctgggtatacggttccaaaccggagccccggggaaattcgccccggcgtgagaacgaataccgtcccctgagataccgttccgccctgctggaaggttatctgacagtggatgatgcctttctgttccgggaagccttggaaaaaggtatcggcagcgccaaaggaatgggcttcggcctcctttccgtggttccggcaagtgatgcgtaacagagaccttcacctaatgccaaaaatgcgggaccgcttcacctatctctatgtggagcatgccaaaatagacaaagaacaacaggcaatcgcctttcacgatgccatgggctccactcctgttccctgcgctggactggccctgctgatgctggggccaggcgtatccatcacccatgcggccatccttgttttagcagaatgcggctgtttggtggcttgggtgggggaacagggagtccgcttttactcatccgggacagggaccacccgtagttccgccaaccttatgcgtcaggctgccgcctggtcaaatcgagatacgcatctgcggatagttcgcagaatgtatgaattgaggttcaaggaaaaactggacccaaccctctctcttgaacagataaggggaaaagagggagcgagagtacgggatacctatttcagactttcaaaagaattcgatgtgcccatgagtgcgaggaattacgacaggagcaactggaataaaaccgaccccatcaacagagccctgtccgttgccaattcctgtctctatggcatctgccacgccgcgatagtggccgctggctattcacctgccctgggtttcgttcatactggcaaacaactgtcatttgtttatgacattgccgatctttataaaatggaaacctccgtgcccgcggctttcatagccacagccgcaggggtcgataacctggacagaaggacacgcattgcctgccgtgaccagttctatcaatttggtctgctaaagaagatagtggccgacattcacgcccttttcggtattctggaaacttcggacgatgagccagaccttgctgatgtcgatccagccgtgccaggcgggctttggaacccagatgataaagtgagccccggcggcttgtcatggggtctggatgatcctggaggccatgatgatggttctggtgcttgaaaaagttccctctggcctgagaggagaaattacacgctggctcctcgaaatcaaggctggagtatttgtcggtcaggtatcggccatgataagggaaaagctgtgggacaaggccaggtctggttgtgccggtggaacttgtatcatgatttacagcaagcattgcgaacaaggctttggaattgagttttggggtgccgcggaaaggatagtgacagaatgggaaggattgaaattgatgaccaagcatccgtgatccatacttgaagcctgttcaatggcctcaaagcgtctactttcgaagtgtgttccccacctgcgtgggggtgaaccggtcagccctgcgaaggttagccctgcgaaggtgtgttccccacctgcgtgggggtgaaccgttctcggcaccac

SEQ ID NO: 1108 - DNA, 103595 bp, Artificial Sequence
  Synthetic Oligonucleotide
  misc_feature (1)..(96259): n is a, c, g, or t
nnnnnnnnnnnnnnnnnnnnnnnnnnnnnnnnnnnnnnnnnnnnnnnnnnnnnnnnnnnnnnnnnnnnnnnnnnnnnnnnnnnnnnnnnnnnnnnnnnnnnnnnnnnnnnnnnnnnnnnnnnnnnnnnnnnnnnnnnnnnnnnnnnnnnnnnnnnnnnnnnnnnnnnnnnnnnnnnnnnnnnnnnnnnnnnnnnnnnnnnnnnnnnnnnnnnnnnnnnnnnnnnnnnnnnnnnnnnnnnnnnnnnnnnnnnnnnnnnnnnnnnnnnnnnnnnnnnnnnnnnnnnnnnnnnnnnnnnnnnnnnnnnnnnnnnnnnnnnnnnnnnnnnnnnnnnnnnnnnnnnnnnnnnnnnnnnnnnnnnnnnnnnnnnnnnnnnnnnnnnnnnnnnnnnnnnnnnnnnnnnnnnnnnnnnnnnnnnnnnnnnnnnnnnnnnnnnnnnnnnnnnnnnnnnnnnnnnnnnnnnnnnnnnnnnnnnnnnnnnnnnnnnnnnnnnnnnnnnnnnnnnnnnnnnnnnnnnnnnnnnnnnnnnnnnnnnnnnnnnnnnnnnnnnnnnnnnnnnnnnnnnnnnnnnnnnnnnnnnnnnnnnnnnnnnnnnnnnnnnnnnnnnnnnnnnnnnnnnnnnnnnnnnnnnnnnnnnnnnnnnnnnnnnnnnnnnnnnnnnnnnnnnnnnnnnnnnnnnnnnnnnnnnnnnnnnnnnnnnnnnnnnnnnnnnnnnnnnnnnnnnnnnnnnnnnnnnnnnnnnnnnnnnnnnnnnnnnnnnnnnnnnnnnnnnnnnnnnnnnnnnnnnnnnnnnnnnnnnnnnnnnnnnnnnnnnnnnnnnnnnnnnnnnnnnnnnnnnnnnnnnnnnnnnnnnnnnnnnnnnnnnnnnnnnnnnnnnnnnnnnnnnnnnnnnnnnnnnnnnnnnnnnnnnnnnnnnnnnnnnnnnnnnnnnnnnnnnnnnnnnnnnnnnnnnnnnnnnnnnnnnnnnnnnnnnnnnnnnnnnnnnnnnnnnnnnnnnnnnnnnnnnnnnnnnnnnnnnnnnnnnnnnnnnnnnnnnnnnnnnnnnnnnnnnnnnnnnnnnnnnnnnnnnnnnnnnnnnnnnnnnnnnnnnnnnnnnnnnnnnnnnnnnnnnnnnnnnnnnnnnnnnnnnnnnnnnnnnnnnnnnnnnnnnnnnnnnnnnnnnnnnnnnnnnnnnnnnnnnnnnnnnnnnnnnnnnnnnnnnnnnnnnnnnnnnnnnnnnnnnnnnnnnnnnnnnnnnnnnnnnnnnnnnnnnnnnnnnnnnnnnnnnnnnnnnnnnnnnnnnnnnnnnnnnnnnnnnnnnnnnnnnnnnnnnnnnnnnnnnnnnnnnnnnnnnnnnnnnnnnnnnnnnnnnnnnnnnnnnnnnnnnnnnnnnnnnnnnnnnnnnnnnnnnnnnnnnnnnnnnnnnnnnnnnnnnnnnnnnnnnnnnnnnnnnnnnnnnnnnnnnnnnnnnnnnnnnnnnnnnnnnnnnnnnnnnnnnnnnnnnnnnnnnnnnnnnnnnnnnnnnnnnnnnnnnnnnnnnnnnnnnnnnnnnnnnnnnnnnnnnnnnnnnnnnnnnnnnnnnnnnnnnnnnnnnnnnnnnnnnnnnnnnnnnnnnnnnnnnnnnnnnnnnnnnnnnnnnnnnnnnnnnnnnnnnnnnnnnnnnnnnnnnnnnnnnnnnnnnnnnnnnnnnnnnnnnnnnnnnnnnnnnnnnnnnnnnnnnnnnnnnnnnnnnnnnnnnnnnnnnnnnnnnnnnnnnnnnnnnnnnnnnnnnnnnnnnnnnnnnnnnnnnnnnnnnnnnnnnnnnnnnnnnnnnnnnnnnnnnnnnnnnnnnnnnnnnnnnnnnnnnnnnnnnnnnnnnnnnnnnnnnnnnnnnnnnnnnnnnnnnnnnnnnnnnnnnnnnnnnnnnnnnnnnnnnnnnnnnnnnnnnnnnnnnnnnnnnnnnnnnnnnnnnnnnnnnnnnnnnnnnnnnnnnnnnnnnnnnnnnnnnnnnnnnnnnnnnnnnnnnnnnnnnnnnnnnnnnnnnnnnnnnnnnnnnnnnnnnnnnnnnnnnnnnnnnnnnnnnnnnnnnnnnnnnnnnnnnnnnnnnnnnnnnnnnnnnnnnnnnnnnnnnnnnnnnnnnnnnnnnnnnnnnnnnnnnnnnnnnnnnnnnnnnnnnnnnnnnnnnnnnnnnnnnnnnnnnnnnnnnnnnnnnnnnnnnnnnnnnnnnnnnnnnnnnnnnnnnnnnnnnnnnnnnnnnnnnnnnnnnnnnnnnnnnnnnnnnnnnnnnnnnnnnnnnnnnnnnnnnnnnnnnnnnnnnnnnnnnnnnnnnnnnnnnnnnnnnnnnnnnnnnnnnnnnnnnnnnnnnnnnnnnnnnnnnnnnnnnnnnnnnnnnnnnnnnnnnnnnnnnnnnnnnnnnnnnnnnnnnnnnnnnnnnnnnnnnnnnnnnnnnnnnnnnnnnnnnnnnnnnnnnnnnnnnnnnnnnnnnnnnnnnnnnnnnnnnnnnnnnnnnnnnnnnnnnnnnnnnnnnnnnnnnnnnnnnnnnnnnnnnnnnnnnnnnnnnnnnnnnnnnnnnnnnnnnnnnnnnnnnnnnnnnnnnnnnnnnnnnnnnnnnnnnnnnnnnnnnnnnnnnnnnnnnnnnnnnnnnnnnnnnnnnnnnnnnnnnnnnnnnnnnnnnnnnnnnnnnnnnnnnnnnnnnnnnnnnnnnnnnnnnnnnnnnnnnnnnnnnnnnnnnnnnnnnnnnnnnnnnnnnnnnnnnnnnnnnnnnnnnnnnnnnnnnnnnnnnnnnnnnnnnnnnnnnnnnnnnnnnnnnnnnnnnnnnnnnnnnnnnnnnnnnnnnnnnnnnnnnnnnnnnnnnnnnnnnnnnnnnnnnnnnnnnnnnnnnnnnnnnnnnnnnnnnnnnnnnnnnnnnnnnnnnnnnnnnnnnnnnnnnnnnnnnnnnnnnnnnnnnnnnnnnnnnnnnnnnnnnnnnnnnnnnnnnnnnnnnnnnnnnnnnnnnnnnnnnnnnnnnnnnnnnnnnnnnnnnnnnnnnnnnnnnnnnnnnnnnnnnnnnnnnnnnnnnnnnnnnnnnnnnnnnnnnnnnnnnnnnnnnnnnnnnnnnnnnnnnnnnnnnnnnnnnnnnnnnnnnnnnnnnnnnnnnnnnnnnnnnnnnnnnnnnnnnnnnnnnnnnnnnnnnnnnnnnnnnnnnnnnnnnnnnnnnnnnnnnnnnnnnnnnnnnnnnnnnnnnnnnnnnnnnnnnnnnnnnnnnnnnnnnnnnnnnnnnnnnnnnnnnnnnnnnnnnnnnnnnnnnnnnnnnnnnnnnnnnnnnnnnnnnnnnnnnnnnnnnnnnnnnnnnnnnnnnnnnnnnnnnnnnnnnnnnnnnnnnnnnnnnnnnnnnnnnnnnnnnnnnnnnnnnnnnnnnnnnnnnnnnnnnnnnnnnnnnnnnnnnnnnnnnnnnnnnnnnnnnnnnnnnnnnnnnnnnnnnnnnnnnnnnnnnnnnnnnnnnnnnnnnnnnnnnnnnnnnnnnnnnnnnnnnnnnnnnnnnnnnnnnnnnnnnnnnnnnnnnnnnnnnnnnnnnnnnnnnnnnnnnnnnnnnnnnnnnnnnnnnnnnnnnnnnnnnnnnnnnnnnnnnnnnnnnnnnnnnnnnnnnnnnnnnnnnnnnnnnnnnnnnnnnnnnnnnnnnnnnnnnnnnnnnnnnnnnnnnnnnnnnnnnnnnnnnnnnnnnnnnnnnnnnnnnnnnnnnnnnnnnnnnnnnnnnnnnnnnnnnnnnnnnnnnnnnnnnnnnnnnnnnnnnnnnnnnnnnnnnnnnnnnnnnnnnnnnnnnnnnnnnnnnnnnnnnnnnnnnnnnnnnnnnnnnnnnnnnnnnnnnnnnnnnnnnnnnnnnnnnnnnnnnnnnnnnnnnnnnnnnnnnnnnnnnnnnnnnnnnnnnnnnnnnnnnnnnnnnnnnnnnnnnnnnnnnnnnnnnnnnnnnnnnnnnnnnnnnnnnnnnnnnnnnnnnnnnnnnnnnnnnnnnnnnnnnnnnnnnnnnnnnnnnnnnnnnnnnnnnnnnnnnnnnnnnnnnnnnnnnnnnnnnnnnnnnnnnnnnnnnnnnnnnnnnnnnnnnnnnnnnnnnnnnnnnnnnnnnnnnnnnnnnnnnnnnnnnnnnnnnnnnnnnnnnnnnnnnnnnnnnnnnnnnnnnnnnnnnnnnnnnnnnnnnnnnnnnnnnnnnnnnnnnnnnnnnnnnnnnnnnnnnnnnnnnnnnnnnnnnnnnnnnnnnnnnnnnnnnnnnnnnnnnnnnnnnnnnnnnnnnnnnnnnnnnnnnnnnnnnnnnnnnnnnnnnnnnnnnnnnnnnnnnnnnnnnnnnnnnnnnnnnnnnnnnnnnnnnnnnnnnnnnnnnnnnnnnnnnnnnnnnnnnnnnnnnnnnnnnnnnnnnnnnnnnnnnnnnnnnnnnnnnnnnnnnnnnnnnnnnnnnnnnnnnnnnnnnnnnnnnnnnnnnnnnnnnnnnnnnnnnnnnnnnnnnnnnnnnnnnnnnnnnnnnnnnnnnnnnnnnnnnnnnnnnnnnnnnnnnnnnnnnnnnnnnnnnnnnnnnnnnnnnnnnnnnnnnnnnnnnnnnnnnnnnnnnnnnnnnnnnnnnnnnnnnnnnnnnnnnnnnnnnnnnnnnnnnnnnnnnnnnnnnnnnnnnnnnnnnnnnnnnnnnnnnnnnnnnnnnnnnnnnnnnnnnnnnnnnnnnnnnnnnnnnnnnnnnnnnnnnnnnnnnnnnnnnnnnnnnnnnnnnnnnnnnnnnnnnnnnnnnnnnnnnnnnnnnnnnnnnnnnnnnnnnnnnnnnnnnnnnnnnnnnnnnnnnnnnnnnnnnnnnnnnnnnnnnnnnnnnnnnnnnnnnnnnnnnnnnnnnnnnnnnnnnnnnnnnnnnnnnnnnnnnnnnnnnnnnnnnnnnnnnnnnnnnnnnnnnnnnnnnnnnnnnnnnnnnnnnnnnnnnnnnnnnnnnnnnnnnnnnnnnnnnnnnnnnnnnnnnnnnnnnnnnnnnnnnnnnnnnnnnnnnnnnnnnnnnnnnnnnnnnnnnnnnnnnnnnnnnnnnnnnnnnnnnnnnnnnnnnnnnnnnnnnnnnnnnnnnnnnnnnnnnnnnnnnnnnnnnnnnnnnnnnnnnnnnnnnnnnnnnnnnnnnnnnnnnnnnnnnnnnnnnnnnnnnnnnnnnnnnnnnnnnnnnnnnnnnnnnnnnnnnnnnnnnnnnnnnnnnnnnnnnnnnnnnnnnnnnnnnnnnnnnnnnnnnnnnnnnnnnnnnnnnnnnnnnnnnnnnnnnnnnnnnnnnnnnnnnnnnnnnnnnnnnnnnnnnnnnnnnnnnnnnnnnnnnnnnnnnnnnnnnnnnnnnnnnnnnnnnnnnnnnnnnnnnnnnnnnnnnnnnnnnnnnnnnnnnnnnnnnnnnnnnnnnnnnnnnnnnnnnnnnnnnnnnnnnnnnnnnnnnnnnnnnnnnnnnnnnnnnnnnnnnnnnnnnnnnnnnnnnnnnnnnnnnnnnnnnnnnnnnnnnnnnnnnnnnnnnnnnnnnnnnnnnnnnnnnnnnnnnnnnnnnnnnnnnnnnnnnnnnnnnnnnnnnnnnnnnnnnnnnnnnnnnnnnnnnnnnnnnnnnnnnnnnnnnnnnnnnnnnnnnnnnnnnnnnnnnnnnnnnnnnnnnnnnnnnnnnnnnnnnnnnnnnnnnnnnnnnnnnnnnnnnnnnnnnnnnnnnnnnnnnnnnnnnnnnnnnnnnnnnnnnnnnnnnnnnnnnnnnnnnnnnnnnnnnnnnnnnnnnnnnnnnnnnnnnnnnnnnnnnnnnnnnnnnnnnnnnnnnnnnnnnnnnnnnnnnnnnnnnnnnnnnnnnnnnnnnnnnnnnnnnnnnnnnnnnnnnnnnnnnnnnnnnnnnnnnnnnnnnnnnnnnnnnnnnnnnnnnnnnnnnnnnnnnnnnnnnnnnnnnnnnnnnnnnnnnnnnnnnnnnnnnnnnnnnnnnnnnnnnnnnnnnnnnnnnnnnnnnnnnnnnnnnnnnnnnnnnnnnnnnnnnnnnnnnnnnnnnnnnnnnnnnnnnnnnnnnnnnnnnnnnnnnnnnnnnnnnnnnnnnnnnnnnnnnnnnnnnnnnnnnnnnnnnnnnnnnnnnnnnnnnnnnnnnnnnnnnnnnnnnnnnnnnnnnnnnnnnnnnnnnnnnnnnnnnnnnnnnnnnnnnnnnnnnnnnnnnnnnnnnnnnnnnnnnnnnnnnnnnnnnnnnnnnnnnnnnnnnnnnnnnnnnnnnnnnnnnnnnnnnnnnnnnnnnnnnnnnnnnnnnnnnnnnnnnnnnnnnnnnnnnnnnnnnnnnnnnnnnnnnnnnnnnnnnnnnnnnnnnnnnnnnnnnnnnnnnnnnnnnnnnnnnnnnnnnnnnnnnnnnnnnnnnnnnnnnnnnnnnnnnnnnnnnnnnnnnnnnnnnnnnnnnnnnnnnnnnnnnnnnnnnnnnnnnnnnnnnnnnnnnnnnnnnnnnnnnnnnnnnnnnnnnnnnnnnnnnnnnnnnnnnnnnnnnnnnnnnnnnnnnnnnnnnnnnnnnnnnnnnnnnnnnnnnnnnnnnnnnnnnnnnnnnnnnnnnnnnnnnnnnnnnnnnnnnnnnnnnnnnnnnnnnnnnnnnnnnnnnnnnnnnnnnnnnnnnnnnnnnnnnnnnnnnnnnnnnnnnnnnnnnnnnnnnnnnnnnnnnnnnnnnnnnnnnnnnnnnnnnnnnnnnnnnnnnnnnnnnnnnnnnnnnnnnnnnnnnnnnnnnnnnnnnnnnnnnnnnnnnnnnnnnnnnnnnnnnnnnnnnnnnnnnnnnnnnnnnnnnnnnnnnnnnnnnnnnnnnnnnnnnnnnnnnnnnnnnnnnnnnnnnnnnnnnnnnnnnnnnnnnnnnnnnnnnnnnnnnnnnnnnnnnnnnnnnnnnnnnnnnnnnnnnnnnnnnnnnnnnnnnnnnnnnnnnnnnnnnnnnnnnnnnnnnnnnnnnnnnnnnnnnnnnnnnnnnnnnnnnnnnnnnnnnnnnnnnnnnnnnnnnnnnnnnnnnnnnnnnnnnnnnnnnnnnnnnnnnnnnnnnnnnnnnnnnnnnnnnnnnnnnnnnnnnnnnnnnnnnnnnnnnnnnnnnnnnnnnnnnnnnnnnnnnnnnnnnnnnnnnnnnnnnnnnnnnnnnnnnnnnnnnnnnnnnnnnnnnnnnnnnnnnnnnnnnnnnnnnnnnnnnnnnnnnnnnnnnnnnnnnnnnnnnnnnnnnnnnnnnnnnnnnnnnnnnnnnnnnnnnnnnnnnnnnnnnnnnnnnnnnnnnnnnnnnnnnnnnnnnnnnnnnnnnnnnnnnnnnnnnnnnnnnnnnnnnnnnnnnnnnnnnnnnnnnnnnnnnnnnnnnnnnnnnnnnnnnnnnnnnnnnnnnnnnnnnnnnnnnnnnnnnnnnnnnnnnnnnnnnnnnnnnnnnnnnnnnnnnnnnnnnnnnnnnnnnnnnnnnnnnnnnnnnnnnnnnnnnnnnnnnnnnnnnnnnnnnnnnnnnnnnnnnnnnnnnnnnnnnnnnnnnnnnnnnnnnnnnnnnnnnnnnnnnnnnnnnnnnnnnnnnnnnnnnnnnnnnnnnnnnnnnnnnnnnnnnnnnnnnnnnnnnnnnnnnnnnnnnnnnnnnnnnnnnnnnnnnnnnnnnnnnnnnnnnnnnnnnnnnnnnnnnnnnnnnnnnnnnnnnnnnnnnnnnnnnnnnnnnnnnnnnnnnnnnnnnnnnnnnnnnnnnnnnnnnnnnnnnnnnnnnnnnnnnnnnnnnnnnnnnnnnnnnnnnnnnnnnnnnnnnnnnnnnnnnnnnnnnnnnnnnnnnnnnnnnnnnnnnnnnnnnnnnnnnnnnnnnnnnnnnnnnnnnnnnnnnnnnnnnnnnnnnnnnnnnnnnnnnnnnnnnnnnnnnnnnnnnnnnnnnnnnnnnnnnnnnnnnnnnnnnnnnnnnnnnnnnnnnnnnnnnnnnnnnnnnnnnnnnnnnnnnnnnnnnnnnnnnnnnnnnnnnnnnnnnnnnnnnnnnnnnnnnnnnnnnnnnnnnnnnnnnnnnnnnnnnnnnnnnnnnnnnnnnnnnnnnnnnnnnnnnnnnnnnnnnnnnnnnnnnnnnnnnnnnnnnnnnnnnnnnnnnnnnnnnnnnnnnnnnnnnnnnnnnnnnnnnnnnnnnnnnnnnnnnnnnnnnnnnnnnnnnnnnnnnnnnnnnnnnnnnnnnnnnnnnnnnnnnnnnnnnnnnnnnnnnnnnnnnnnnnnnnnnnnnnnnnnnnnnnnnnnnnnnnnnnnnnnnnnnnnnnnnnnnnnnnnnnnnnnnnnnnnnnnnnnnnnnnnnnnnnnnnnnnnnnnnnnnnnnnnnnnnnnnnnnnnnnnnnnnnnnnnnnnnnnnnnnnnnnnnnnnnnnnnnnnnnnnnnnnnnnnnnnnnnnnnnnnnnnnnnnnnnnnnnnnnnnnnnnnnnnnnnnnnnnnnnnnnnnnnnnnnnnnnnnnnnnnnnnnnnnnnnnnnnnnnnnnnnnnnnnnnnnnnnnnnnnnnnnnnnnnnnnnnnnnnnnnnnnnnnnnnnnnnnnnnnnnnnnnnnnnnnnnnnnnnnnnnnnnnnnnnnnnnnnnnnnnnnnnnnnnnnnnnnnnnnnnnnnnnnnnnnnnnnnnnnnnnnnnnnnnnnnnnnnnnnnnnnnnnnnnnnnnnnnnnnnnnnnnnnnnnnnnnnnnnnnnnnnnnnnnnnnnnnnnnnnnnnnnnnnnnnnnnnnnnnnnnnnnnnnnnnnnnnnnnnnnnnnnnnnnnnnnnnnnnnnnnnnnnnnnnnnnnnnnnnnnnnnnnnnnnnnnnnnnnnnnnnnnnnnnnnnnnnnnnnnnnnnnnnnnnnnnnnnnnnnnnnnnnnnnnnnnnnnnnnnnnnnnnnnnnnnnnnnnnnnnnnnnnnnnnnnnnnnnnnnnnnnnnnnnnnnnnnnnnnnnnnnnnnnnnnnnnnnnnnnnnnnnnnnnnnnnnnnnnnnnnnnnnnnnnnnnnnnnnnnnnnnnnnnnnnnnnnnnnnnnnnnnnnnnnnnnnnnnnnnnnnnnnnnnnnnnnnnnnnnnnnnnnnnnnnnnnnnnnnnnnnnnnnnnnnnnnnnnnnnnnnnnnnnnnnnnnnnnnnnnnnnnnnnnnnnnnnnnnnnnnnnnnnnnnnnnnnnnnnnnnnnnnnnnnnnnnnnnnnnnnnnnnnnnnnnnnnnnnnnnnnnnnnnnnnnnnnnnnnnnnnnnnnnnnnnnnnnnnnnnnnnnnnnnnnnnnnnnnnnnnnnnnnnnnnnnnnnnnnnnnnnnnnnnnnnnnnnnnnnnnnnnnnnnnnnnnnnnnnnnnnnnnnnnnnnnnnnnnnnnnnnnnnnnnnnnnnnnnnnnnnnnnnnnnnnnnnnnnnnnnnnnnnnnnnnnnnnnnnnnnnnnnnnnnnnnnnnnnnnnnnnnnnnnnnnnnnnnnnnnnnnnnnnnnnnnnnnnnnnnnnnnnnnnnnnnnnnnnnnnnnnnnnnnnnnnnnnnnnnnnnnnnnnnnnnnnnnnnnnnnnnnnnnnnnnnnnnnnnnnnnnnnnnnnnnnnnnnnnnnnnnnnnnnnnnnnnnnnnnnnnnnnnnnnnnnnnnnnnnnnnnnnnnnnnnnnnnnnnnnnnnnnnnnnnnnnnnnnnnnnnnnnnnnnnnnnnnnnnnnnnnnnnnnnnnnnnnnnnnnnnnnnnnnnnnnnnnnnnnnnnnnnnnnnnnnnnnnnnnnnnnnnnnnnnnnnnnnnnnnnnnnnnnnnnnnnnnnnnnnnnnnnnnnnnnnnnnnnnnnnnnnnnnnnnnnnnnnnnnnnnnnnnnnnnnnnnnnnnnnnnnnnnnnnnnnnnnnnnnnnnnnnnnnnnnnnnnnnnnnnnnnnnnnnnnnnnnnnnnnnnnnnnnnnnnnnnnnnnnnnnnnnnnnnnnnnnnnnnnnnnnnnnnnnnnnnnnnnnnnnnnnnnnnnnnnnnnnnnnnnnnnnnnnnnnnnnnnnnnnnnnnnnnnnnnnnnnnnnnnnnnnnnnnnnnnnnnnnnnnnnnnnnnnnnnnnnnnnnnnnnnnnnnnnnnnnnnnnnnnnnnnnnnnnnnnnnnnnnnnnnnnnnnnnnnnnnnnnnnnnnnnnnnnnnnnnnnnnnnnnnnnnnnnnnnnnnnnnnnnnnnnnnnnnnnnnnnnnnnnnnnnnnnnnnnnnnnnnnnnnnnnnnnnnnnnnnnnnnnnnnnnnnnnnnnnnnnnnnnnnnnnnnnnnnnnnnnnnnnnnnnnnnnnnnnnnnnnnnnnnnnnnnnnnnnnnnnnnnnnnnnnnnnnnnnnnnnnnnnnnnnnnnnnnnnnnnnnnnnnnnnnnnnnnnnnnnnnnnnnnnnnnnnnnnnnnnnnnnnnnnnnnnnnnnnnnnnnnnnnnnnnnnnnnnnnnnnnnnnnnnnnnnnnnnnnnnnnnnnnnnnnnnnnnnnnnnnnnnnnnnnnnnnnnnnnnnnnnnnnnnnnnnnnnnnnnnnnnnnnnnnnnnnnnnnnnnnnnnnnnnnnnnnnnnnnnnnnnnnnnnnnnnnnnnnnnnnnnnnnnnnnnnnnnnnnnnnnnnnnnnnnnnnnnnnnnnnnnnnnnnnnnnnnnnnnnnnnnnnnnnnnnnnnnnnnnnnnnnnnnnnnnnnnnnnnnnnnnnnnnnnnnnnnnnnnnnnnnnnnnnnnnnnnnnnnnnnnnnnnnnnnnnnnnnnnnnnnnnnnnnnnnnnnnnnnnnnnnnnnnnnnnnnnnnnnnnnnnnnnnnnnnnnnnnnnnnnnnnnnnnnnnnnnnnnnnnnnnnnnnnnnnnnnnnnnnnnnnnnnnnnnnnnnnnnnnnnnnnnnnnnnnnnnnnnnnnnnnnnnnnnnnnnnnnnnnnnnnnnnnnnnnnnnnnnnnnnnnnnnnnnnnnnnnnnnnnnnnnnnnnnnnnnnnnnnnnnnnnnnnnnnnnnnnnnnnnnnnnnnnnnnnnnnnnnnnnnnnnnnnnnnnnnnnnnnnnnnnnnnnnnnnnnnnnnnnnnnnnnnnnnnnnnnnnnnnnnnnnnnnnnnnnnnnnnnnnnnnnnnnnnnnnnnnnnnnnnnnnnnnnnnnnnnnnnnnnnnnnnnnnnnnnnnnnnnnnnnnnnnnnnnnnnnnnnnnnnnnnnnnnnnnnnnnnnnnnnnnnnnnnnnnnnnnnnnnnnnnnnnnnnnnnnnnnnnnnnnnnnnnnnnnnnnnnnnnnnnnnnnnnnnnnnnnnnnnnnnnnnnnnnnnnnnnnnnnnnnnnnnnnnnnnnnnnnnnnnnnnnnnnnnnnnnnnnnnnnnnnnnnnnnnnnnnnnnnnnnnnnnnnnnnnnnnnnnnnnnnnnnnnnnnnnnnnnnnnnnnnnnnnnnnnnnnnnnnnnnnnnnnnnnnnnnnnnnnnnnnnnnnnnnnnnnnnnnnnnnnnnnnnnnnnnnnnnnnnnnnnnnnnnnnnnnnnnnnnnnnnnnnnnnnnnnnnnnnnnnnnnnnnnnnnnnnnnnnnnnnnnnnnnnnnnnnnnnnnnnnnnnnnnnnnnnnnnnnnnnnnnnnnnnnnnnnnnnnnnnnnnnnnnnnnnnnnnnnnnnnnnnnnnnnnnnnnnnnnnnnnnnnnnnnnnnnnnnnnnnnnnnnnnnnnnnnnnnnnnnnnnnnnnnnnnnnnnnnnnnnnnnnnnnnnnnnnnnnnnnnnnnnnnnnnnnnnnnnnnnnnnnnnnnnnnnnnnnnnnnnnnnnnnnnnnnnnnnnnnnnnnnnnnnnnnnnnnnnnnnnnnnnnnnnnnnnnnnnnnnnnnnnnnnnnnnnnnnnnnnnnnnnnnnnnnnnnnnnnnnnnnnnnnnnnnnnnnnnnnnnnnnnnnnnnnnnnnnnnnnnnnnnnnnnnnnnnnnnnnnnnnnnnnnnnnnnnnnnnnnnnnnnnnnnnnnnnnnnnnnnnnnnnnnnnnnnnnnnnnnnnnnnnnnnnnnnnnnnnnnnnnnnnnnnnnnnnnnnnnnnnnnnnnnnnnnnnnnnnnnnnnnnnnnnnnnnnnnnnnnnnnnnnnnnnnnnnnnnnnnnnnnnnnnnnnnnnnnnnnnnnnnnnnnnnnnnnnnnnnnnnnnnnnnnnnnnnnnnnnnnnnnnnnnnnnnnnnnnnnnnnnnnnnnnnnnnnnnnnnnnnnnnnnnnnnnnnnnnnnnnnnnnnnnnnnnnnnnnnnnnnnnnnnnnnnnnnnnnnnnnnnnnnnnnnnnnnnnnnnnnnnnnnnnnnnnnnnnnnnnnnnnnnnnnnnnnnnnnnnnnnnnnnnnnnnnnnnnnnnnnnnnnnnnnnnnnnnnnnnnnnnnnnnnnnnnnnnnnnnnnnnnnnnnnnnnnnnnnnnnnnnnnnnnnnnnnnnnnnnnnnnnnnnnnnnnnnnnnnnnnnnnnnnnnnnnnnnnnnnnnnnnnnnnnnnnnnnnnnnnnnnnnnnnnnnnnnnnnnnnnnnnnnnnnnnnnnnnnnnnnnnnnnnnnnnnnnnnnnnnnnnnnnnnnnnnnnnnnnnnnnnnnnnnnnnnnnnnnnnnnnnnnnnnnnnnnnnnnnnnnnnnnnnnnnnnnnnnnnnnnnnnnnnnnnnnnnnnnnnnnnnnnnnnnnnnnnnnnnnnnnnnnnnnnnnnnnnnnnnnnnnnnnnnnnnnnnnnnnnnnnnnnnnnnnnnnnnnnnnnnnnnnnnnnnnnnnnnnnnnnnnnnnnnnnnnnnnnnnnnnnnnnnnnnnnnnnnnnnnnnnnnnnnnnnnnnnnnnnnnnnnnnnnnnnnnnnnnnnnnnnnnnnnnnnnnnnnnnnnnnnnnnnnnnnnnnnnnnnnnnnnnnnnnnnnnnnnnnnnnnnnnnnnnnnnnnnnnnnnnnnnnnnnnnnnnnnnnnnnnnnnnnnnnnnnnnnnnnnnnnnnnnnnnnnnnnnnnnnnnnnnnnnnnnnnnnnnnnnnnnnnnnnnnnnnnnnnnnnnnnnnnnnnnnnnnnnnnnnnnnnnnnnnnnnnnnnnnnnnnnnnnnnnnnnnnnnnnnnnnnnnnnnnnnnnnnnnnnnnnnnnnnnnnnnnnnnnnnnnnnnnnnnnnnnnnnnnnnnnnnnnnnnnnnnnnnnnnnnnnnnnnnnnnnnnnnnnnnnnnnnnnnnnnnnnnnnnnnnnnnnnnnnnnnnnnnnnnnnnnnnnnnnnnnnnnnnnnnnnnnnnnnnnnnnnnnnnnnnnnnnnnnnnnnnnnnnnnnnnnnnnnnnnnnnnnnnnnnnnnnnnnnnnnnnnnnnnnnnnnnnnnnnnnnnnnnnnnnnnnnnnnnnnnnnnnnnnnnnnnnnnnnnnnnnnnnnnnnnnnnnnnnnnnnnnnnnnnnnnnnnnnnnnnnnnnnnnnnnnnnnnnnnnnnnnnnnnnnnnnnnnnnnnnnnnnnnnnnnnnnnnnnnnnnnnnnnnnnnnnnnnnnnnnnnnnnnnnnnnnnnnnnnnnnnnnnnnnnnnnnnnnnnnnnnnnnnnnnnnnnnnnnnnnnnnnnnnnnnnnnnnnnnnnnnnnnnnnnnnnnnnnnnnnnnnnnnnnnnnnnnnnnnnnnnnnnnnnnnnnnnnnnnnnnnnnnnnnnnnnnnnnnnnnnnnnnnnnnnnnnnnnnnnnnnnnnnnnnnnnnnnnnnnnnnnnnnnnnnnnnnnnnnnnnnnnnnnnnnnnnnnnnnnnnnnnnnnnnnnnnnnnnnnnnnnnnnnnnnnnnnnnnnnnnnnnnnnnnnnnnnnnnnnnnnnnnnnnnnnnnnnnnnnnnnnnnnnnnnnnnnnnnnnnnnnnnnnnnnnnnnnnnnnnnnnnnnnnnnnnnnnnnnnnnnnnnnnnnnnnnnnnnnnnnnnnnnnnnnnnnnnnnnnnnnnnnnnnnnnnnnnnnnnnnnnnnnnnnnnnnnnnnnnnnnnnnnnnnnnnnnnnnnnnnnnnnnnnnnnnnnnnnnnnnnnnnnnnnnnnnnnnnnnnnnnnnnnnnnnnnnnnnnnnnnnnnnnnnnnnnnnnnnnnnnnnnnnnnnnnnnnnnnnnnnnnnnnnnnnnnnnnnnnnnnnnnnnnnnnnnnnnnnnnnnnnnnnnnnnnnnnnnnnnnnnnnnnnnnnnnnnnnnnnnnnnnnnnnnnnnnnnnnnnnnnnnnnnnnnnnnnnnnnnnnnnnnnnnnnnnnnnnnnnnnnnnnnnnnnnnnnnnnnnnnnnnnnnnnnnnnnnnnnnnnnnnnnnnnnnnnnnnnnnnnnnnnnnnnnnnnnnnnnnnnnnnnnnnnnnnnnnnnnnnnnnnnnnnnnnnnnnnnnnnnnnnnnnnnnnnnnnnnnnnnnnnnnnnnnnnnnnnnnnnnnnnnnnnnnnnnnnnnnnnnnnnnnnnnnnnnnnnnnnnnnnnnnnnnnnnnnnnnnnnnnnnnnnnnnnnnnnnnnnnnnnnnnnnnnnnnnnnnnnnnnnnnnnnnnnnnnnnnnnnnnnnnnnnnnnnnnnnnnnnnnnnnnnnnnnnnnnnnnnnnnnnnnnnnnnnnnnnnnnnnnnnnnnnnnnnnnnnnnnnnnnnnnnnnnnnnnnnnnnnnnnnnnnnnnnnnnnnnnnnnnnnnnnnnnnnnnnnnnnnnnnnnnnnnnnnnnnnnnnnnnnnnnnnnnnnnnnnnnnnnnnnnnnnnnnnnnnnnnnnnnnnnnnnnnnnnnnnnnnnnnnnnnnnnnnnnnnnnnnnnnnnnnnnnnnnnnnnnnnnnnnnnnnnnnnnnnnnnnnnnnnnnnnnnnnnnnnnnnnnnnnnnnnnnnnnnnnnnnnnnnnnnnnnnnnnnnnnnnnnnnnnnnnnnnnnnnnnnnnnnnnnnnnnnnnnnnnnnnnnnnnnnnnnnnnnnnnnnnnnnnnnnnnnnnnnnnnnnnnnnnnnnnnnnnnnnnnnnnnnnnnnnnnnnnnnnnnnnnnnnnnnnnnnnnnnnnnnnnnnnnnnnnnnnnnnnnnnnnnnnnnnnnnnnnnnnnnnnnnnnnnnnnnnnnnnnnnnnnnnnnnnnnnnnnnnnnnnnnnnnnnnnnnnnnnnnnnnnnnnnnnnnnnnnnnnnnnnnnnnnnnnnnnnnnnnnnnnnnnnnnnnnnnnnnnnnnnnnnnnnnnnnnnnnnnnnnnnnnnnnnnnnnnnnnnnnnnnnnnnnnnnnnnnnnnnnnnnnnnnnnnnnnnnnnnnnnnnnnnnnnnnnnnnnnnnnnnnnnnnnnnnnnnnnnnnnnnnnnnnnnnnnnnnnnnnnnnnnnnnnnnnnnnnnnnnnnnnnnnnnnnnnnnnnnnnnnnnnnnnnnnnnnnnnnnnnnnnnnnnnnnnnnnnnnnnnnnnnnnnnnnnnnnnnnnnnnnnnnnnnnnnnnnnnnnnnnnnnnnnnnnnnnnnnnnnnnnnnnnnnnnnnnnnnnnnnnnnnnnnnnnnnnnnnnnnnnnnnnnnnnnnnnnnnnnnnnnnnnnnnnnnnnnnnnnnnnnnnnnnnnnnnnnnnnnnnnnnnnnnnnnnnnnnnnnnnnnnnnnnnnnnnnnnnnnnnnnnnnnnnnnnnnnnnnnnnnnnnnnnnnnnnnnnnnnnnnnnnnnnnnnnnnnnnnnnnnnnnnnnnnnnnnnnnnnnnnnnnnnnnnnnnnnnnnnnnnnnnnnnnnnnnnnnnnnnnnnnnnnnnnnnnnnnnnnnnnnnnnnnnnnnnnnnnnnnnnnnnnnnnnnnnnnnnnnnnnnnnnnnnnnnnnnnnnnnnnnnnnnnnnnnnnnnnnnnnnnnnnnnnnnnnnnnnnnnnnnnnnnnnnnnnnnnnnnnnnnnnnnnnnnnnnnnnnnnnnnnnnnnnnnnnnnnnnnnnnnnnnnnnnnnnnnnnnnnnnnnnnnnnnnnnnnnnnnnnnnnnnnnnnnnnnnnnnnnnnnnnnnnnnnnnnnnnnnnnnnnnnnnnnnnnnnnnnnnnnnnnnnnnnnnnnnnnnnnnnnnnnnnnnnnnnnnnnnnnnnnnnnnnnnnnnnnnnnnnnnnnnnnnnnnnnnnnnnnnnnnnnnnnnnnnnnnnnnnnnnnnnnnnnnnnnnnnnnnnnnnnnnnnnnnnnnnnnnnnnnnnnnnnnnnnnnnnnnnnnnnnnnnnnnnnnnnnnnnnnnnnnnnnnnnnnnnnnnnnnnnnnnnnnnnnnnnnnnnnnnnnnnnnnnnnnnnnnnnnnnnnnnnnnnnnnnnnnnnnnnnnnnnnnnnnnnnnnnnnnnnnnnnnnnnnnnnnnnnnnnnnnnnnnnnnnnnnnnnnnnnnnnnnnnnnnnnnnnnnnnnnnnnnnnnnnnnnnnnnnnnnnnnnnnnnnnnnnnnnnnnnnnnnnnnnnnnnnnnnnnnnnnnnnnnnnnnnnnnnnnnnnnnnnnnnnnnnnnnnnnnnnnnnnnnnnnnnnnnnnnnnnnnnnnnnnnnnnnnnnnnnnnnnnnnnnnnnnnnnnnnnnnnnnnnnnnnnnnnnnnnnnnnnnnnnnnnnnnnnnnnnnnnnnnnnnnnnnnnnnnnnnnnnnnnnnnnnnnnnnnnnnnnnnnnnnnnnnnnnnnnnnnnnnnnnnnnnnnnnnnnnnnnnnnnnnnnnnnnnnnnnnnnnnnnnnnnnnnnnnnnnnnnnnnnnnnnnnnnnnnnnnnnnnnnnnnnnnnnnnnnnnnnnnnnnnnnnnnnnnnnnnnnnnnnnnnnnnnnnnnnnnnnnnnnnnnnnnnnnnnnnnnnnnnnnnnnnnnnnnnnnnnnnnnnnnnnnnnnnnnnnnnnnnnnnnnnnnnnnnnnnnnnnnnnnnnnnnnnnnnnnnnnnnnnnnnnnnnnnnnnnnnnnnnnnnnnnnnnnnnnnnnnnnnnnnnnnnnnnnnnnnnnnnnnnnnnnnnnnnnnnnnnnnnnnnnnnnnnnnnnnnnnnnnnnnnnnnnnnnnnnnnnnnnnnnnnnnnnnnnnnnnnnnnnnnnnnnnnnnnnnnnnnnnnnnnnnnnnnnnnnnnnnnnnnnnnnnnnnnnnnnnnnnnnnnnnnnnnnnnnnnnnnnnnnnnnnnnnnnnnnnnnnnnnnnnnnnnnnnnnnnnnnnnnnnnnnnnnnnnnnnnnnnnnnnnnnnnnnnnnnnnnnnnnnnnnnnnnnnnnnnnnnnnnnnnnnnnnnnnnnnnnnnnnnnnnnnnnnnnnnnnnnnnnnnnnnnnnnnnnnnnnnnnnnnnnnnnnnnnnnnnnnnnnnnnnnnnnnnnnnnnnnnnnnnnnnnnnnnnnnnnnnnnnnnnnnnnnnnnnnnnnnnnnnnnnnnnnnnnnnnnnnnnnnnnnnnnnnnnnnnnnnnnnnnnnnnnnnnnnnnnnnnnnnnnnnnnnnnnnnnnnnnnnnnnnnnnnnnnnnnnnnnnnnnnnnnnnnnnnnnnnnnnnnnnnnnnnnnnnnnnnnnnnnnnnnnnnnnnnnnnnnnnnnnnnnnnnnnnnnnnnnnnnnnnnnnnnnnnnnnnnnnnnnnnnnnnnnnnnnnnnnnnnnnnnnnnnnnnnnnnnnnnnnnnnnnnnnnnnnnnnnnnnnnnnnnnnnnnnnnnnnnnnnnnnnnnnnnnnnnnnnnnnnnnnnnnnnnnnnnnnnnnnnnnnnnnnnnnnnnnnnnnnnnnnnnnnnnnnnnnnnnnnnnnnnnnnnnnnnnnnnnnnnnnnnnnnnnnnnnnnnnnnnnnnnnnnnnnnnnnnnnnnnnnnnnnnnnnnnnnnnnnnnnnnnnnnnnnnnnnnnnnnnnnnnnnnnnnnnnnnnnnnnnnnnnnnnnnnnnnnnnnnnnnnnnnnnnnnnnnnnnnnnnnnnnnnnnnnnnnnnnnnnnnnnnnnnnnnnnnnnnnnnnnnnnnnnnnnnnnnnnnnnnnnnnnnnnnnnnnnnnnnnnnnnnnnnnnnnnnnnnnnnnnnnnnnnnnnnnnnnnnnnnnnnnnnnnnnnnnnnnnnnnnnnnnnnnnnnnnnnnnnnnnnnnnnnnnnnnnnnnnnnnnnnnnnnnnnnnnnnnnnnnnnnnnnnnnnnnnnnnnnnnnnnnnnnnnnnnnnnnnnnnnnnnnnnnnnnnnnnnnnnnnnnnnnnnnnnnnnnnnnnnnnnnnnnnnnnnnnnnnnnnnnnnnnnnnnnnnnnnnnnnnnnnnnnnnnnnnnnnnnnnnnnnnnnnnnnnnnnnnnnnnnnnnnnnnnnnnnnnnnnnnnnnnnnnnnnnnnnnnnnnnnnnnnnnnnnnnnnnnnnnnnnnnnnnnnnnnnnnnnnnnnnnnnnnnnnnnnnnnnnnnnnnnnnnnnnnnnnnnnnnnnnnnnnnnnnnnnnnnnnnnnnnnnnnnnnnnnnnnnnnnnnnnnnnnnnnnnnnnnnnnnnnnnnnnnnnnnnnnnnnnnnnnnnnnnnnnnnnnnnnnnnnnnnnnnnnnnnnnnnnnnnnnnnnnnnnnnnnnnnnnnnnnnnnnnnnnnnnnnnnnnnnnnnnnnnnnnnnnnnnnnnnnnnnnnnnnnnnnnnnnnnnnnnnnnnnnnnnnnnnnnnnnnnnnnnnnnnnnnnnnnnnnnnnnnnnnnnnnnnnnnnnnnnnnnnnnnnnnnnnnnnnnnnnnnnnnnnnnnnnnnnnnnnnnnnnnnnnnnnnnnnnnnnnnnnnnnnnnnnnnnnnnnnnnnnnnnnnnnnnnnnnnnnnnnnnnnnnnnnnnnnnnnnnnnnnnnnnnnnnnnnnnnnnnnnnnnnnnnnnnnnnnnnnnnnnnnnnnnnnnnnnnnnnnnnnnnnnnnnnnnnnnnnnnnnnnnnnnnnnnnnnnnnnnnnnnnnnnnnnnnnnnnnnnnnnnnnnnnnnnnnnnnnnnnnnnnnnnnnnnnnnnnnnnnnnnnnnnnnnnnnnnnnnnnnnnnnnnnnnnnnnnnnnnnnnnnnnnnnnnnnnnnnnnnnnnnnnnnnnnnnnnnnnnnnnnnnnnnnnnnnnnnnnnnnnnnnnnnnnnnnnnnnnnnnnnnnnnnnnnnnnnnnnnnnnnnnnnnnnnnnnnnnnnnnnnnnnnnnnnnnnnnnnnnnnnnnnnnnnnnnnnnnnnnnnnnnnnnnnnnnnnnnnnnnnnnnnnnnnnnnnnnnnnnnnnnnnnnnnnnnnnnnnnnnnnnnnnnnnnnnnnnnnnnnnnnnnnnnnnnnnnnnnnnnnnnnnnnnnnnnnnnnnnnnnnnnnnnnnnnnnnnnnnnnnnnnnnnnnnnnnnnnnnnnnnnnnnnnnnnnnnnnnnnnnnnnnnnnnnnnnnnnnnnnnnnnnnnnnnnnnnnnnnnnnnnnnnnnnnnnnnnnnnnnnnnnnnnnnnnnnnnnnnnnnnnnnnnnnnnnnnnnnnnnnnnnnnnnnnnnnnnnnnnnnnnnnnnnnnnnnnnnnnnnnnnnnnnnnnnnnnnnnnnnnnnnnnnnnnnnnnnnnnnnnnnnnnnnnnnnnnnnnnnnnnnnnnnnnnnnnnnnnnnnnnnnnnnnnnnnnnnnnnnnnnnnnnnnnnnnnnnnnnnnnnnnnnnnnnnnnnnnnnnnnnnnnnnnnnnnnnnnnnnnnnnnnnnnnnnnnnnnnnnnnnnnnnnnnnnnnnnnnnnnnnnnnnnnnnnnnnnnnnnnnnnnnnnnnnnnnnnnnnnnnnnnnnnnnnnnnnnnnnnnnnnnnnnnnnnnnnnnnnnnnnnnnnnnnnnnnnnnnnnnnnnnnnnnnnnnnnnnnnnnnnnnnnnnnnnnnnnnnnnnnnnnnnnnnnnnnnnnnnnnnnnnnnnnnnnnnnnnnnnnnnnnnnnnnnnnnnnnnnnnnnnnnnnnnnnnnnnnnnnnnnnnnnnnnnnnnnnnnnnnnnnnnnnnnnnnnnnnnnnnnnnnnnnnnnnnnnnnnnnnnnnnnnnnnnnnnnnnnnnnnnnnnnnnnnnnnnnnnnnnnnnnnnnnnnnnnnnnnnnnnnnnnnnnnnnnnnnnnnnnnnnnnnnnnnnnnnnnnnnnnnnnnnnnnnnnnnnnnnnnnnnnnnnnnnnnnnnnnnnnnnnnnnnnnnnnnnnnnnnnnnnnnnnnnnnnnnnnnnnnnnnnnnnnnnnnnnnnnnnnnnnnnnnnnnnnnnnnnnnnnnnnnnnnnnnnnnnnnnnnnnnnnnnnnnnnnnnnnnnnnnnnnnnnnnnnnnnnnnnnnnnnnnnnnnnnnnnnnnnnnnnnnnnnnnnnnnnnnnnnnnnnnnnnnnnnnnnnnnnnnnnnnnnnnnnnnnnnnnnnnnnnnnnnnnnnnnnnnnnnnnnnnnnnnnnnnnnnnnnnnnnnnnnnnnnnnnnnnnnnnnnnnnnnnnnnnnnnnnnnnnnnnnnnnnnnnnnnnnnnnnnnnnnnnnnnnnnnnnnnnnnnnnnnnnnnnnnnnnnnnnnnnnnnnnnnnnnnnnnnnnnnnnnnnnnnnnnnnnnnnnnnnnnnnnnnnnnnnnnnnnnnnnnnnnnnnnnnnnnnnnnnnnnnnnnnnnnnnnnnnnnnnnnnnnnnnnnnnnnnnnnnnnnnnnnnnnnnnnnnnnnnnnnnnnnnnnnnnnnnnnnnnnnnnnnnnnnnnnnnnnnnnnnnnnnnnnnnnnnnnnnnnnnnnnnnnnnnnnnnnnnnnnnnnnnnnnnnnnnnnnnnnnnnnnnnnnnnnnnnnnnnnnnnnnnnnnnnnnnnnnnnnnnnnnnnnnnnnnnnnnnnnnnnnnnnnnnnnnnnnnnnnnnnnnnnnnnnnnnnnnnnnnnnnnnnnnnnnnnnnnnnnnnnnnnnnnnnnnnnnnnnnnnnnnnnnnnnnnnnnnnnnnnnnnnnnnnnnnnnnnnnnnnnnnnnnnnnnnnnnnnnnnnnnnnnnnnnnnnnnnnnnnnnnnnnnnnnnnnnnnnnnnnnnnnnnnnnnnnnnnnnnnnnnnnnnnnnnnnnnnnnnnnnnnnnnnnnnnnnnnnnnnnnnnnnnnnnnnnnnnnnnnnnnnnnnnnnnnnnnnnnnnnnnnnnnnnnnnnnnnnnnnnnnnnnnnnnnnnnnnnnnnnnnnnnnnnnnnnnnnnnnnnnnnnnnnnnnnnnnnnnnnnnnnnnnnnnnnnnnnnnnnnnnnnnnnnnnnnnnnnnnnnnnnnnnnnnnnnnnnnnnnnnnnnnnnnnnnnnnnnnnnnnnnnnnnnnnnnnnnnnnnnnnnnnnnnnnnnnnnnnnnnnnnnnnnnnnnnnnnnnnnnnnnnnnnnnnnnnnnnnnnnnnnnnnnnnnnnnnnnnnnnnnnnnnnnnnnnnnnnnnnnnnnnnnnnnnnnnnnnnnnnnnnnnnnnnnnnnnnnnnnnnnnnnnnnnnnnnnnnnnnnnnnnnnnnnnnnnnnnnnnnnnnnnnnnnnnnnnnnnnnnnnnnnnnnnnnnnnnnnnnnnnnnnnnnnnnnnnnnnnnnnnnnnnnnnnnnnnnnnnnnnnnnnnnnnnnnnnnnnnnnnnnnnnnnnnnnnnnnnnnnnnnnnnnnnnnnnnnnnnnnnnnnnnnnnnnnnnnnnnnnnnnnnnnnnnnnnnnnnnnnnnnnnnnnnnnnnnnnnnnnnnnnnnnnnnnnnnnnnnnnnnnnnnnnnnnnnnnnnnnnnnnnnnnnnnnnnnnnnnnnnnnnnnnnnnnnnnnnnnnnnnnnnnnnnnnnnnnnnnnnnnnnnnnnnnnnnnnnnnnnnnnnnnnnnnnnnnnnnnnnnnnnnnnnnnnnnnnnnnnnnnnnnnnnnnnnnnnnnnnnnnnnnnnnnnnnnnnnnnnnnnnnnnnnnnnnnnnnnnnnnnnnnnnnnnnnnnnnnnnnnnnnnnnnnnnnnnnnnnnnnnnnnnnnnnnnnnnnnnnnnnnnnnnnnnnnnnnnnnnnnnnnnnnnnnnnnnnnnnnnnnnnnnnnnnnnnnnnnnnnnnnnnnnnnnnnnnnnnnnnnnnnnnnnnnnnnnnnnnnnnnnnnnnnnnnnnnnnnnnnnnnnnnnnnnnnnnnnnnnnnnnnnnnnnnnnnnnnnnnnnnnnnnnnnnnnnnnnnnnnnnnnnnnnnnnnnnnnnnnnnnnnnnnnnnnnnnnnnnnnnnnnnnnnnnnnnnnnnnnnnnnnnnnnnnnnnnnnnnnnnnnnnnnnnnnnnnnnnnnnnnnnnnnnnnnnnnnnnnnnnnnnnnnnnnnnnnnnnnnnnnnnnnnnnnnnnnnnnnnnnnnnnnnnnnnnnnnnnnnnnnnnnnnnnnnnnnnnnnnnnnnnnnnnnnnnnnnnnnnnnnnnnnnnnnnnnnnnnnnnnnnnnnnnnnnnnnnnnnnnnnnnnnnnnnnnnnnnnnnnnnnnnnnnnnnnnnnnnnnnnnnnnnnnnnnnnnnnnnnnnnnnnnnnnnnnnnnnnnnnnnnnnnnnnnnnnnnnnnnnnnnnnnnnnnnnnnnnnnnnnnnnnnnnnnnnnnnnnnnnnnnnnnnnnnnnnnnnnnnnnnnnnnnnnnnnnnnnnnnnnnnnnnnnnnnnnnnnnnnnnnnnnnnnnnnnnnnnnnnnnnnnnnnnnnnnnnnnnnnnnnnnnnnnnnnnnnnnnnnnnnnnnnnnnnnnnnnnnnnnnnnnnnnnnnnnnnnnnnnnnnnnnnnnnnnnnnnnnnnnnnnnnnnnnnnnnnnnnnnnnnnnnnnnnnnnnnnnnnnnnnnnnnnnnnnnnnnnnnnnnnnnnnnnnnnnnnnnnnnnnnnnnnnnnnnnnnnnnnnnnnnnnnnnnnnnnnnnnnnnnnnnnnnnnnnnnnnnnnnnnnnnnnnnnnnnnnnnnnnnnnnnnnnnnnnnnnnnnnnnnnnnnnnnnnnnnnnnnnnnnnnnnnnnnnnnnnnnnnnnnnnnnnnnnnnnnnnnnnnnnnnnnnnnnnnnnnnnnnnnnnnnnnnnnnnnnnnnnnnnnnnnnnnnnnnnnnnnnnnnnnnnnnnnnnnnnnnnnnnnnnnnnnnnnnnnnnnnnnnnnnnnnnnnnnnnnnnnnnnnnnnnnnnnnnnnnnnnnnnnnnnnnnnnnnnnnnnnnnnnnnnnnnnnnnnnnnnnnnnnnnnnnnnnnnnnnnnnnnnnnnnnnnnnnnnnnnnnnnnnnnnnnnnnnnnnnnnnnnnnnnnnnnnnnnnnnnnnnnnnnnnnnnnnnnnnnnnnnnnnnnnnnnnnnnnnnnnnnnnnnnnnnnnnnnnnnnnnnnnnnnnnnnnnnnnnnnnnnnnnnnnnnnnnnnnnnnnnnnnnnnnnnnnnnnnnnnnnnnnnnnnnnnnnnnnnnnnnnnnnnnnnnnnnnnnnnnnnnnnnnnnnnnnnnnnnnnnnnnnnnnnnnnnnnnnnnnnnnnnnnnnnnnnnnnnnnnnnnnnnnnnnnnnnnnnnnnnnnnnnnnnnnnnnnnnnnnnnnnnnnnnnnnnnnnnnnnnnnnnnnnnnnnnnnnnnnnnnnnnnnnnnnnnnnnnnnnnnnnnnnnnnnnnnnnnnnnnnnnnnnnnnnnnnnnnnnnnnnnnnnnnnnnnnnnnnnnnnnnnnnnnnnnnnnnnnnnnnnnnnnnnnnnnnnnnnnnnnnnnnnnnnnnnnnnnnnnnnnnnnnnnnnnnnnnnnnnnnnnnnnnnnnnnnnnnnnnnnnnnnnnnnnnnnnnnnnnnnnnnnnnnnnnnnnnnnnnnnnnnnnnnnnnnnnnnnnnnnnnnnnnnnnnnnnnnnnnnnnnnnnnnnnnnnnnnnnnnnnnnnnnnnnnnnnnnnnnnnnnnnnnnnnnnnnnnnnnnnnnnnnnnnnnnnnnnnnnnnnnnnnnnnnnnnnnnnnnnnnnnnnnnnnnnnnnnnnnnnnnnnnnnnnnnnnnnnnnnnnnnnnnnnnnnnnnnnnnnnnnnnnnnnnnnnnnnnnnnnnnnnnnnnnnnnnnnnnnnnnnnnnnnnnnnnnnnnnnnnnnnnnnnnnnnnnnnnnnnnnnnnnnnnnnnnnnnnnnnnnnnnnnnnnnnnnnnnnnnnnnnnnnnnnnnnnnnnnnnnnnnnnnnnnnnnnnnnnnnnnnnnnnnnnnnnnnnnnnnnnnnnnnnnnnnnnnnnnnnnnnnnnnnnnnnnnnnnnnnnnnnnnnnnnnnnnnnnnnnnnnnnnnnnnnnnnnnnnnnnnnnnnnnnnnnnnnnnnnnnnnnnnnnnnnnnnnnnnnnnnnnnnnnnnnnnnnnnnnnnnnnnnnnnnnnnnnnnnnnnnnnnnnnnnnnnnnnnnnnnnnnnnnnnnnnnnnnnnnnnnnnnnnnnnnnnnnnnnnnnnnnnnnnnnnnnnnnnnnnnnnnnnnnnnnnnnnnnnnnnnnnnnnnnnnnnnnnnnnnnnnnnnnnnnnnnnnnnnnnnnnnnnnnnnnnnnnnnnnnnnnnnnnnnnnnnnnnnnnnnnnnnnnnnnnnnnnnnnnnnnnnnnnnnnnnnnnnnnnnnnnnnnnnnnnnnnnnnnnnnnnnnnnnnnnnnnnnnnnnnnnnnnnnnnnnnnnnnnnnnnnnnnnnnnnnnnnnnnnnnnnnnnnnnnnnnnnnnnnnnnnnnnnnnnnnnnnnnnnnnnnnnnnnnnnnnnnnnnnnnnnnnnnnnnnnnnnnnnnnnnnnnnnnnnnnnnnnnnnnnnnnnnnnnnnnnnnnnnnnnnnnnnnnnnnnnnnnnnnnnnnnnnnnnnnnnnnnnnnnnnnnnnnnnnnnnnnnnnnnnnnnnnnnnnnnnnnnnnnnnnnnnnnnnnnnnnnnnnnnnnnnnnnnnnnnnnnnnnnnnnnnnnnnnnnnnnnnnnnnnnnnnnnnnnnnnnnnnnnnnnnnnnnnnnnnnnnnnnnnnnnnnnnnnnnnnnnnnnnnnnnnnnnnnnnnnnnnnnnnnnnnnnnnnnnnnnnnnnnnnnnnnnnnnnnnnnnnnnnnnnnnnnnnnnnnnnnnnnnnnnnnnnnnnnnnnnnnnnnnnnnnnnnnnnnnnnnnnnnnnnnnnnnnnnnnnnnnnnnnnnnnnnnnnnnnnnnnnnnnnnnnnnnnnnnnnnnnnnnnnnnnnnnnnnnnnnnnnnnnnnnnnnnnnnnnnnnnnnnnnnnnnnnnnnnnnnnnnnnnnnnnnnnnnnnnnnnnnnnnnnnnnnnnnnnnnnnnnnnnnnnnnnnnnnnnnnnnnnnnnnnnnnnnnnnnnnnnnnnnnnnnnnnnnnnnnnnnnnnnnnnnnnnnnnnnnnnnnnnnnnnnnnnnnnnnnnnnnnnnnnnnnnnnnnnnnnnnnnnnnnnnnnnnnnnnnnnnnnnnnnnnnnnnnnnnnnnnnnnnnnnnnnnnnnnnnnnnnnnnnnnnnnnnnnnnnnnnnnnnnnnnnnnnnnnnnnnnnnnnnnnnnnnnnnnnnnnnnnnnnnnnnnnnnnnnnnnnnnnnnnnnnnnnnnnnnnnnnnnnnnnnnnnnnnnnnnnnnnnnnnnnnnnnnnnnnnnnnnnnnnnnnnnnnnnnnnnnnnnnnnnnnnnnnnnnnnnnnnnnnnnnnnnnnnnnnnnnnnnnnnnnnnnnnnnnnnnnnnnnnnnnnnnnnnnnnnnnnnnnnnnnnnnnnnnnnnnnnnnnnnnnnnnnnnnnnnnnnnnnnnnnnnnnnnnnnnnnnnnnnnnnnnnnnnnnnnnnnnnnnnnnnnnnnnnnnnnnnnnnnnnnnnnnnnnnnnnnnnnnnnnnnnnnnnnnnnnnnnnnnnnnnnnnnnnnnnnnnnnnnnnnnnnnnnnnnnnnnnnnnnnnnnnnnnnnnnnnnnnnnnnnnnnnnnnnnnnnnnnnnnnnnnnnnnnnnnnnnnnnnnnnnnnnnnnnnnnnnnnnnnnnnnnnnnnnnnnnnnnnnnnnnnnnnnnnnnnnnnnnnnnnnnnnnnnnnnnnnnnnnnnnnnnnnnnnnnnnnnnnnnnnnnnnnnnnnnnnnnnnnnnnnnnnnnnnnnnnnnnnnnnnnnnnnnnnnnnnnnnnnnnnnnnnnnnnnnnnnnnnnnnnnnnnnnnnnnnnnnnnnnnnnnnnnnnnnnnnnnnnnnnnnnnnnnnnnnnnnnnnnnnnnnnnnnnnnnnnnnnnnnnnnnnnnnnnnnnnnnnnnnnnnnnnnnnnnnnnnnnnnnnnnnnnnnnnnnnnnnnnnnnnnnnnnnnnnnnnnnnnnnnnnnnnnnnnnnnnnnnnnnnnnnnnnnnnnnnnnnnnnnnnnnnnnnnnnnnnnnnnnnnnnnnnnnnnnnnnnnnnnnnnnnnnnnnnnnnnnnnnnnnnnnnnnnnnnnnnnnnnnnnnnnnnnnnnnnnnnnnnnnnnnnnnnnnnnnnnnnnnnnnnnnnnnnnnnnnnnnnnnnnnnnnnnnnnnnnnnnnnnnnnnnnnnnnnnnnnnnnnnnnnnnnnnnnnnnnnnnnnnnnnnnnnnnnnnnnnnnnnnnnnnnnnnnnnnnnnnnnnnnnnnnnnnnnnnnnnnnnnnnnnnnnnnnnnnnnnnnnnnnnnnnnnnnnnnnnnnnnnnnnnnnnnnnnnnnnnnnnnnnnnnnnnnnnnnnnnnnnnnnnnnnnnnnnnnnnnnnnnnnnnnnnnnnnnnnnnnnnnnnnnnnnnnnnnnnnnnnnnnnnnnnnnnnnnnnnnnnnnnnnnnnnnnnnnnnnnnnnnnnnnnnnnnnnnnnnnnnnnnnnnnnnnnnnnnnnnnnnnnnnnnnnnnnnnnnnnnnnnnnnnnnnnnnnnnnnnnnnnnnnnnnnnnnnnnnnnnnnnnnnnnnnnnnnnnnnnnnnnnnnnnnnnnnnnnnnnnnnnnnnnnnnnnnnnnnnnnnnnnnnnnnnnnnnnnnnnnnnnnnnnnnnnnnnnnnnnnnnnnnnnnnnnnnnnnnnnnnnnnnnnnnnnnnnnnnnnnnnnnnnnnnnnnnnnnnnnnnnnnnnnnnnnnnnnnnnnnnnnnnnnnnnnnnnnnnnnnnnnnnnnnnnnnnnnnnnnnnnnnnnnnnnnnnnnnnnnnnnnnnnnnnnnnnnnnnnnnnnnnnnnnnnnnnnnnnnnnnnnnnnnnnnnnnnnnnnnnnnnnnnnnnnnnnnnnnnnnnnnnnnnnnnnnnnnnnnnnnnnnnnnnnnnnnnnnnnnnnnnnnnnnnnnnnnnnnnnnnnnnnnnnnnnnnnnnnnnnnnnnnnnnnnnnnnnnnnnnnnnnnnnnnnnnnnnnnnnnnnnnnnnnnnnnnnnnnnnnnnnnnnnnnnnnnnnnnnnnnnnnnnnnnnnnnnnnnnnnnnnnnnnnnnnnnnnnnnnnnnnnnnnnnnnnnnnnnnnnnnnnnnnnnnnnnnnnnnnnnnnnnnnnnnnnnnnnnnnnnnnnnnnnnnnnnnnnnnnnnnnnnnnnnnnnnnnnnnnnnnnnnnnnnnnnnnnnnnnnnnnnnnnnnnnnnnnnnnnnnnnnnnnnnnnnnnnnnnnnnnnnnnnnnnnnnnnnnnnnnnnnnnnnnnnnnnnnnnnnnnnnnnnnnnnnnnnnnnnnnnnnnnnnnnnnnnnnnnnnnnnnnnnnnnnnnnnnnnnnnnnnnnnnnnnnnnnnnnnnnnnnnnnnnnnnnnnnnnnnnnnnnnnnnnnnnnnnnnnnnnnnnnnnnnnnnnnnnnnnnnnnnnnnnnnnnnnnnnnnnnnnnnnnnnnnnnnnnnnnnnnnnnnnnnnnnnnnnnnnnnnnnnnnnnnnnnnnnnnnnnnnnnnnnnnnnnnnnnnnnnnnnnnnnnnnnnnnnnnnnnnnnnnnnnnnnnnnnnnnnnnnnnnnnnnnnnnnnnnnnnnnnnnnnnnnnnnnnnnnnnnnnnnnnnnnnnnnnnnnnnnnnnnnnnnnnnnnnnnnnnnnnnnnnnnnnnnnnnnnnnnnnnnnnnnnnnnnnnnnnnnnnnnnnnnnnnnnnnnnnnnnnnnnnnnnnnnnnnnnnnnnnnnnnnnnnnnnnnnnnnnnnnnnnnnnnnnnnnnnnnnnnnnnnnnnnnnnnnnnnnnnnnnnnnnnnnnnnnnnnnnnnnnnnnnnnnnnnnnnnnnnnnnnnnnnnnnnnnnnnnnnnnnnnnnnnnnnnnnnnnnnnnnnnnnnnnnnnnnnnnnnnnnnnnnnnnnnnnnnnnnnnnnnnnnnnnnnnnnnnnnnnnnnnnnnnnnnnnnnnnnnnnnnnnnnnnnnnnnnnnnnnnnnnnnnnnnnnnnnnnnnnnnnnnnnnnnnnnnnnnnnnnnnnnnnnnnnnnnnnnnnnnnnnnnnnnnnnnnnnnnnnnnnnnnnnnnnnnnnnnnnnnnnnnnnnnnnnnnnnnnnnnnnnnnnnnnnnnnnnnnnnnnnnnnnnnnnnnnnnnnnnnnnnnnnnnnnnnnnnnnnnnnnnnnnnnnnnnnnnnnnnnnnnnnnnnnnnnnnnnnnnnnnnnnnnnnnnnnnnnnnnnnnnnnnnnnnnnnnnnnnnnnnnnnnnnnnnnnnnnnnnnnnnnnnnnnnnnnnnnnnnnnnnnnnnnnnnnnnnnnnnnnnnnnnnnnnnnnnnnnnnnnnnnnnnnnnnnnnnnnnnnnnnnnnnnnnnnnnnnnnnnnnnnnnnnnnnnnnnnnnnnnnnnnnnnnnnnnnnnnnnnnnnnnnnnnnnnnnnnnnnnnnnnnnnnnnnnnnnnnnnnnnnnnnnnnnnnnnnnnnnnnnnnnnnnnnnnnnnnnnnnnnnnnnnnnnnnnnnnnnnnnnnnnnnnnnnnnnnnnnnnnnnnnnnnnnnnnnnnnnnnnnnnnnnnnnnnnnnnnnnnnnnnnnnnnnnnnnnnnnnnnnnnnnnnnnnnnnnnnnnnnnnnnnnnnnnnnnnnnnnnnnnnnnnnnnnnnnnnnnnnnnnnnnnnnnnnnnnnnnnnnnnnnnnnnnnnnnnnnnnnnnnnnnnnnnnnnnnnnnnnnnnnnnnnnnnnnnnnnnnnnnnnnnnnnnnnnnnnnnnnnnnnnnnnnnnnnnnnnnnnnnnnnnnnnnnnnnnnnnnnnnnnnnnnnnnnnnnnnnnnnnnnnnnnnnnnnnnnnnnnnnnnnnnnnnnnnnnnnnnnnnnnnnnnnnnnnnnnnnnnnnnnnnnnnnnnnnnnnnnnnnnnnnnnnnnnnnnnnnnnnnnnnnnnnnnnnnnnnnnnnnnnnnnnnnnnnnnnnnnnnnnnnnnnnnnnnnnnnnnnnnnnnnnnnnnnnnnnnnnnnnnnnnnnnnnnnnnnnnnnnnnnnnnnnnnnnnnnnnnnnnnnnnnnnnnnnnnnnnnnnnnnnnnnnnnnnnnnnnnnnnnnnnnnnnnnnnnnnnnnnnnnnnnnnnnnnnnnnnnnnnnnnnnnnnnnnnnnnnnnnnnnnnnnnnnnnnnnnnnnnnnnnnnnnnnnnnnnnnnnnnnnnnnnnnnnnnnnnnnnnnnnnnnnnnnnnnnnnnnnnnnnnnnnnnnnnnnnnnnnnnnnnnnnnnnnnnnnnnnnnnnnnnnnnnnnnnnnnnnnnnnnnnnnnnnnnnnnnnnnnnnnnnnnnnnnnnnnnnnnnnnnnnnnnnnnnnnnnnnnnnnnnnnnnnnnnnnnnnnnnnnnnnnnnnnnnnnnnnnnnnnnnnnnnnnnnnnnnnnnnnnnnnnnnnnnnnnnnnnnnnnnnnnnnnnnnnnnnnnnnnnnnnnnnnnnnnnnnnnnnnnnnnnnnnnnnnnnnnnnnnnnnnnnnnnnnnnnnnnnnnnnnnnnnnnnnnnnnnnnnnnnnnnnnnnnnnnnnnnnnnnnnnnnnnnnnnnnnnnnnnnnnnnnnnnnnnnnnnnnnnnnnnnnnnnnnnnnnnnnnnnnnnnnnnnnnnnnnnnnnnnnnnnnnnnnnnnnnnnnnnnnnnnnnnnnnnnnnnnnnnnnnnnnnnnnnnnnnnnnnnnnnnnnnnnnnnnnnnnnnnnnnnnnnnnnnnnnnnnnnnnnnnnnnnnnnnnnnnnnnnnnnnnnnnnnnnnnnnnnnnnnnnnnnnnnnnnnnnnnnnnnnnnnnnnnnnnnnnnnnnnnnnnnnnnnnnnnnnnnnnnnnnnnnnnnnnnnnnnnnnnnnnnnnnnnnnnnnnnnnnnnnnnnnnnnnnnnnnnnnnnnnnnnnnnnnnnnnnnnnnnnnnnnnnnnnnnnnnnnnnnnnnnnnnnnnnnnnnnnnnnnnnnnnnnnnnnnnnnnnnnnnnnnnnnnnnnnnnnnnnnnnnnnnnnnnnnnnnnnnnnnnnnnnnnnnnnnnnnnnnnnnnnnnnnnnnnnnnnnnnnnnnnnnnnnnnnnnnnnnnnnnnnnnnnnnnnnnnnnnnnnnnnnnnnnnnnnnnnnnnnnnnnnnnnnnnnnnnnnnnnnnnnnnnnnnnnnnnnnnnnnnnnnnnnnnnnnnnnnnnnnnnnnnnnnnnnnnnnnnnnnnnnnnnnnnnnnnnnnnnnnnnnnnnnnnnnnnnnnnnnnnnnnnnnnnnnnnnnnnnnnnnnnnnnnnnnnnnnnnnnnnnnnnnnnnnnnnnnnnnnnnnnnnnnnnnnnnnnnnnnnnnnnnnnnnnnnnnnnnnnnnnnnnnnnnnnnnnnnnnnnnnnnnnnnnnnnnnnnnnnnnnnnnnnnnnnnnnnnnnnnnnnnnnnnnnnnnnnnnnnnnnnnnnnnnnnnnnnnnnnnnnnnnnnnnnnnnnnnnnnnnnnnnnnnnnnnnnnnnnnnnnnnnnnnnnnnnnnnnnnnnnnnnnnnnnnnnnnnnnnnnnnnnnnnnnnnnnnnnnnnnnnnnnnnnnnnnnnnnnnnnnnnnnnnnnnnnnnnnnnnnnnnnnnnnnnnnnnnnnnnnnnnnnnnnnnnnnnnnnnnnnnnnnnnnnnnnnnnnnnnnnnnnnnnnnnnnnnnnnnnnnnnnnnnnnnnnnnnnnnnnnnnnnnnnnnnnnnnnnnnnnnnnnnnnnnnnnnnnnnnnnnnnnnnnnnnnnnnnnnnnnnnnnnnnnnnnnnnnnnnnnnnnnnnnnnnnnnnnnnnnnnnnnnnnnnnnnnnnnnnnnnnnnnnnnnnnnnnnnnnnnnnnnnnnnnnnnnnnnnnnnnnnnnnnnnnnnnnnnnnnnnnnnnnnnnnnnnnnnnnnnnnnnnnnnnnnnnnnnnnnnnnnnnnnnnnnnnnnnnnnnnnnnnnnnnnnnnnnnnnnnnnnnnnnnnnnnnnnnnnnnnnnnnnnnnnnnnnnnnnnnnnnnnnnnnnnnnnnnnnnnnnnnnnnnnnnnnnnnnnnnnnnnnnnnnnnnnnnnnnnnnnnnnnnnnnnnnnnnnnnnnnnnnnnnnnnnnnnnnnnnnnnnnnnnnnnnnnnnnnnnnnnnnnnnnnnnnnnnnnnnnnnnnnnnnnnnnnnnnnnnnnnnnnnnnnnnnnnnnnnnnnnnnnnnnnnnnnnnnnnnnnnnnnnnnnnnnnnnnnnnnnnnnnnnnnnnnnnnnnnnnnnnnnnnnnnnnnnnnnnnnnnnnnnnnnnnnnnnnnnnnnnnnnnnnnnnnnnnnnnnnnnnnnnnnnnnnnnnnnnnnnnnnnnnnnnnnnnnnnnnnnnnnnnnnnnnnnnnnnnnnnnnnnnnnnnnnnnnnnnnnnnnnnnnnnnnnnnnnnnnnnnnnnnnnnnnnnnnnnnnnnnnnnnnnnnnnnnnnnnnnnnnnnnnnnnnnnnnnnnnnnnnnnnnnnnnnnnnnnnnnnnnnnnnnnnnnnnnnnnnnnnnnnnnnnnnnnnnnnnnnnnnnnnnnnnnnnnnnnnnnnnnnnnnnnnnnnnnnnnnnnnnnnnnnnnnnnnnnnnnnnnnnnnnnnnnnnnnnnnnnnnnnnnnnnnnnnnnnnnnnnnnnnnnnnnnnnnnnnnnnnnnnnnnnnnnnnnnnnnnnnnnnnnnnnnnnnnnnnnnnnnnnnnnnnnnnnnnnnnnnnnnnnnnnnnnnnnnnnnnnnnnnnnnnnnnnnnnnnnnnnnnnnnnnnnnnnnnnnnnnnnnnnnnnnnnnnnnnnnnnnnnnnnnnnnnnnnnnnnnnnnnnnnnnnnnnnnnnnnnnnnnnnnnnnnnnnnnnnnnnnnnnnnnnnnnnnnnnnnnnnnnnnnnnnnnnnnnnnnnnnnnnnnnnnnnnnnnnnnnnnnnnnnnnnnnnnnnnnnnnnnnnnnnnnnnnnnnnnnnnnnnnnnnnnnnnnnnnnnnnnnnnnnnnnnnnnnnnnnnnnnnnnnnnnnnnnnnnnnnnnnnnnnnnnnnnnnnnnnnnnnnnnnnnnnnnnnnnnnnnnnnnnnnnnnnnnnnnnnnnnnnnnnnnnnnnnnnnnnnnnnnnnnnnnnnnnnnnnnnnnnnnnnnnnnnnnnnnnnnnnnnnnnnnnnnnnnnnnnnnnnnnnnnnnnnnnnnnnnnnnnnnnnnnnnnnnnnnnnnnnnnnnnnnnnnnnnnnnnnnnnnnnnnnnnnnnnnnnnnnnnnnnnnnnnnnnnnnnnnnnnnnnnnnnnnnnnnnnnnnnnnnnnnnnnnnnnnnnnnnnnnnnnnnnnnnnnnnnnnnnnnnnnnnnnnnnnnnnnnnnnnnnnnnnnnnnnnnnnnnnnnnnnnnnnnnnnnnnnnnnnnnnnnnnnnnnnnnnnnnnnnnnnnnnnnnnnnnnnnnnnnnnnnnnnnnnnnnnnnnnnnnnnnnnnnnnnnnnnnnnnnnnnnnnnnnnnnnnnnnnnnnnnnnnnnnnnnnnnnnnnnnnnnnnnnnnnnnnnnnnnnnnnnnnnnnnnnnnnnnnnnnnnnnnnnnnnnnnnnnnnnnnnnnnnnnnnnnnnnnnnnnnnnnnnnnnnnnnnnnnnnnnnnnnnnnnnnnnnnnnnnnnnnnnnnnnnnnnnnnnnnnnnnnnnnnnnnnnnnnnnnnnnnnnnnnnnnnnnnnnnnnnnnnnnnnnnnnnnnnnnnnnnnnnnnnnnnnnnnnnnnnnnnnnnnnnnnnnnnnnnnnnnnnnnnnnnnnnnnnnnnnnnnnnnnnnnnnnnnnnnnnnnnnnnnnnnnnnnnnnnnnnnnnnnnnnnnnnnnnnnnnnnnnnnnnnnnnnnnnnnnnnnnnnnnnnnnnnnnnnnnnnnnnnnnnnnnnnnnnnnnnnnnnnnnnnnnnnnnnnnnnnnnnnnnnnnnnnnnnnnnnnnnnnnnnnnnnnnnnnnnnnnnnnnnnnnnnnnnnnnnnnnnnnnnnnnnnnnnnnnnnnnnnnnnnnnnnnnnnnnnnnnnnnnnnnnnnnnnnnnnnnnnnnnnnnnnnnnnnnnnnnnnnnnnnnnnnnnnnnnnnnnnnnnnnnnnnnnnnnnnnnnnnnnnnnnnnnnnnnnnnnnnnnnnnnnnnnnnnnnnnnnnnnnnnnnnnnnnnnnnnnnnnnnnnnnnnnnnnnnnnnnnnnnnnnnnnnnnnnnnnnnnnnnnnnnnnnnnnnnnnnnnnnnnnnnnnnnnnnnnnnnnnnnnnnnnnnnnnnnnnnnnnnnnnnnnnnnnnnnnnnnnnnnnnnnnnnnnnnnnnnnnnnnnnnnnnnnnnnnnnnnnnnnnnnnnnnnnnnnnnnnnnnnnnnnnnnnnnnnnnnnnnnnnnnnnnnnnnnnnnnnnnnnnnnnnnnnnnnnnnnnnnnnnnnnnnnnnnnnnnnnnnnnnnnnnnnnnnnnnnnnnnnnnnnnnnnnnnnnnnnnnnnnnnnnnnnnnnnnnnnnnnnnnnnnnnnnnnnnnnnnnnnnnnnnnnnnnnnnnnnnnnnnnnnnnnnnnnnnnnnnnnnnnnnnnnnnnnnnnnnnnnnnnnnnnnnnnnnnnnnnnnnnnnnnnnnnnnnnnnnnnnnnnnnnnnnnnnnnnnnnnnnnnnnnnnnnnnnnnnnnnnnnnnnnnnnnnnnnnnnnnnnnnnnnnnnnnnnnnnnnnnnnnnnnnnnnnnnnnnnnnnnnnnnnnnnnnnnnnnnnnnnnnnnnnnnnnnnnnnnnnnnnnnnnnnnnnnnnnnnnnnnnnnnnnnnnnnnnnnnnnnnnnnnnnnnnnnnnnnnnnnnnnnnnnnnnnnnnnnnnnnnnnnnnnnnnnnnnnnnnnnnnnnnnnnnnnnnnnnnnnnnnnnnnnnnnnnnnnnnnnnnnnnnnnnnnnnnnnnnnnnnnnnnnnnnnnnnnnnnnnnnnnnnnnnnnnnnnnnnnnnnnnnnnnnnnnnnnnnnnnnnnnnnnnnnnnnnnnnnnnnnnnnnnnnnnnnnnnnnnnnnnnnnnnnnnnnnnnnnnnnnnnnnnnnnnnnnnnnnnnnnnnnnnnnnnnnnnnnnnnnnnnnnnnnnnnnnnnnnnnnnnnnnnnnnnnnnnnnnnnnnnnnnnnnnnnnnnnnnnnnnnnnnnnnnnnnnnnnnnnnnnnnnnnnnnnnnnnnnnnnnnnnnnnnnnnnnnnnnnnnnnnnnnnnnnnnnnnnnnnnnnnnnnnnnnnnnnnnnnnnnnnnnnnnnnnnnnnnnnnnnnnnnnnnnnnnnnnnnnnnnnnnnnnnnnnnnnnnnnnnnnnnnnnnnnnnnnnnnnnnnnnnnnnnnnnnnnnnnnnnnnnnnnnnnnnnnnnnnnnnnnnnnnnnnnnnnnnnnnnnnnnnnnnnnnnnnnnnnnnnnnnnnnnnnnnnnnnnnnnnnnnnnnnnnnnnnnnnnnnnnnnnnnnnnnnnnnnnnnnnnnnnnnnnnnnnnnnnnnnnnnnnnnnnnnnnnnnnnnnnnnnnnnnnnnnnnnnnnnnnnnnnnnnnnnnnnnnnnnnnnnnnnnnnnnnnnnnnnnnnnnnnnnnnnnnnnnnnnnnnnnnnnnnnnnnnnnnnnnnnnnnnnnnnnnnnnnnnnnnnnnnnnnnnnnnnnnnnnnnnnnnnnnnnnnnnnnnnnnnnnnnnnnnnnnnnnnnnnnnnnnnnnnnnnnnnnnnnnnnnnnnnnnnnnnnnnnnnnnnnnnnnnnnnnnnnnnnnnnnnnnnnnnnnnnnnnnnnnnnnnnnnnnnnnnnnnnnnnnnnnnnnnnnnnnnnnnnnnnnnnnnnnnnnnnnnnnnnnnnnnnnnnnnnnnnnnnnnnnnnnnnnnnnnnnnnnnnnnnnnnnnnnnnnnnnnnnnnnnnnnnnnnnnnnnnnnnnnnnnnnnnnnnnnnnnnnnnnnnnnnnnnnnnnnnnnnnnnnnnnnnnnnnnnnnnnnnnnnnnnnnnnnnnnnnnnnnnnnnnnnnnnnnnnnnnnnnnnnnnnnnnnnnnnnnnnnnnnnnnnnnnnnnnnnnnnnnnnnnnnnnnnnnnnnnnnnnnnnnnnnnnnnnnnnnnnnnnnnnnnnnnnnnnnnnnnnnnnnnnnnnnnnnnnnnnnnnnnnnnnnnnnnnnnnnnnnnnnnnnnnnnnnnnnnnnnnnnnnnnnnnnnnnnnnnnnnnnnnnnnnnnnnnnnnnnnnnnnnnnnnnnnnnnnnnnnnnnnnnnnnnnnnnnnnnnnnnnnnnnnnnnnnnnnnnnnnnnnnnnnnnnnnnnnnnnnnnnnnnnnnnnnnnnnnnnnnnnnnnnnnnnnnnnnnnnnnnnnnnnnnnnnnnnnnnnnnnnnnnnnnnnnnnnnnnnnnnnnnnnnnnnnnnnnnnnnnnnnnnnnnnnnnnnnnnnnnnnnnnnnnnnnnnnnnnnnnnnnnnnnnnnnnnnnnnnnnnnnnnnnnnnnnnnnnnnnnnnnnnnnnnnnnnnnnnnnnnnnnnnnnnnnnnnnnnnnnnnnnnnnnnnnnnnnnnnnnnnnnnnnnnnnnnnnnnnnnnnnnnnnnnnnnnnnnnnnnnnnnnnnnnnnnnnnnnnnnnnnnnnnnnnnnnnnnnnnnnnnnnnnnnnnnnnnnnnnnnnnnnnnnnnnnnnnnnnnnnnnnnnnnnnnnnnnnnnnnnnnnnnnnnnnnnnnnnnnnnnnnnnnnnnnnnnnnnnnnnnnnnnnnnnnnnnnnnnnnnnnnnnnnnnnnnnnnnnnnnnnnnnnnnnnnnnnnnnnnnnnnnnnnnnnnnnnnnnnnnnnnnnnnnnnnnnnnnnnnnnnnnnnnnnnnnnnnnnnnnnnnnnnnnnnnnnnnnnnnnnnnnnnnnnnnnnnnnnnnnnnnnnnnnnnnnnnnnnnnnnnnnnnnnnnnnnnnnnnnnnnnnnnnnnnnnnnnnnnnnnnnnnnnnnnnnnnnnnnnnnnnnnnnnnnnnnnnnnnnnnnnnnnnnnnnnnnnnnnnnnnnnnnnnnnnnnnnnnnnnnnnnnnnnnnnnnnnnnnnnnnnnnnnnnnnnnnnnnnnnnnnnnnnnnnnnnnnnnnnnnnnnnnnnnnnnnnnnnnnnnnnnnnnnnnnnnnnnnnnnnnnnnnnnnnnnnnnnnnnnnnnnnnnnnnnnnnnnnnnnnnnnnnnnnnnnnnnnnnnnnnnnnnnnnnnnnnnnnnnnnnnnnnnnnnnnnnnnnnnnnnnnnnnnnnnnnnnnnnnnnnnnnnnnnnnnnnnnnnnnnnnnnnnnnnnnnnnnnnnnnnnnnnnnnnnnnnnnnnnnnnnnnnnnnnnnnnnnnnnnnnnnnnnnnnnnnnnnnnnnnnnnnnnnnnnnnnnnnnnnnnnnnnnnnnnnnnnnnnnnnnnnnnnnnnnnnnnnnnnnnnnnnnnnnnnnnnnnnnnnnnnnnnnnnnnnnnnnnnnnnnnnnnnnnnnnnnnnnnnnnnnnnnnnnnnnnnnnnnnnnnnnnnnnnnnnnnnnnnnnnnnnnnnnnnnnnnnnnnnnnnnnnnnnnnnnnnnnnnnnnnnnnnnnnnnnnnnnnnnnnnnnnnnnnnnnnnnnnnnnnnnnnnnnnnnnnnnnnnnnnnnnnnnnnnnnnnnnnnnnnnnnnnnnnnnnnnnnnnnnnnnnnnnnnnnnnnnnnnnnnnnnnnnnnnnnnnnnnnnnnnnnnnnnnnnnnnnnnnnnnnnnnnnnnnnnnnnnnnnnnnnnnnnnnnnnnnnnnnnnnnnnnnnnnnnnnnnnnnnnnnnnnnnnnnnnnnnnnnnnnnnnnnnnnnnnnnnnnnnnnnnnnnnnnnnnnnnnnnnnnnnnnnnnnnnnnnnnnnnnnnnnnnnnnnnnnnnnnnnnnnnnnnnnnnnnnnnnnnnnnnnnnnnnnnnnnnnnnnnnnnnnnnnnnnnnnnnnnnnnnnnnnnnnnnnnnnnnnnnnnnnnnnnnnnnnnnnnnnnnnnnnnnnnnnnnnnnnnnnnnnnnnnnnnnnnnnnnnnnnnnnnnnnnnnnnnnnnnnnnnnnnnnnnnnnnnnnnnnnnnnnnnnnnnnnnnnnnnnnnnnnnnnnnnnnnnnnnnnnnnnnnnnnnnnnnnnnnnnnnnnnnnnnnnnnnnnnnnnnnnnnnnnnnnnnnnnnnnnnnnnnnnnnnnnnnnnnnnnnnnnnnnnnnnnnnnnnnnnnnnnnnnnnnnnnnnnnnnnnnnnnnnnnnnnnnnnnnnnnnnnnnnnnnnnnnnnnnnnnnnnnnnnnnnnnnnnnnnnnnnnnnnnnnnnnnnnnnnnnnnnnnnnnnnnnnnnnnnnnnnnnnnnnnnnnnnnnnnnnnnnnnnnnnnnnnnnnnnnnnnnnnnnnnnnnnnnnnnnnnnnnnnnnnnnnnnnnnnnnnnnnnnnnnnnnnnnnnnnnnnnnnnnnnnnnnnnnnnnnnnnnnnnnnnnnnnnnnnnnnnnnnnnnnnnnnnnnnnnnnnnnnnnnnnnnnnnnnnnnnnnnnnnnnnnnnnnnnnnnnnnnnnnnnnnnnnnnnnnnnnnnnnnnnnnnnnnnnnnnnnnnnnnnnnnnnnnnnnnnnnnnnnnnnnnnnnnnnnnnnnnnnnnnnnnnnnnnnnnnnnnnnnnnnnnnnnnnnnnnnnnnnnnnnnnnnnnnnnnnnnnnnnnnnnnnnnnnnnnnnnnnnnnnnnnnnnnnnnnnnnnnnnnnnnnnnnnnnnnnnnnnnnnnnnnnnnnnnnnnnnnnnnnnnnnnnnnnnnnnnnnnnnnnnnnnnnnnnnnnnnnnnnnnnnnnnnnnnnnnnnnnnnnnnnnnnnnnnnnnnnnnnnnnnnnnnnnnnnnnnnnnnnnnnnnnnnnnnnnnnnnnnnnnnnnnnnnnnnnnnnnnnnnnnnnnnnnnnnnnnnnnnnnnnnnnnnnnnnnnnnnnnnnnnnnnnnnnnnnnnnnnnnnnnnnnnnnnnnnnnnnnnnnnnnnnnnnnnnnnnnnnnnnnnnnnnnnnnnnnnnnnnnnnnnnnnnnnnnnnnnnnnnnnnnnnnnnnnnnnnnnnnnnnnnnnnnnnnnnnnnnnnnnnnnnnnnnnnnnnnnnnnnnnnnnnnnnnnnnnnnnnnnnnnnnnnnnnnnnnnnnnnnnnnnnnnnnnnnnnnnnnnnnnnnnnnnnnnnnnnnnnnnnnnnnnnnnnnnnnnnnnnnnnnnnnnnnnnnnnnnnnnnnnnnnnnnnnnnnnnnnnnnnnnnnnnnnnnnnnnnnnnnnnnnnnnnnnnnnnnnnnnnnnnnnnnnnnnnnnnnnnnnnnnnnnnnnnnnnnnnnnnnnnnnnnnnnnnnnnnnnnnnnnnnnnnnnnnnnnnnnnnnnnnnnnnnnnnnnnnnnnnnnnnnnnnnnnnnnnnnnnnnnnnnnnnnnnnnnnnnnnnnnnnnnnnnnnnnnnnnnnnnnnnnnnnnnnnnnnnnnnnnnnnnnnnnnnnnnnnnnnnnnnnnnnnnnnnnnnnnnnnnnnnnnnnnnnnnnnnnnnnnnnnnnnnnnnnnnnnnnnnnnnnnnnnnnnnnnnnnnnnnnnnnnnnnnnnnnnnnnnnnnnnnnnnnnnnnnnnnnnnnnnnnnnnnnnnnnnnnnnnnnnnnnnnnnnnnnnnnnnnnnnnnnnnnnnnnnnnnnnnnnnnnnnnnnnnnnnnnnnnnnnnnnnnnnnnnnnnnnnnnnnnnnnnnnnnnnnnnnnnnnnnnnnnnnnnnnnnnnnnnnnnnnnnnnnnnnnnnnnnnnnnnnnnnnnnnnnnnnnnnnnnnnnnnnnnnnnnnnnnnnnnnnnnnnnnnnnnnnnnnnnnnnnnnnnnnnnnnnnnnnnnnnnnnnnnnnnnnnnnnnnnnnnnnnnnnnnnnnnnnnnnnnnnnnnnnnnnnnnnnnnnnnnnnnnnnnnnnnnnnnnnnnnnnnnnnnnnnnnnnnnnnnnnnnnnnnnnnnnnnnnnnnnnnnnnnnnnnnnnnnnnnnnnnnnnnnnnnnnnnnnnnnnnnnnnnnnnnnnnnnnnnnnnnnnnnnnnnnnnnnnnnnnnnnnnnnnnnnnnnnnnnnnnnnnnnnnnnnnnnnnnnnnnnnnnnnnnnnnnnnnnnnnnnnnnnnnnnnnnnnnnnnnnnnnnnnnnnnnnnnnnnnnnnnnnnnnnnnnnnnnnnnnnnnnnnnnnnnnnnnnnnnnnnnnnnnnnnnnnnnnnnnnnnnnnnnnnnnnnnnnnnnnnnnnnnnnnnnnnnnnnnnnnnnnnnnnnnnnnnnnnnnnnnnnnnnnnnnnnnnnnnnnnnnnnnnnnnnnnnnnnnnnnnnnnnnnnnnnnnnnnnnnnnnnnnnnnnnnnnnnnnnnnnnnnnnnnnnnnnnnnnnnnnnnnnnnnnnnnnnnnnnnnnnnnnnnnnnnnnnnnnnnnnnnnnnnnnnnnnnnnnnnnnnnnnnnnnnnnnnnnnnnnnnnnnnnnnnnnnnnnnnnnnnnnnnnnnnnnnnnnnnnnnnnnnnnnnnnnnnnnnnnnnnnnnnnnnnnnnnnnnnnnnnnnnnnnnnnnnnnnnnnnnnnnnnnnnnnnnnnnnnnnnnnnnnnnnnnnnnnnnnnnnnnnnnnnnnnnnnnnnnnnnnnnnnnnnnnnnnnnnnnnnnnnnnnnnnnnnnnnnnnnnnnnnnnnnnnnnnnnnnnnnnnnnnnnnnnnnnnnnnnnnnnnnnnnnnnnnnnnnnnnnnnnnnnnnnnnnnnnnnnnnnnnnnnnnnnnnnnnnnnnnnnnnnnnnnnnnnnnnnnnnnnnnnnnnnnnnnnnnnnnnnnnnnnnnnnnnnnnnnnnnnnnnnnnnnnnnnnnnnnnnnnnnnnnnnnnnnnnnnnnnnnnnnnnnnnnnnnnnnnnnnnnnnnnnnnnnnnnnnnnnnnnnnnnnnnnnnnnnnnnnnnnnnnnnnnnnnnnnnnnnnnnnnnnnnnnnnnnnnnnnnnnnnnnnnnnnnnnnnnnnnnnnnnnnnnnnnnnnnnnnnnnnnnnnnnnnnnnnnnnnnnnnnnnnnnnnnnnnnnnnnnnnnnnnnnnnnnnnnnnnnnnnnnnnnnnnnnnnnnnnnnnnnnnnnnnnnnnnnnnnnnnnnnnnnnnnnnnnnnnnnnnnnnnnnnnnnnnnnnnnnnnnnnnnnnnnnnnnnnnnnnnnnnnnnnnnnnnnnnnnnnnnnnnnnnnnnnnnnnnnnnnnnnnnnnnnnnnnnnnnnnnnnnnnnnnnnnnnnnnnnnnnnnnnnnnnnnnnnnnnnnnnnnnnnnnnnnnnnnnnnnnnnnnnnnnnnnnnnnnnnnnnnnnnnnnnnnnnnnnnnnnnnnnnnnnnnnnnnnnnnnnnnnnnnnnnnnnnnnnnnnnnnnnnnnnnnnnnnnnnnnnnnnnnnnnnnnnnnnnnnnnnnnnnnnnnnnnnnnnnnnnnnnnnnnnnnnnnnnnnnnnnnnnnnnnnnnnnnnnnnnnnnnnnnnnnnnnnnnnnnnnnnnnnnnnnnnnnnnnnnnnnnnnnnnnnnnnnnnnnnnnnnnnnnnnnnnnnnnnnnnnnnnnnnnnnnnnnnnnnnnnnnnnnnnnnnnnnnnnnnnnnnnnnnnnnnnnnnnnnnnnnnnnnnnnnnnnnnnnnnnnnnnnnnnnnnnnnnnnnnnnnnnnnnnnnnnnnnnnnnnnnnnnnnnnnnnnnnnnnnnnnnnnnnnnnnnnnnnnnnnnnnnnnnnnnnnnnnnnnnnnnnnnnnnnnnnnnnnnnnnnnnnnnnnnnnnnnnnnnnnnnnnnnnnnnnnnnnnnnnnnnnnnnnnnnnnnnnnnnnnnnnnnnnnnnnnnnnnnnnnnnnnnnnnnnnnnnnnnnnnnnnnnnnnnnnnnnnnnnnnnnnnnnnnnnnnnnnnnnnnnnnnnnnnnnnnnnnnnnnnnnnnnnnnnnnnnnnnnnnnnnnnnnnnnnnnnnnnnnnnnnnnnnnnnnnnnnnnnnnnnnnnnnnnnnnnnnnnnnnnnnnnnnnnnnnnnnnnnnnnnnnnnnnnnnnnnnnnnnnnnnnnnnnnnnnnnnnnnnnnnnnnnnnnnnnnnnnnnnnnnnnnnnnnnnnnnnnnnnnnnnnnnnnnnnnnnnnnnnnnnnnnnnnnnnnnnnnnnnnnnnnnnnnnnnnnnnnnnnnnnnnnnnnnnnnnnnnnnnnnnnnnnnnnnnnnnnnnnnnnnnnnnnnnnnnnnnnnnnnnnnnnnnnnnnnnnnnnnnnnnnnnnnnnnnnnnnnnnnnnnnnnnnnnnnnnnnnnnnnnnnnnnnnnnnnnnnnnnnnnnnnnnnnnnnnnnnnnnnnnnnnnnnnnnnnnnnnnnnnnnnnnnnnnnnnnnnnnnnnnnnnnnnnnnnnnnnnnnnnnnnnnnnnnnnnnnnnnnnnnnnnnnnnnnnnnnnnnnnnnnnnnnnnnnnnnnnnnnnnnnnnnnnnnnnnnnnnnnnnnnnnnnnnnnnnnnnnnnnnnnnnnnnnnnnnnnnnnnnnnnnnnnnnnnnnnnnnnnnnnnnnnnnnnnnnnnnnnnnnnnnnnnnnnnnnnnnnnnnnnnnnnnnnnnnnnnnnnnnnnnnnnnnnnnnnnnnnnnnnnnnnnnnnnnnnnnnnnnnnnnnnnnnnnnnnnnnnnnnnnnnnnnnnnnnnnnnnnnnnnnnnnnnnnnnnnnnnnnnnnnnnnnnnnnnnnnnnnnnnnnnnnnnnnnnnnnnnnnnnnnnnnnnnnnnnnnnnnnnnnnnnnnnnnnnnnnnnnnnnnnnnnnnnnnnnnnnnnnnnnnnnnnnnnnnnnnnnnnnnnnnnnnnnnnnnnnnnnnnnnnnnnnnnnnnnnnnnnnnnnnnnnnnnnnnnnnnnnnnnnnnnnnnnnnnnnnnnnnnnnnnnnnnnnnnnnnnnnnnnnnnnnnnnnnnnnnnnnnnnnnnnnnnnnnnnnnnnnnnnnnnnnnnnnnnnnnnnnnnnnnnnnnnnnnnnnnnnnnnnnnnnnnnnnnnnnnnnnnnnnnnnnnnnnnnnnnnnnnnnnnnnnnnnnnnnnnnnnnnnnnnnnnnnnnnnnnnnnnnnnnnnnnnnnnnnnnnnnnnnnnnnnnnnnnnnnnnnnnnnnnnnnnnnnnnnnnnnnnnnnnnnnnnnnnnnnnnnnnnnnnnnnnnnnnnnnnnnnnnnnnnnnnnnnnnnnnnnnnnnnnnnnnnnnnnnnnnnnnnnnnnnnnnnnnnnnnnnnnnnnnnnnnnnnnnnnnnnnnnnnnnnnnnnnnnnnnnnnnnnnnnnnnnnnnnnnnnnnnnnnnnnnnnnnnnnnnnnnnnnnnnnnnnnnnnnnnnnnnnnnnnnnnnnnnnnnnnnnnnnnnnnnnnnnnnnnnnnnnnnnnnnnnnnnnnnnnnnnnnnnnnnnnnnnnnnnnnnnnnnnnnnnnnnnnnnnnnnnnnnnnnnnnnnnnnnnnnnnnnnnnnnnnnnnnnnnnnnnnnnnnnnnnnnnnnnnnnnnnnnnnnnnnnnnnnnnnnnnnnnnnnnnnnnnnnnnnnnnnnnnnnnnnnnnnnnnnnnnnnnnnnnnnnnnnnnnnnnnnnnnnnnnnnnnnnnnnnnnnnnnnnnnnnnnnnnnnnnnnnnnnnnnnnnnnnnnnnnnnnnnnnnnnnnnnnnnnnnnnnnnnnnnnnnnnnnnnnnnnnnnnnnnnnnnnnnnnnnnnnnnnnnnnnnnnnnnnnnnnnnnnnnnnnnnnnnnnnnnnnnnnnnnnnnnnnnnnnnnnnnnnnnnnnnnnnnnnnnnnnnnnnnnnnnnnnnnnnnnnnnnnnnnnnnnnnnnnnnnnnnnnnnnnnnnnnnnnnnnnnnnnnnnnnnnnnnnnnnnnnnnnnnnnnnnnnnnnnnnnnnnnnnnnnnnnnnnnnnnnnnnnnnnnnnnnnnnnnnnnnnnnnnnnnnnnnnnnnnnnnnnnnnnnnnnnnnnnnnnnnnnnnnnnnnnnnnnnnnnnnnnnnnnnnnnnnnnnnnnnnnnnnnnnnnnnnnnnnnnnnnnnnnnnnnnnnnnnnnnnnnnnnnnnnnnnnnnnnnnnnnnnnnnnnnnnnnnnnnnnnnnnnnnnnnnnnnnnnnnnnnnnnnnnnnnnnnnnnnnnnnnnnnnnnnnnnnnnnnnnnnnnnnnnnnnnnnnnnnnnnnnnnnnnnnnnnnnnnnnnnnnnnnnnnnnnnnnnnnnnnnnnnnnnnnnnnnnnnnnnnnnnnnnnnnnnnnnnnnnnnnnnnnnnnnnnnnnnnnnnnnnnnnnnnnnnnnnnnnnnnnnnnnnnnnnnnnnnnnnnnnnnnnnnnnnnnnnnnnnnnnnnnnnnnnnnnnnnnnnnnnnnnnnnnnnnnnnnnnnnnnnnnnnnnnnnnnnnnnnnnnnnnnnnnnnnnnnnnnnnnnnnnnnnnnnnnnnnnnnnnnnnnnnnnnnnnnnnnnnnnnnnnnnnnnnnnnnnnnnnnnnnnnnnnnnnnnnnnnnnnnnnnnnnnnnnnnnnnnnnnnnnnnnnnnnnnnnnnnnnnnnnnnnnnnnnnnnnnnnnnnnnnnnnnnnnnnnnnnnnnnnnnnnnnnnnnnnnnnnnnnnnnnnnnnnnnnnnnnnnnnnnnnnnnnnnnnnnnnnnnnnnnnnnnnnnnnnnnnnnnnnnnnnnnnnnnnnnnnnnnnnnnnnnnnnnnnnnnnnnnnnnnnnnnnnnnnnnnnnnnnnnnnnnnnnnnnnnnnnnnnnnnnnnnnnnnnnnnnnnnnnnnnnnnnnnnnnnnnnnnnnnnnnnnnnnnnnnnnnnnnnnnnnnnnnnnnnnnnnnnnnnnnnnnnnnnnnnnnnnnnnnnnnnnnnnnnnnnnnnnnnnnnnnnnnnnnnnnnnnnnnnnnnnnnnnnnnnnnnnnnnnnnnnnnnnnnnnnnnnnnnnnnnnnnnnnnnnnnnnnnnnnnnnnnnnnnnnnnnnnnnnnnnnnnnnnnnnnnnnnnnnnnnnnnnnnnnnnnnnnnnnnnnnnnnnnnnnnnnnnnnnnnnnnnnnnnnnnnnnnnnnnnnnnnnnnnnnnnnnnnnnnnnnnnnnnnnnnnnnnnnnnnnnnnnnnnnnnnnnnnnnnnnnnnnnnnnnnnnnnnnnnnnnnnnnnnnnnnnnnnnnnnnnnnnnnnnnnnnnnnnnnnnnnnnnnnnnnnnnnnnnnnnnnnnnnnnnnnnnnnnnnnnnnnnnnnnnnnnnnnnnnnnnnnnnnnnnnnnnnnnnnnnnnnnnnnnnnnnnnnnnnnnnnnnnnnnnnnnnnnnnnnnnnnnnnnnnnnnnnnnnnnnnnnnnnnnnnnnnnnnnnnnnnnnnnnnnnnnnnnnnnnnnnnnnnnnnnnnnnnnnnnnnnnnnnnnnnnnnnnnnnnnnnnnnnnnnnnnnnnnnnnnnnnnnnnnnnnnnnnnnnnnnnnnnnnnnnnnnnnnnnnnnnnnnnnnnnnnnnnnnnnnnnnnnnnnnnnnnnnnnnnnnnnnnnnnnnnnnnnnnnnnnnnnnnnnnnnnnnnnnnnnnnnnnnnnnnnnnnnnnnnnnnnnnnnnnnnnnnnnnnnnnnnnnnnnnnnnnnnnnnnnnnnnnnnnnnnnnnnnnnnnnnnnnnnnnnnnnnnnnnnnnnnnnnnnnnnnnnnnnnnnnnnnnnnnnnnnnnnnnnnnnnnnnnnnnnnnnnnnnnnnnnnnnnnnnnnnnnnnnnnnnnnnnnnnnnnnnnnnnnnnnnnnnnnnnnnnnnnnnnnnnnnnnnnnnnnnnnnnnnnnnnnnnnnnnnnnnnnnnnnnnnnnnnnnnnnnnnnnnnnnnnnnnnnnnnnnnnnnnnnnnnnnnnnnnnnnnnnnnnnnnnnnnnnnnnnnnnnnnnnnnnnnnnnnnnnnnnnnnnnnnnnnnnnnnnnnnnnnnnnnnnnnnnnnnnnnnnnnnnnnnnnnnnnnnnnnnnnnnnnnnnnnnnnnnnnnnnnnnnnnnnnnnnnnnnnnnnnnnnnnnnnnnnnnnnnnnnnnnnnnnnnnnnnnnnnnnnnnnnnnnnnnnnnnnnnnnnnnnnnnnnnnnnnnnnnnnnnnnnnnnnnnnnnnnnnnnnnnnnnnnnnnnnnnnnnnnnnnnnnnnnnnnnnnnnnnnnnnnnnnnnnnnnnnnnnnnnnnnnnnnnnnnnnnnnnnnnnnnnnnnnnnnnnnnnnnnnnnnnnnnnnnnnnnnnnnnnnnnnnnnnnnnnnnnnnnnnnnnnnnnnnnnnnnnnnnnnnnnnnnnnnnnnnnnnnnnnnnnnnnnnnnnnnnnnnnnnnnnnnnnnnnnnnnnnnnnnnnnnnnnnnnnnnnnnnnnnnnnnnnnnnnnnnnnnnnnnnnnnnnnnnnnnnnnnnnnnnnnnnnnnnnnnnnnnnnnnnnnnnnnnnnnnnnnnnnnnnnnnnnnnnnnnnnnnnnnnnnnnnnnnnnnnnnnnnnnnnnnnnnnnnnnnnnnnnnnnnnnnnnnnnnnnnnnnnnnnnnnnnnnnnnnnnnnnnnnnnnnnnnnnnnnnnnnnnnnnnnnnnnnnnnnnnnnnnnnnnnnnnnnnnnnnnnnnnnnnnnnnnnnnnnnnnnnnnnnnnnnnnnnnnnnnnnnnnnnnnnnnnnnnnnnnnnnnnnnnnnnnnnnnnnnnnnnnnnnnnnnnnnnnnnnnnnnnnnnnnnnnnnnnnnnnnnnnnnnnnnnnnnnnnnnnnnnnnnnnnnnnnnnnnnnnnnnnnnnnnnnnnnnnnnnnnnnnnnnnnnnnnnnnnnnnnnnnnnnnnnnnnnnnnnnnnnnnnnnnnnnnnnnnnnnnnnnnnnnnnnnnnnnnnnnnnnnnnnnnnnnnnnnnnnnnnnnnnnnnnnnnnnnnnnnnnnnnnnnnnnnnnnnnnnnnnnnnnnnnnnnnnnnnnnnnnnnnnnnnnnnnnnnnnnnnnnnnnnnnnnnnnnnnnnnnnnnnnnnnnnnnnnnnnnnnnnnnnnnnnnnnnnnnnnnnnnnnnnnnnnnnnnnnnnnnnnnnnnnnnnnnnnnnnnnnnnnnnnnnnnnnnnnnnnnnnnnnnnnnnnnnnnnnnnnnnnnnnnnnnnnnnnnnnnnnnnnnnnnnnnnnnnnnnnnnnnnnnnnnnnnnnnnnnnnnnnnnnnnnnnnnnnnnnnnnnnnnnnnnnnnnnnnnnnnnnnnnnnnnnnnnnnnnnnnnnnnnnnnnnnnnnnnnnnnnnnnnnnnnnnnnnnnnnnnnnnnnnnnnnnnnnnnnnnnnnnnnnnnnnnnnnnnnnnnnnnnnnnnnnnnnnnnnnnnnnnnnnnnnnnnnnnnnnnnnnnnnnnnnnnnnnnnnnnnnnnnnnnnnnnnnnnnnnnnnnnnnnnnnnnnnnnnnnnnnnnnnnnnnnnnnnnnnnnnnnnnnnnnnnnnnnnnnnnnnnnnnnnnnnnnnnnnnnnnnnnnnnnnnnnnnnnnnnnnnnnnnnnnnnnnnnnnnnnnnnnnnnnnnnnnnnnnnnnnnnnnnnnnnnnnnnnnnnnnnnnnnnnnnnnnnnnnnnnnnnnnnnnnnnnnnnnnnnnnnnnnnnnnnnnnnnnnnnnnnnnnnnnnnnnnnnnnnnnnnnnnnnnnnnnnnnnnnnnnnnnnnnnnnnnnnnnnnnnnnnnnnnnnnnnnnnnnnnnnnnnnnnnnnnnnnnnnnnnnnnnnnnnnnnnnnnnnnnnnnnnnnnnnnnnnnnnnnnnnnnnnnnnnnnnnnnnnnnnnnnnnnnnnnnnnnnnnnnnnnnnnnnnnnnnnnnnnnnnnnnnnnnnnnnnnnnnnnnnnnnnnnnnnnnnnnnnnnnnnnnnnnnnnnnnnnnnnnnnnnnnnnnnnnnnnnnnnnnnnnnnnnnnnnnnnnnnnnnnnnnnnnnnnnnnnnnnnnnnnnnnnnnnnnnnnnnnnnnnnnnnnnnnnnnnnnnnnnnnnnnnnnnnnnnnnnnnnnnnnnnnnnnnnnnnnnnnnnnnnnnnnnnnnnnnnnnnnnnnnnnnnnnnnnnnnnnnnnnnnnnnnnnnnnnnnnnnnnnnnnnnnnnnnnnnnnnnnnnnnnnnnnnnnnnnnnnnnnnnnnnnnnnnnnnnnnnnnnnnnnnnnnnnnnnnnnnnnnnnnnnnnnnnnnnnnnnnnnnnnnnnnnnnnnnnnnnnnnnnnnnnnnnnnnnnnnnnnnnnnnnnnnnnnnnnnnnnnnnnnnnnnnnnnnnnnnnnnnnnnnnnnnnnnnnnnnnnnnnnnnnnnnnnnnnnnnnnnnnnnnnnnnnnnnnnnnnnnnnnnnnnnnnnnnnnnnnnnnnnnnnnnnnnnnnnnnnnnnnnnnnnnnnnnnnnnnnnnnnnnnnnnnnnnnnnnnnnnnnnnnnnnnnnnnnnnnnnnnnnnnnnnnnnnnnnnnnnnnnnnnnnnnnnnnnnnnnnnnnnnnnnnnnnnnnnnnnnnnnnnnnnnnnnnnnnnnnnnnnnnnnnnnnnnnnnnnnnnnnnnnnnnnnnnnnnnnnnnnnnnnnnnnnnnnnnnnnnnnnnnnnnnnnnnnnnnnnnnnnnnnnnnnnnnnnnnnnnnnnnnnnnnnnnnnnnnnnnnnnnnnnnnnnnnnnnnnnnnnnnnnnnnnnnnnnnnnnnnnnnnnnnnnnnnnnnnnnnnnnnnnnnnnnnnnnnnnnnnnnnnnnnnnnnnnnnnnnnnnnnnnnnnnnnnnnnnnnnnnnnnnnnnnnnnnnnnnnnnnnnnnnnnnnnnnnnnnnnnnnnnnnnnnnnnnnnnnnnnnnnnnnnnnnnnnnnnnnnnnnnnnnnnnnnnnnnnnnnnnnnnnnnnnnnnnnnnnnnnnnnnnnnnnnnnnnnnnnnnnnnnnnnnnnnnnnnnnnnnnnnnnnnnnnnnnnnnnnnnnnnnnnnnnnnnnnnnnnnnnnnnnnnnnnnnnnnnnnnnnnnnnnnnnnnnnnnnnnnnnnnnnnnnnnnnnnnnnnnnnnnnnnnnnnnnnnnnnnnnnnnnnnnnnnnnnnnnnnnnnnnnnnnnnnnnnnnnnnnnnnnnnnnnnnnnnnnnnnnnnnnnnnnnnnnnnnnnnnnnnnnnnnnnnnnnnnnnnnnnnnnnnnnnnnnnnnnnnnnnnnnnnnnnnnnnnnnnnnnnnnnnnnnnnnnnnnnnnnnnnnnnnnnnnnnnnnnnnnnnnnnnnnnnnnnnnnnnnnnnnnnnnnnnnnnnnnnnnnnnnnnnnnnnnnnnnnnnnnnnnnnnnnnnnnnnnnnnnnnnnnnnnnnnnnnnnnnnnnnnnnnnnnnnnnnnnnnnnnnnnnnnnnnnnnnnnnnnnnnnnnnnnnnnnnnnnnnnnnnnnnnnnnnnnnnnnnnnnnnnnnnnnnnnnnnnnnnnnnnnnnnnnnnnnnnnnnnnnnnnnnnnnnnnnnnnnnnnnnnnnnnnnnnnnnnnnnnnnnnnnnnnnnnnnnnnnnnnnnnnnnnnnnnnnnnnnnnnnnnnnnnnnnnnnnnnnnnnnnnnnnnnnnnnnnnnnnnnnnnnnnnnnnnnnnnnnnnnnnnnnnnnnnnnnnnnnnnnnnnnnnnnnnnnnnnnnnnnnnnnnnnnnnnnnnnnnnnnnnnnnnnnnnnnnnnnnnnnnnnnnnnnnnnnnnnnnnnnnnnnnnnnnnnnnnnnnnnnnnnnnnnnnnnnnnnnnnnnnnnnnnnnnnnnnnnnnnnnnnnnnnnnnnnnnnnnnnnnnnnnnnnnnnnnnnnnnnnnnnnnnnnnnnnnnnnnnnnnnnnnnnnnnnnnnnnnnnnnnnnnnnnnnnnnnnnnnnnnnnnnnnnnnnnnnnnnnnnnnnnnnnnnnnnnnnnnnnnnnnnnnnnnnnnnnnnnnnnnnnnnnnnnnnnnnnnnnnnnnnnnnnnnnnnnnnnnnnnnnnnnnnnnnnnnnnnnnnnnnnnnnnnnnnnnnnnnnnnnnnnnnnnnnnnnnnnnnnnnnnnnnnnnnnnnnnnnnnnnnnnnnnnnnnnnnnnnnnnnnnnnnnnnnnnnnnnnnnnnnnnnnnnnnnnnnnnnnnnnnnnnnnnnnnnnnnnnnnnnnnnnnnnnnnnnnnnnnnnnnnnnnnnnnnnnnnnnnnnnnnnnnnnnnnnnnnnnnnnnnnnnnnnnnnnnnnnnnnnnnnnnnnnnnnnnnnnnnnnnnnnnnnnnnnnnnnnnnnnnnnnnnnnnnnnnnnnnnnnnnnnnnnnnnnnnnnnnnnnnnnnnnnnnnnnnnnnnnnnnnnnnnnnnnnnnnnnnnnnnnnnnnnnnnnnnnnnnnnnnnnnnnnnnnnnnnnnnnnnnnnnnnnnnnnnnnnnnnnnnnnnnnnnnnnnnnnnnnnnnnnnnnnnnnnnnnnnnnnnnnnnnnnnnnnnnnnnnnnnnnnnnnnnnnnnnnnnnnnnnnnnnnnnnnnnnnnnnnnnnnnnnnnnnnnnnnnnnnnnnnnnnnnnnnnnnnnnnnnnnnnnnnnnnnnnnnnnnnnnnnnnnnnnnnnnnnnnnnnnnnnnnnnnnnnnnnnnnnnnnnnnnnnnnnnnnnnnnnnnnnnnnnnnnnnnnnnnnnnnnnnnnnnnnnnnnnnnnnnnnnnnnnnnnnnnnnnnnnnnnnnnnnnnnnnnnnnnnnnnnnnnnnnnnnnnnnnnnnnnnnnnnnnnnnnnnnnnnnnnnnnnnnnnnnnnnnnnnnnnnnnnnnnnnnnnnnnnnnnnnnnnnnnnnnnnnnnnnnnnnnnnnnnnnnnnnnnnnnnnnnnnnnnnnnnnnnnnnnnnnnnnnnnnnnnnnnnnnnnnnnnnnnnnnnnnnnnnnnnnnnnnnnnnnnnnnnnnnnnnnnnnnnnnnnnnnnnnnnnnnnnnnnnnnnnnnnnnnnnnnnnnnnnnnnnnnnnnnnnnnnnnnnnnnnnnnnnnnnnnnnnnnnnnnnnnnnnnnnnnnnnnnnnnnnnnnnnnnnnnnnnnnnnnnnnnnnnnnnnnnnnnnnnnnnnnnnnnnnnnnnnnnnnnnnnnnnnnnnnnnnnnnnnnnnnnnnnnnnnnnnnnnnnnnnnnnnnnnnnnnnnnnnnnnnnnnnnnnnnnnnnnnnnnnnnnnnnnnnnnnnnnnnnnnnnnnnnnnnnnnnnnnnnnnnnnnnnnnnnnnnnnnnnnnnnnnnnnnnnnnnnnnnnnnnnnnnnnnnnnnnnnnnnnnnnnnnnnnnnnnnnnnnnnnnnnnnnnnnnnnnnnnnnnnnnnnnnnnnnnnnnnnnnnnnnnnnnnnnnnnnnnnnnnnnnnnnnnnnnnnnnnnnnnnnnnnnnnnnnnnnnnnnnnnnnnnnnnnnnnnnnnnnnnnnnnnnnnnnnnnnnnnnnnnnnnnnnnnnnnnnnnnnnnnnnnnnnnnnnnnnnnnnnnnnnnnnnnnnnnnnnnnnnnnnnnnnnnnnnnnnnnnnnnnnnnnnnnnnnnnnnnnnnnnnnnnnnnnnnnnnnnnnnnnnnnnnnnnnnnnnnnnnnnnnnnnnnnnnnnnnnnnnnnnnnnnnnnnnnnnnnnnnnnnnnnnnnnnnnnnnnnnnnnnnnnnnnnnnnnnnnnnnnnnnnnnnnnnnnnnnnnnnnnnnnnnnnnnnnnnnnnnnnnnnnnnnnnnnnnnnnnnnnnnnnnnnnnnnnnnnnnnnnnnnnnnnnnnnnnnnnnnnnnnnnnnnnnnnnnnnnnnnnnnnnnnnnnnnnnnnnnnnnnnnnnnnnnnnnnnnnnnnnnnnnnnnnnnnnnnnnnnnnnnnnnnnnnnnnnnnnnnnnnnnnnnnnnnnnnnnnnnnnnnnnnnnnnnnnnnnnnnnnnnnnnnnnnnnnnnnnnnnnnnnnnnnnnnnnnnnnnnnnnnnnnnnnnnnnnnnnnnnnnnnnnnnnnnnnnnnnnnnnnnnnnnnnnnnnnnnnnnnnnnnnnnnnnnnnnnnnnnnnnnnnnnnnnnnnnnnnnnnnnnnnnnnnnnnnnnnnnnnnnnnnnnnnnnnnnnnnnnnnnnnnnnnnnnnnnnnnnnnnnnnnnnnnnnnnnnnnnnnnnnnnnnnnnnnnnnnnnnnnnnnnnnnnnnnnnnnnnnnnnnnnnnnnnnnnnnnnnnnnnnnnnnnnnnnnnnnnnnnnnnnnnnnnnnnnnnnnnnnnnnnnnnnnnnnnnnnnnnnnnnnnnnnnnnnnnnnnnnnnnnnnnnnnnnnnnnnnnnnnnnnnnnnnnnnnnnnnnnnnnnnnnnnnnnnnnnnnnnnnnnnnnnnnnnnnnnnnnnnnnnnnnnnnnnnnnnnnnnnnnnnnnnnnnnnnnnnnnnnnnnnnnnnnnnnnnnnnnnnnnnnnnnnnnnnnnnnnnnnnnnnnnnnnnnnnnnnnnnnnnnnnnnnnnnnnnnnnnnnnnnnnnnnnnnnnnnnnnnnnnnnnnnnnnnnnnnnnnnnnnnnnnnnnnnnnnnnnnnnnnnnnnnnnnnnnnnnnnnnnnnnnnnnnnnnnnnnnnnnnnnnnnnnnnnnnnnnnnnnnnnnnnnnnnnnnnnnnnnnnnnnnnnnnnnnnnnnnnnnnnnnnnnnnnnnnnnnnnnnnnnnnnnnnnnnnnnnnnnnnnnnnnnnnnnnnnnnnnnnnnnnnnnnnnnnnnnnnnnnnnnnnnnnnnnnnnnnnnnnnnnnnnnnnnnnnnnnnnnnnnnnnnnnnnnnnnnnnnnnnnnnnnnnnnnnnnnnnnnnnnnnnnnnnnnnnnnnnnnnnnnnnnnnnnnnnnnnnnnnnnnnnnnnnnnnnnnnnnnnnnnnnnnnnnnnnnnnnnnnnnnnnnnnnnnnnnnnnnnnnnnnnnnnnnnnnnnnnnnnnnnnnnnnnnnnnnnnnnnnnnnnnnnnnnnnnnnnnnnnnnnnnnnnnnnnnnnnnnnnnnnnnnnnnnnnnnnnnnnnnnnnnnnnnnnnnnnnnnnnnnnnnnnnnnnnnnnnnnnnnnnnnnnnnnnnnnnnnnnnnnnnnnnnnnnnnnnnnnnnnnnnnnnnnnnnnnnnnnnnnnnnnnnnnnnnnnnnnnnnnnnnnnnnnnnnnnnnnnnnnnnnnnnnnnnnnnnnnnnnnnnnnnnnnnnnnnnnnnnnnnnnnnnnnnnnnnnnnnnnnnnnnnnnnnnnnnnnnnnnnnnnnnnnnnnnnnnnnnnnnnnnnnnnnnnnnnnnnnnnnnnnnnnnnnnnnnnnnnnnnnnnnnnnnnnnnnnnnnnnnnnnnnnnnnnnnnnnnnnnnnnnnnnnnnnnnnnnnnnnnnnnnnnnnnnnnnnnnnnnnnnnnnnnnnnnnnnnnnnnnnnnnnnnnnnnnnnnnnnnnnnnnnnnnnnnnnnnnnnnnnnnnnnnnnnnnnnnnnnnnnnnnnnnnnnnnnnnnnnnnnnnnnnnnnnnnnnnnnnnnnnnnnnnnnnnnnnnnnnnnnnnnnnnnnnnnnnnnnnnnnnnnnnnnnnnnnnnnnnnnnnnnnnnnnnnnnnnnnnnnnnnnnnnnnnnnnnnnnnnnnnnnnnnnnnnnnnnnnnnnnnnnnnnnnnnnnnnnnnnnnnnnnnnnnnnnnnnnnnnnnnnnnnnnnnnnnnnnnnnnnnnnnnnnnnnnnnnnnnnnnnnnnnnnnnnnnnnnnnnnnnnnnnnnnnnnnnnnnnnnnnnnnnnnnnnnnnnnnnnnnnnnnnnnnnnnnnnnnnnnnnnnnnnnnnnnnnnnnnnnnnnnnnnnnnnnnnnnnnnnnnnnnnnnnnnnnnnnnnnnnnnnnnnnnnnnnnnnnnnnnnnnnnnnnnnnnnnnnnnnnnnnnnnnnnnnnnnnnnnnnnnnnnnnnnnnnnnnnnnnnnnnnnnnnnnnnnnnnnnnnnnnnnnnnnnnnnnnnnnnnnnnnnnnnnnnnnnnnnnnnnnnnnnnnnnnnnnnnnnnnnnnnnnnnnnnnnnnnnnnnnnnnnnnnnnnnnnnnnnnnnnnnnnnnnnnnnnnnnnnnnnnnnnnnnnnnnnnnnnnnnnnnnnnnnnnnnnnnnnnnnnnnnnnnnnnnnnnnnnnnnnnnnnnnnnnnnnnnnnnnnnnnnnnnnnnnnnnnnnnnnnnnnnnnnnnnnnnnnnnnnnnnnnnnnnnnnnnnnnnnnnnnnnnnnnnnnnnnnnnnnnnnnnnnnnnnnnnnnnnnnnnnnnnnnnnnnnnnnnnnnnnnnnnnnnnnnnnnnnnnnnnnnnnnnnnnnnnnnnnnnnnnnnnnnnnnnnnnnnnnnnnnnnnnnnnnnnnnnnnnnnnnnnnnnnnnnnnnnnnnnnnnnnnnnnnnnnnnnnnnnnnnnnnnnnnnnnnnnnnnnnnnnnnnnnnnnnnnnnnnnnnnnnnnnnnnnnnnnnnnnnnnnnnnnnnnnnnnnnnnnnnnnnnnnnnnnnnnnnnnnnnnnnnnnnnnnnnnnnnnnnnnnnnnnnnnnnnnnnnnnnnnnnnnnnnnnnnnnnnnnnnnnnnnnnnnnnnnnnnnnnnnnnnnnnnnnnnnnnnnnnnnnnnnnnnnnnnnnnnnnnnnnnnnnnnnnnnnnnnnnnnnnnnnnnnnnnnnnnnnnnnnnnnnnnnnnnnnnnnnnnnnnnnnnnnnnnnnnnnnnnnnnnnnnnnnnnnnnnnnnnnnnnnnnnnnnnnnnnnnnnnnnnnnnnnnnnnnnnnnnnnnnnnnnnnnnnnnnnnnnnnnnnnnnnnnnnnnnnnnnnnnnnnnnnnnnnnnnnnnnnnnnnnnnnnnnnnnnnnnnnnnnnnnnnnnnnnnnnnnnnnnnnnnnnnnnnnnnnnnnnnnnnnnnnnnnnnnnnnnnnnnnnnnnnnnnnnnnnnnnnnnnnnnnnnnnnnnnnnnnnnnnnnnnnnnnnnnnnnnnnnnnnnnnnnnnnnnnnnnnnnnnnnnnnnnnnnnnnnnnnnnnnnnnnnnnnnnnnnnnnnnnnnnnnnnnnnnnnnnnnnnnnnnnnnnnnnnnnnnnnnnnnnnnnnnnnnnnnnnnnnnnnnnnnnnnnnnnnnnnnnnnnnnnnnnnnnnnnnnnnnnnnnnnnnnnnnnnnnnnnnnnnnnnnnnnnnnnnnnnnnnnnnnnnnnnnnnnnnnnnnnnnnnnnnnnnnnnnnnnnnnnnnnnnnnnnnnnnnnnnnnnnnnnnnnnnnnnnnnnnnnnnnnnnnnnnnnnnnnnnnnnnnnnnnnnnnnnnnnnnnnnnnnnnnnnnnnnnnnnnnnnnnnnnnnnnnnnnnnnnnnnnnnnnnnnnnnnnnnnnnnnnnnnnnnnnnnnnnnnnnnnnnnnnnnnnnnnnnnnnnnnnnnnnnnnnnnnnnnnnnnnnnnnnnnnnnnnnnnnnnnnnnnnnnnnnnnnnnnnnnnnnnnnnnnnnnnnnnnnnnnnnnnnnnnnnnnnnnnnnnnnnnnnnnnnnnnnnnnnnnnnnnnnnnnnnnnnnnnnnnnnnnnnnnnnnnnnnnnnnnnnnnnnnnnnnnnnnnnnnnnnnnnnnnnnnnnnnnnnnnnnnnnnnnnnnnnnnnnnnnnnnnnnnnnnnnnnnnnnnnnnnnnnnnnnnnnnnnnnnnnnnnnnnnnnnnnnnnnnnnnnnnnnnnnnnnnnnnnnnnnnnnnnnnnnnnnnnnnnnnnnnnnnnnnnnnnnnnnnnnnnnnnnnnnnnnnnnnnnnnnnnnnnnnnnnnnnnnnnnnnnnnnnnnnnnnnnnnnnnnnnnnnnnnnnnnnnnnnnnnnnnnnnnnnnnnnnnnnnnnnnnnnnnnnnnnnnnnnnnnnnnnnnnnnnnnnnnnnnnnnnnnnnnnnnnnnnnnnnnnnnnnnnnnnnnnnnnnnnnnnnnnnnnnnnnnnnnnnnnnnnnnnnnnnnnnnnnnnnnnnnnnnnnnnnnnnnnnnnnnnnnnnnnnnnnnnnnnnnnnnnnnnnnnnnnnnnnnnnnnnnnnnnnnnnnnnnnnnnnnnnnnnnnnnnnnnnnnnnnnnnnnnnnnnnnnnnnnnnnnnnnnnnnnnnnnnnnnnnnnnnnnnnnnnnnnnnnnnnnnnnnnnnnnnnnnnnnnnnnnnnnnnnnnnnnnnnnnnnnnnnnnnnnnnnnnnnnnnnnnnnnnnnnnnnnnnnnnnnnnnnnnnnnnnnnnnnnnnnnnnnnnnnnnnnnnnnnnnnnnnnnnnnnnnnnnnnnnnnnnnnnnnnnnnnnnnnnnnnnnnnnnnnnnnnnnnnnnnnnnnnnnnnnnnnnnnnnnnnnnnnnnnnnnnnnnnnnnnnnnnnnnnnnnnnnnnnnnnnnnnnnnnnnnnnnnnnnnnnnnnnnnnnnnnnnnnnnnnnnnnnnnnnnnnnnnnnnnnnnnnnnnnnnnnnnnnnnnnnnnnnnnnnnnnnnnnnnnnnnnnnnnnnnnnnnnnnnnnnnnnnnnnnnnnnnnnnnnnnnnnnnnnnnnnnnnnnnnnnnnnnnnnnnnnnnnnnnnnnnnnnnnnnnnnnnnnnnnnnnnnnnnnnnnnnnnnnnnnnnnnnnnnnnnnnnnnnnnnnnnnnnnnnnnnnnnnnnnnnnnnnnnnnnnnnnnnnnnnnnnnnnnnnnnnnnnnnnnnnnnnnnnnnnnnnnnnnnnnnnnnnnnnnnnnnnnnnnnnnnnnnnnnnnnnnnnnnnnnnnnnnnnnnnnnnnnnnnnnnnnnnnnnnnnnnnnnnnnnnnnnnnnnnnnnnnnnnnnnnnnnnnnnnnnnnnnnnnnnnnnnnnnnnnnnnnnnnnnnnnnnnnnnnnnnnnnnnnnnnnnnnnnnnnnnnnnnnnnnnnnnnnnnnnnnnnnnnnnnnnnnnnnnnnnnnnnnnnnnnnnnnnnnnnnnnnnnnnnnnnnnnnnnnnnnnnnnnnnnnnnnnnnnnnnnnnnnnnnnnnnnnnnnnnnnnnnnnnnnnnnnnnnnnnnnnnnnnnnnnnnnnnnnnnnnnnnnnnnnnnnnnnnnnnnnnnnnnnnnnnnnnnnnnnnnnnnnnnnnnnnnnnnnnnnnnnnnnnnnnnnnnnnnnnnnnnnnnnnnnnnnnnnnnnnnnnnnnnnnnnnnnnnnnnnnnnnnnnnnnnnnnnnnnnnnnnnnnnnnnnnnnnnnnnnnnnnnnnnnnnnnnnnnnnnnnnnnnnnnnnnnnnnnnnnnnnnnnnnnnnnnnnnnnnnnnnnnnnnnnnnnnnnnnnnnnnnnnnnnnnnnnnnnnnnnnnnnnnnnnnnnnnnnnnnnnnnnnnnnnnnnnnnnnnnnnnnnnnnnnnnnnnnnnnnnnnnnnnnnnnnnnnnnnnnnnnnnnnnnnnnnnnnnnnnnnnnnnnnnnnnnnnnnnnnnnnnnnnnnnnnnnnnnnnnnnnnnnnnnnnnnnnnnnnnnnnnnnnnnnnnnnnnnnnnnnnnnnnnnnnnnnnnnnnnnnnnnnnnnnnnnnnnnnnnnnnnnnnnnnnnnnnnnnnnnnnnnnnnnnnnnnnnnnnnnnnnnnnnnnnnnnnnnnnnnnnnnnnnnnnnnnnnnnnnnnnnnnnnnnnnnnnnnnnnnnnnnnnnnnnnnnnnnnnnnnnnnnnnnnnnnnnnnnnnnnnnnnnnnnnnnnnnnnnnnnnnnnnnnnnnnnnnnnnnnnnnnnnnnnnnnnnnnnnnnnnnnnnnnnnnnnnnnnnnnnnnnnnnnnnnnnnnnnnnnnnnnnnnnnnnnnnnnnnnnnnnnnnnnnnnnnnnnnnnnnnnnnnnnnnnnnnnnnnnnnnnnnnnnnnnnnnnnnnnnnnnnnnnnnnnnnnnnnnnnnnnnnnnnnnnnnnnnnnnnnnnnnnnnnnnnnnnnnnnnnnnnnnnnnnnnnnnnnnnnnnnnnnnnnnnnnnnnnnnnnnnnnnnnnnnnnnnnnnnnnnnnnnnnnnnnnnnnnnnnnnnnnnnnnnnnnnnnnnnnnnnnnnnnnnnnnnnnnnnnnnnnnnnnnnnnnnnnnnnnnnnnnnnnnnnnnnnnnnnnnnnnnnnnnnnnnnnnnnnnnnnnnnnnnnnnnnnnnnnnnnnnnnnnnnnnnnnnnnnnnnnnnnnnnnnnnnnnnnnnnnnnnnnnnnnnnnnnnnnnnnnnnnnnnnnnnnnnnnnnnnnnnnnnnnnnnnnnnnnnnnnnnnnnnnnnnnnnnnnnnnnnnnnnnnnnnnnnnnnnnnnnnnnnnnnnnnnnnnnnnnnnnnnnnnnnnnnnnnnnnnnnnnnnnnnnnnnnnnnnnnnnnnnnnnnnnnnnnnnnnnnnnnnnnnnnnnnnnnnnnnnnnnnnnnnnnnnnnnnnnnnnnnnnnnnnnnnnnnnnnnnnnnnnnnnnnnnnnnnnnnnnnnnnnnnnnnnnnnnnnnnnnnnnnnnnnnnnnnnnnnnnnnnnnnnnnnnnnnnnnnnnnnnnnnnnnnnnnnnnnnnnnnnnnnnnnnnnnnnnnnnnnnnnnnnnnnnnnnnnnnnnnnnnnnnnnnnnnnnnnnnnnnnnnnnnnnnnnnnnnnnnnnnnnnnnnnnnnnnnnnnnnnnnnnnnnnnnnnnnnnnnnnnnnnnnnnnnnnnnnnnnnnnnnnnnnnnnnnnnnnnnnnnnnnnnnnnnnnnnnnnnnnnnnnnnnnnnnnnnnnnnnnnnnnnnnnnnnnnnnnnnnnnnnnnnnnnnnnnnnnnnnnnnnnnnnnnnnnnnnnnnnnnnnnnnnnnnnnnnnnnnnnnnnnnnnnnnnnnnnnnnnnnnnnnnnnnnnnnnnnnnnnnnnnnnnnnnnnnnnnnnnnnnnnnnnnnnnnnnnnnnnnnnnnnnnnnnnnnnnnnnnnnnnnnnnnnnnnnnnnnnnnnnnnnnnnnnnnnnnnnnnnnnnnnnnnnnnnnnnnnnnnnnnnnnnnnnnnnnnnnnnnnnnnnnnnnnnnnnnnnnnnnnnnnnnnnnnnnnnnnnnnnnnnnnnnnnnnnnnnnnnnnnnnnnnnnnnnnnnnnnnnnnnnnnnnnnnnnnnnnnnnnnnnnnnnnnnnnnnnnnnnnnnnnnnnnnnnnnnnnnnnnnnnnnnnnnnnnnnnnnnnnnnnnnnnnnnnnnnnnnnnnnnnnnnnnnnnnnnnnnnnnnnnnnnnnnnnnnnnnnnnnnnnnnnnnnnnnnnnnnnnnnnnnnnnnnnnnnnnnnnnnnnnnnnnnnnnnnnnnnnnnnnnnnnnnnnnnnnnnnnnnnnnnnnnnnnnnnnnnnnnnnnnnnnnnnnnnnnnnnnnnnnnnnnnnnnnnnnnnnnnnnnnnnnnnnnnnnnnnnnnnnnnnnnnnnnnnnnnnnnnnnnnnnnnnnnnnnnnnnnnnnnnnnnnnnnnnnnnnnnnnnnnnnnnnnnnnnnnnnnnnnnnnnnnnnnnnnnnnnnnnnnnnnnnnnnnnnnnnnnnnnnnnnnnnnnnnnnnnnnnnnnnnnnnnnnnnnnnnnnnnnnnnnnnnnnnnnnnnnnnnnnnnnnnnnnnnnnnnnnnnnnnnnnnnnnnnnnnnnnnnnnnnnnnnnnnnnnnnnnnnnnnnnnnnnnnnnnnnnnnnnnnnnnnnnnnnnnnnnnnnnnnnnnnnnnnnnnnnnnnnnnnnnnnnnnnnnnnnnnnnnnnnnnnnnnnnnnnnnnnnnnnnnnnnnnnnnnnnnnnnnnnnnnnnnnnnnnnnnnnnnnnnnnnnnnnnnnnnnnnnnnnnnnnnnnnnnnnnnnnnnnnnnnnnnnnnnnnnnnnnnnnnnnnnnnnnnnnnnnnnnnnnnnnnnnnnnnnnnnnnnnnnnnnnnnnnnnnnnnnnnnnnnnnnnnnnnnnnnnnnnnnnnnnnnnnnnnnnnnnnnnnnnnnnnnnnnnnnnnnnnnnnnnnnnnnnnnnnnnnnnnnnnnnnnnnnnnnnnnnnnnnnnnnnnnnnnnnnnnnnnnnnnnnnnnnnnnnnnnnnnnnnnnnnnnnnnnnnnnnnnnnnnnnnnnnnnnnnnnnnnnnnnnnnnnnnnnnnnnnnnnnnnnnnnnnnnnnnnnnnnnnnnnnnnnnnnnnnnnnnnnnnnnnnnnnnnnnnnnnnnnnnnnnnnnnnnnnnnnnnnnnnnnnnnnnnnnnnnnnnnnnnnnnnnnnnnnnnnnnnnnnnnnnnnnnnnnnnnnnnnnnnnnnnnnnnnnnnnnnnnnnnnnnnnnnnnnnnnnnnnnnnnnnnnnnnnnnnnnnnnnnnnnnnnnnnnnnnnnnnnnnnnnnnnnnnnnnnnnnnnnnnnnnnnnnnnnnnnnnnnnnnnnnnnnnnnnnnnnnnnnnnnnnnnnnnnnnnnnnnnnnnnnnnnnnnnnnnnnnnnnnnnnnnnnnnnnnnnnnnnnnnnnnnnnnnnnnnnnnnnnnnnnnnnnnnnnnnnnnnnnnnnnnnnnnnnnnnnnnnnnnnnnnnnnnnnnnnnnnnnnnnnnnnnnnnnnnnnnnnnnnnnnnnnnnnnnnnnnnnnnnnnnnnnnnnnnnnnnnnnnnnnnnnnnnnnnnnnnnnnnnnnnnnnnnnnnnnnnnnnnnnnnnnnnnnnnnnnnnnnnnnnnnnnnnnnnnnnnnnnnnnnnnnnnnnnnnnnnnnnnnnnnnnnnnnnnnnnnnnnnnnnnnnnnnnnnnnnnnnnnnnnnnnnnnnnnnnnnnnnnnnnnnnnnnnnnnnnnnnnnnnnnnnnnnnnnnnnnnnnnnnnnnnnnnnnnnnnnnnnnnnnnnnnnnnnnnnnnnnnnnnnnnnnnnnnnnnnnnnnnnnnnnnnnnnnnnnnnnnnnnnnnnnnnnnnnnnnnnnnnnnnnnnnnnnnnnnnnnnnnnnnnnnnnnnnnnnnnnnnnnnnnnnnnnnnnnnnnnnnnnnnnnnnnnnnnnnnnnnnnnnnnnnnnnnnnnnnnnnnnnnnnnnnnnnnnnnnnnnnnnnnnnnnnnnnnnnnnnnnnnnnnnnnnnnnnnnnnnnnnnnnnnnnnnnnnnnnnnnnnnnnnnnnnnnnnnnnnnnnnnnnnnnnnnnnnnnnnnnnnnnnnnnnnnnnnnnnnnnnnnnnnnnnnnnnnnnnnnnnnnnnnnnnnnnnnnnnnnnnnnnnnnnnnnnnnnnnnnnnnnnnnnnnnnnnnnnnnnnnnnnnnnnnnnnnnnnnnnnnnnnnnnnnnnnnnnnnnnnnnnnnnnnnnnnnnnnnnnnnnnnnnnnnnnnnnnnnnnnnnnnnnnnnnnnnnnnnnnnnnnnnnnnnnnnnnnnnnnnnnnnnnnnnnnnnnnnnnnnnnnnnnnnnnnnnnnnnnnnnnnnnnnnnnnnnnnnnnnnnnnnnnnnnnnnnnnnnnnnnnnnnnnnnnnnnnnnnnnnnnnnnnnnnnnnnnnnnnnnnnnnnnnnnnnnnnnnnnnnnnnnnnnnnnnnnnnnnnnnnnnnnnnnnnnnnnnnnnnnnnnnnnnnnnnnnnnnnnnnnnnnnnnnnnnnnnnnnnnnnnnnnnnnnnnnnnnnnnnnnnnnnnnnnnnnnnnnnnnnnnnnnnnnnnnnnnnnnnnnnnnnnnnnnnnnnnnnnnnnnnnnnnnnnnnnnnnnnnnnnnnnnnnnnnnnnnnnnnnnnnnnnnnnnnnnnnnnnnnnnnnnnnnnnnnnnnnnnnnnnnnnnnnnnnnnnnnnnnnnnnnnnnnnnnnnnnnnnnnnnnnnnnnnnnnnnnnnnnnnnnnnnnnnnnnnnnnnnnnnnnnnnnnnnnnnnnnnnnnnnnnnnnnnnnnnnnnnnnnnnnnnnnnnnnnnnnnnnnnnnnnnnnnnnnnnnnnnnnnnnnnnnnnnnnnnnnnnnnnnnnnnnnnnnnnnnnnnnnnnnnnnnnnnnnnnnnnnnnnnnnnnnnnnnnnnnnnnnnnnnnnnnnnnnnnnnnnnnnnnnnnnnnnnnnnnnnnnnnnnnnnnnnnnnnnnnnnnnnnnnnnnnnnnnnnnnnnnnnnnnnnnnnnnnnnnnnnnnnnnnnnnnnnnnnnnnnnnnnnnnnnnnnnnnnnnnnnnnnnnnnnnnnnnnnnnnnnnnnnnnnnnnnnnnnnnnnnnnnnnnnnnnnnnnnnnnnnnnnnnnnnnnnnnnnnnnnnnnnnnnnnnnnnnnnnnnnnnnnnnnnnnnnnnnnnnnnnnnnnnnnnnnnnnnnnnnnnnnnnnnnnnnnnnnnnnnnnnnnnnnnnnnnnnnnnnnnnnnnnnnnnnnnnnnnnnnnnnnnnnnnnnnnnnnnnnnnnnnnnnnnnnnnnnnnnnnnnnnnnnnnnnnnnnnnnnnnnnnnnnnnnnnnnnnnnnnnnnnnnnnnnnnnnnnnnnnnnnnnnnnnnnnnnnnnnnnnnnnnnnnnnnnnnnnnnnnnnnnnnnnnnnnnnnnnnnnnnnnnnnnnnnnnnnnnnnnnnnnnnnnnnnnnnnnnnnnnnnnnnnnnnnnnnnnnnnnnnnnnnnnnnnnnnnnnnnnnnnnnnnnnnnnnnnnnnnnnnnnnnnnnnnnnnnnnnnnnnnnnnnnnnnnnnnnnnnnnnnnnnnnnnnnnnnnnnnnnnnnnnnnnnnnnnnnnnnnnnnnnnnnnnnnnnnnnnnnnnnnnnnnnnnnnnnnnnnnnnnnnnnnnnnnnnnnnnnnnnnnnnnnnnnnnnnnnnnnnnnnnnnnnnnnnnnnnnnnnnnnnnnnnnnnnnnnnnnnnnnnnnnnnnnnnnnnnnnnnnnnnnnnnnnnnnnnnnnnnnnnnnnnnnnnnnnnnnnnnnnnnnnnnnnnnnnnnnnnnnnnnnnnnnnnnnnnnnnnnnnnnnnnnnnnnnnnnnnnnnnnnnnnnnnnnnnnnnnnnnnnnnnnnnnnnnnnnnnnnnnnnnnnnnnnnnnnnnnnnnnnnnnnnnnnnnnnnnnnnnnnnnnnnnnnnnnnnnnnnnnnnnnnnnnnnnnnnnnnnnnnnnnnnnnnnnnnnnnnnnnnnnnnnnnnnnnnnnnnnnnnnnnnnnnnnnnnnnnnnnnnnnnnnnnnnnnnnnnnnnnnnnnnnnnnnnnnnnnnnnnnnnnnnnnnnnnnnnnnnnnnnnnnnnnnnnnnnnnnnnnnnnnnnnnnnnnnnnnnnnnnnnnnnnnnnnnnnnnnnnnnnnnnnnnnnnnnnnnnnnnnnnnnnnnnnnnnnnnnnnnnnnnnnnnnnnnnnnnnnnnnnnnnnnnnnnnnnnnnnnnnnnnnnnnnnnnnnnnnnnnnnnnnnnnnnnnnnnnnnnnnnnnnnnnnnnnnnnnnnnnnnnnnnnnnnnnnnnnnnnnnnnnnnnnnnnnnnnnnnnnnnnnnnnnnnnnnnnnnnnnnnnnnnnnnnnnnnnnnnnnnnnnnnnnnnnnnnnnnnnnnnnnnnnnnnnnnnnnnnnnnnnnnnnnnnnnnnnnnnnnnnnnnnnnnnnnnnnnnnnnnnnnnnnnnnnnnnnnnnnnnnnnnnnnnnnnnnnnnnnnnnnnnnnnnnnnnnnnnnnnnnnnnnnnnnnnnnnnnnnnnnnnnnnnnnnnnnnnnnnnnnnnnnnnnnnnnnnnnnnnnnnnnnnnnnnnnnnnnnnnnnnnnnnnnnnnnnnnnnnnnnnnnnnnnnnnnnnnnnnnnnnnnnnnnnnnnnnnnnnnnnnnnnnnnnnnnnnnnnnnnnnnnnnnnnnnnnnnnnnnnnnnnnnnnnnnnnnnnnnnnnnnnnnnnnnnnnnnnnnnnnnnnnnnnnnnnnnnnnnnnnnnnnnnnnnnnnnnnnnnnnnnnnnnnnnnnnnnnnnnnnnnnnnnnnnnnnnnnnnnnnnnnnnnnnnnnnnnnnnnnnnnnnnnnnnnnnnnnnnnnnnnnnnnnnnnnnnnnnnnnnnnnnnnnnnnnnnnnnnnnnnnnnnnnnnnnnnnnnnnnnnnnnnnnnnnnnnnnnnnnnnnnnnnnnnnnnnnnnnnnnnnnnnnnnnnnnnnnnnnnnnnnnnnnnnnnnnnnnnnnnnnnnnnnnnnnnnnnnnnnnnnnnnnnnnnnnnnnnnnnnnnnnnnnnnnnnnnnnnnnnnnnnnnnnnnnnnnnnnnnnnnnnnnnnnnnnnnnnnnnnnnnnnnnnnnnnnnnnnnnnnnnnnnnnnnnnnnnnnnnnnnnnnnnnnnnnnnnnnnnnnnnnnnnnnnnnnnnnnnnnnnnnnnnnnnnnnnnnnnnnnnnnnnnnnnnnnnnnnnnnnnnnnnnnnnnnnnnnnnnnnnnnnnnnnnnnnnnnnnnnnnnnnnnnnnnnnnnnnnnnnnnnnnnnnnnnnnnnnnnnnnnnnnnnnnnnnnnnnnnnnnnnnnnnnnnnnnnnnnnnnnnnnnnnnnnnnnnnnnnnnnnnnnnnnnnnnnnnnnnnnnnnnnnnnnnnnnnnnnnnnnnnnnnnnnnnnnnnnnnnnnnnnnnnnnnnnnnnnnnnnnnnnnnnnnnnnnnnnnnnnnnnnnnnnnnnnnnnnnnnnnnnnnnnnnnnnnnnnnnnnnnnnnnnnnnnnnnnnnnnnnnnnnnnnnnnnnnnnnnnnnnnnnnnnnnnnnnnnnnnnnnnnnnnnnnnnnnnnnnnnnnnnnnnnnnnnnnnnnnnnnnnnnnnnnnnnnnnnnnnnnnnnnnnnnnnnnnnnnnnnnnnnnnnnnnnnnnnnnnnnnnnnnnnnnnnnnnnnnnnnnnnnnnnnnnnnnnnnnnnnnnnnnnnnnnnnnnnnnnnnnnnnnnnnnnnnnnnnnnnnnnnnnnnnnnnnnnnnnnnnnnnnnnnnnnnnnnnnnnnnnnnnnnnnnnnnnnnnnnnnnnnnnnnnnnnnnnnnnnnnnnnnnnnnnnnnnnnnnnnnnnnnnnnnnnnnnnnnnnnnnnnnnnnnnnnnnnnnnnnnnnnnnnnnnnnnnnnnnnnnnnnnnnnnnnnnnnnnnnnnnnnnnnnnnnnnnnnnnnnnnnnnnnnnnnnnnnnnnnnnnnnnnnnnnnnnnnnnnnnnnnnnnnnnnnnnnnnnnnnnnnnnnnnnnnnnnnnnnnnnnnnnnnnnnnnnnnnnnnnnnnnnnnnnnnnnnnnnnnnnnnnnnnnnnnnnnnnnnnnnnnnnnnnnnnnnnnnnnnnnnnnnnnnnnnnnnnnnnnnnnnnnnnnnnnnnnnnnnnnnnnnnnnnnnnnnnnnnnnnnnnnnnnnnnnnnnnnnnnnnnnnnnnnnnnnnnnnnnnnnnnnnnnnnnnnnnnnnnnnnnnnnnnnnnnnnnnnnnnnnnnnnnnnnnnnnnnnnnnnnnnnnnnnnnnnnnnnnnnnnnnnnnnnnnnnnnnnnnnnnnnnnnnnnnnnnnnnnnnnnnnnnnnnnnnnnnnnnnnnnnnnnnnnnnnnnnnnnnnnnnnnnnnnnnnnnnnnnnnnnnnnnnnnnnnnnnnnnnnnnnnnnnnnnnnnnnnnnnnnnnnnnnnnnnnnnnnnnnnnnnnnnnnnnnnnnnnnnnnnnnnnnnnnnnnnnnnnnnnnnnnnnnnnnnnnnnnnnnnnnnnnnnnnnnnnnnnnnnnnnnnnnnnnnnnnnnnnnnnnnnnnnnnnnnnnnnnnnnnnnnnnnnnnnnnnnnnnnnnnnnnnnnnnnnnnnnnnnnnnnnnnnnnnnnnnnnnnnnnnnnnnnnnnnnnnnnnnnnnnnnnnnnnnnnnnnnnnnnnnnnnnnnnnnnnnnnnnnnnnnnnnnnnnnnnnnnnnnnnnnnnnnnnnnnnnnnnnnnnnnnnnnnnnnnnnnnnnnnnnnnnnnnnnnnnnnnnnnnnnnnnnnnnnnnnnnnnnnnnnnnnnnnnnnnnnnnnnnnnnnnnnnnnnnnnnnnnnnnnnnnnnnnnnnnnnnnnnnnnnnnnnnnnnnnnnnnnnnnnnnnnnnnnnnnnnnnnnnnnnnnnnnnnnnnnnnnnnnnnnnnnnnnnnnnnnnnnnnnnnnnnnnnnnnnnnnnnnnnnnnnnnnnnnnnnnnnnnnnnnnnnnnnnnnnnnnnnnnnnnnnnnnnnnnnnnnnnnnnnnnnnnnnnnnnnnnnnnnnnnnnnnnnnnnnnnnnnnnnnnnnnnnnnnnnnnnnnnnnnnnnnnnnnnnnnnnnnnnnnnnnnnnnnnnnnnnnnnnnnnnnnnnnnnnnnnnnnnnnnnnnnnnnnnnnnnnnnnnnnnnnnnnnnnnnnnnnnnnnnnnnnnnnnnnnnnnnnnnnnnnnnnnnnnnnnnnnnnnnnnnnnnnnnnnnnnnnnnnnnnnnnnnnnnnnnnnnnnnnnnnnnnnnnnnnnnnnnnnnnnnnnnnnnnnnnnnnnnnnnnnnnnnnnnnnnnnnnnnnnnnnnnnnnnnnnnnnnnnnnnnnnnnnnnnnnnnnnnnnnnnnnnnnnnnnnnnnnnnnnnnnnnnnnnnnnnnnnnnnnnnnnnnnnnnnnnnnnnnnnnnnnnnnnnnnnnnnnnnnnnnnnnnnnnnnnnnnnnnnnnnnnnnnnnnnnnnnnnnnnnnnnnnnnnnnnnnnnnnnnnnnnnnnnnnnnnnnnnnnnnnnnnnnnnnnnnnnnnnnnnnnnnnnnnnnnnnnnnnnnnnnnnnnnnnnnnnnnnnnnnnnnnnnnnnnnnnnnnnnnnnnnnnnnnnnnnnnnnnnnnnnnnnnnnnnnnnnnnnnnnnnnnnnnnnnnnnnnnnnnnnnnnnnnnnnnnnnnnnnnnnnnnnnnnnnnnnnnnnnnnnnnnnnnnnnnnnnnnnnnnnnnnnnnnnnnnnnnnnnnnnnnnnnnnnnnnnnnnnnnnnnnnnnnnnnnnnnnnnnnnnnnnnnnnnnnnnnnnnnnnnnnnnnnnnnnnnnnnnnnnnnnnnnnnnnnnnnnnnnnnnnnnnnnnnnnnnnnnnnnnnnnnnnnnnnnnnnnnnnnnnnnnnnnnnnnnnnnnnnnnnnnnnnnnnnnnnnnnnnnnnnnnnnnnnnnnnnnnnnnnnnnnnnnnnnnnnnnnnnnnnnnnnnnnnnnnnnnnnnnnnnnnnnnnnnnnnnnnnnnnnnnnnnnnnnnnnnnnnnnnnnnnnnnnnnnnnnnnnnnnnnnnnnnnnnnnnnnnnnnnnnnnnnnnnnnnnnnnnnnnnnnnnnnnnnnnnnnnnnnnnnnnnnnnnnnnnnnnnnnnnnnnnnnnnnnnnnnnnnnnnnnnnnnnnnnnnnnnnnnnnnnnnnnnnnnnnnnnnnnnnnnnnnnnnnnnnnnnnnnnnnnnnnnnnnnnnnnnnnnnnnnnnnnnnnnnnnnnnnnnnnnnnnnnnnnnnnnnnnnnnnnnnnnnnnnnnnnnnnnnnnnnnnnnnnnnnnnnnnnnnnnnnnnnnnnnnnnnnnnnnnnnnnnnnnnnnnnnnnnnnnnnnnnnnnnnnnnnnnnnnnnnnnnnnnnnnnnnnnnnnnnnnnnnnnnnnnnnnnnnnnnnnnnnnnnnnnnnnnnnnnnnnnnnnnnnnnnnnnnnnnnnnnnnnnnnnnnnnnnnnnnnnnnnnnnnnnnnnnnnnnnnnnnnnnnnnnnnnnnnnnnnnnnnnnnnnnnnnnnnnnnnnnnnnnnnnnnnnnnnnnnnnnnnnnnnnnnnnnnnnnnnnnnnnnnnnnnnnnnnnnnnnnnnnnnnnnnnnnnnnnnnnnnnnnnnnnnnnnnnnnnnnnnnnnnnnnnnnnnnnnnnnnnnnnnnnnnnnnnnnnnnnnnnnnnnnnnnnnnnnnnnnnnnnnnnnnnnnnnnnnnnnnnnnnnnnnnnnnnnnnnnnnnnnnnnnnnnnnnnnnnnnnnnnnnnnnnnnnnnnnnnnnnnnnnnnnnnnnnnnnnnnnnnnnnnnnnnnnnnnnnnnnnnnnnnnnnnnnnnnnnnnnnnnnnnnnnnnnnnnnnnnnnnnnnnnnnnnnnnnnnnnnnnnnnnnnnnnnnnnnnnnnnnnnnnnnnnnnnnnnnnnnnnnnnnnnnnnnnnnnnnnnnnnnnnnnnnnnnnnnnnnnnnnnnnnnnnnnnnnnnnnnnnnnnnnnnnnnnnnnnnnnnnnnnnnnnnnnnnnnnnnnnnnnnnnnnnnnnnnnnnnnnnnnnnnnnnnnnnnnnnnnnnnnnnnnnnnnnnnnnnnnnnnnnnnnnnnnnnnnnnnnnnnnnnnnnnnnnnnnnnnnnnnnnnnnnnnnnnnnnnnnnnnnnnnnnnnnnnnnnnnnnnnnnnnnnnnnnnnnnnnnnnnnnnnnnnnnnnnnnnnnnnnnnnnnnnnnnnnnnnnnnnnnnnnnnnnnnnnnnnnnnnnnnnnnnnnnnnnnnnnnnnnnnnnnnnnnnnnnnnnnnnnnnnnnnnnnnnnnnnnnnnnnnnnnnnnnnnnnnnnnnnnnnnnnnnnnnnnnnnnnnnnnnnnnnnnnnnnnnnnnnnnnnnnnnnnnnnnnnnnnnnnnnnnnnnnnnnnnnnnnnnnnnnnnnnnnnnnnnnnnnnnnnnnnnnnnnnnnnnnnnnnnnnnnnnnnnnnnnnnnnnnnnnnnnnnnnnnnnnnnnnnnnnnnnnnnnnnnnnnnnnnnnnnnnnnnnnnnnnnnnnnnnnnnnnnnnnnnnnnnnnnnnnnnnnnnnnnnnnnnnnnnnnnnnnnnnnnnnnnnnnnnnnnnnnnnnnnnnnnnnnnnnnnnnnnnnnnnnnnnnnnnnnnnnnnnnnnnnnnnnnnnnnnnnnnnnnnnnnnnnnnnnnnnnnnnnnnnnnnnnnnnnnnnnnnnnnnnnnnnnnnnnnnnnnnnnnnnnnnnnnnnnnnnnnnnnnnnnnnnnnnnnnnnnnnnnnnnnnnnnnnnnnnnnnnnnnnnnnnnnnnnnnnnnnnnnnnnnnnnnnnnnnnnnnnnnnnnnnnnnnnnnnnnnnnnnnnnnnnnnnnnnnnnnnnnnnnnnnnnnnnnnnnnnnnnnnnnnnnnnnnnnnnnnnnnnnnnnnnnnnnnnnnnnnnnnnnnnnnnnnnnnnnnnnnnnnnnnnnnnnnnnnnnnnnnnnnnnnnnnnnnnnnnnnnnnnnnnnnnnnnnnnnnnnnnnnnnnnnnnnnnnnnnnnnnnnnnnnnnnnnnnnnnnnnnnnnnnnnnnnnnnnnnnnnnnnnnnnnnnnnnnnnnnnnnnnnnnnnnnnnnnnnnnnnnnnnnnnnnnnnnnnnnnnnnnnnnnnnnnnnnnnnnnnnnnnnnnnnnnnnnnnnnnnnnnnnnnnnnnnnnnnnnnnnnnnnnnnnnnnnnnnnnnnnnnnnnnnnnnnnnnnnnnnnnnnnnnnnnnnnnnnnnnnnnnnnnnnnnnnnnnnnnnnnnnnnnnnnnnnnnnnnnnnnnnnnnnnnnnnnnnnnnnnnnnnnnnnnnnnnnnnnnnnnnnnnnnnnnnnnnnnnnnnnnnnnnnnnnnnnnnnnnnnnnnnnnnnnnnnnnnnnnnnnnnnnnnnnnnnnnnnnnnnnnnnnnnnnnnnnnnnnnnnnnnnnnnnnnnnnnnnnnnnnnnnnnnnnnnnnnnnnnnnnnnnnnnnnnnnnnnnnnnnnnnnnnnnnnnnnnnnnnnnnnnnnnnnnnnnnnnnnnnnnnnnnnnnnnnnnnnnnnnnnnnnnnnnnnnnnnnnnnnnnnnnnnnnnnnnnnnnnnnnnnnnnnnnnnnnnnnnnnnnnnnnnnnnnnnnnnnnnnnnnnnnnnnnnnnnnnnnnnnnnnnnnnnnnnnnnnnnnnnnnnnnnnnnnnnnnnnnnnnnnnnnnnnnnnnnnnnnnnnnnnnnnnnnnnnnnnnnnnnnnnnnnnnnnnnnnnnnnnnnnnnnnnnnnnnnnnnnnnnnnnnnnnnnnnnnnnnnnnnnnnnnnnnnnnnnnnnnnnnnnnnnnnnnnnnnnnnnnnnnnnnnnnnnnnnnnnnnnnnnnnnnnnnnnnnnnnnnnnnnnnnnnnnnnnnnnnnnnnnnnnnnnnnnnnnnnnnnnnnnnnnnnnnnnnnnnnnnnnnnnnnnnnnnnnnnnnnnnnnnnnnnnnnnnnnnnnnnnnnnnnnnnnnnnnnnnnnnnnnnnnnnnnnnnnnnnnnnnnnnnnnnnnnnnnnnnnnnnnnnnnnnnnnnnnnnnnnnnnnnnnnnnnnnnnnnnnnnnnnnnnnnnnnnnnnnnnnnnnnnnnnnnnnnnnnnnnnnnnnnnnnnnnnnnnnnnnnnnnnnnnnnnnnnnnnnnnnnnnnnnnnnnnnnnnnnnnnnnnnnnnnnnnnnnnnnnnnnnnnnnnnnnnnnnnnnnnnnnnnnnnnnnnnnnnnnnnnnnnnnnnnnnnnnnnnnnnnnnnnnnnnnnnnnnnnnnnnnnnnnnnnnnnnnnnnnnnnnnnnnnnnnnnnnnnnnnnnnnnnnnnnnnnnnnnnnnnnnnnnnnnnnnnnnnnnnnnnnnnnnnnnnnnnnnnnnnnnnnnnnnnnnnnnnnnnnnnnnnnnnnnnnnnnnnnnnnnnnnnnnnnnnnnnnnnnnnnnnnnnnnnnnnnnnnnnnnnnnnnnnnnnnnnnnnnnnnnnnnnnnnnnnnnnnnnnnnnnnnnnnnnnnnnnnnnnnnnnnnnnnnnnnnnnnnnnnnnnnnnnnnnnnnnnnnnnnnnnnnnnnnnnnnnnnnnnnnnnnnnnnnnnnnnnnnnnnnnnnnnnnnnnnnnnnnnnnnnnnnnnnnnnnnnnnnnnnnnnnnnnnnnnnnnnnnnnnnnnnnnnnnnnnnnnnnnnnnnnnnnnnnnnnnnnnnnnnnnnnnnnnnnnnnnnnnnnnnnnnnnnnnnnnnnnnnnnnnnnnnnnnnnnnnnnnnnnnnnnnnnnnnnnnnnnnnnnnnnnnnnnnnnnnnnnnnnnnnnnnnnnnnnnnnnnnnnnnnnnnnnnnnnnnnnnnnnnnnnnnnnnnnnnnnnnnnnnnnnnnnnnnnnnnnnnnnnnnnnnnnnnnnnnnnnnnnnnnnnnnnnnnnnnnnnnnnnnnnnnnnnnnnnnnnnnnnnnnnnnnnnnnnnnnnnnnnnnnnnnnnnnnnnnnnnnnnnnnnnnnnnnnnnnnnnnnnnnnnnnnnnnnnnnnnnnnnnnnnnnnnnnnnnnnnnnnnnnnnnnnnnnnnnnnnnnnnnnnnnnnnnnnnnnnnnnnnnnnnnnnnnnnnnnnnnnnnnnnnnnnnnnnnnnnnnnnnnnnnnnnnnnnnnnnnnnnnnnnnnnnnnnnnnnnnnnnnnnnnnnnnnnnnnnnnnnnnnnnnnnnnnnnnnnnnnnnnnnnnnnnnnnnnnnnnnnnnnnnnnnnnnnnnnnnnnnnnnnnnnnnnnnnnnnnnnnnnnnnnnnnnnnnnnnnnnnnnnnnnnnnnnnnnnnnnnnnnnnnnnnnnnnnnnnnnnnnnnnnnnnnnnnnnnnnnnnnnnnnnnnnnnnnnnnnnnnnnnnnnnnnnnnnnnnnnnnnnnnnnnnnnnnnnnnnnnnnnnnnnnnnnnnnnnnnnnnnnnnnnnnnnnnnnnnnnnnnnnnnnnnnnnnnnnnnnnnnnnnnnnnnnnnnnnnnnnnnnnnnnnnnnnnnnnnnnnnnnnnnnnnnnnnnnnnnnnnnnnnnnnnnnnnnnnnnnnnnnnnnnnnnnnnnnnnnnnnnnnnnnnnnnnnnnnnnnnnnnnnnnnnnnnnnnnnnnnnnnnnnnnnnnnnnnnnnnnnnnnnnnnnnnnnnnnnnnnnnnnnnnnnnnnnnnnnnnnnnnnnnnnnnnnnnnnnnnnnnnnnnnnnnnnnnnnnnnnnnnnnnnnnnnnnnnnnnnnnnnnnnnnnnnnnnnnnnnnnnnnnnnnnnnnnnnnnnnnnnnnnnnnnnnnnnnnnnnnnnnnnnnnnnnnnnnnnnnnnnnnnnnnnnnnnnnnnnnnnnnnnnnnnnnnnnnnnnnnnnnnnnnnnnnnnnnnnnnnnnnnnnnnnnnnnnnnnnnnnnnnnnnnnnnnnnnnnnnnnnnnnnnnnnnnnnnnnnnnnnnnnnnnnnnnnnnnnnnnnnnnnnnnnnnnnnnnnnnnnnnnnnnnnnnnnnnnnnnnnnnnnnnnnnnnnnnnnnnnnnnnnnnnnnnnnnnnnnnnnnnnnnnnnnnnnnnnnnnnnnnnnnnnnnnnnnnnnnnnnnnnnnnnnnnnnnnnnnnnnnnnnnnnnnnnnnnnnnnnnnnnnnnnnnnnnnnnnnnnnnnnnnnnnnnnnnnnnnnnnnnnnnnnnnnnnnnnnnnnnnnnnnnnnnnnnnnnnnnnnnnnnnnnnnnnnnnnnnnnnnnnnnnnnnnnnnnnnnnnnnnnnnnnnnnnnnnnnnnnnnnnnnnnnnnnnnnnnnnnnnnnnnnnnnnnnnnnnnnnnnnnnnnnnnnnnnnnnnnnnnnnnnnnnnnnnnnnnnnnnnnnnnnnnnnnnnnnnnnnnnnnnnnnnnnnnnnnnnnnnnnnnnnnnnnnnnnnnnnnnnnnnnnnnnnnnnnnnnnnnnnnnnnnnnnnnnnnnnnnnnnnnnnnnnnnnnnnnnnnnnnnnnnnnnnnnnnnnnnnnnnnnnnnnnnnnnnnnnnnnnnnnnnnnnnnnnnnnnnnnnnnnnnnnnnnnnnnnnnnnnnnnnnnnnnnnnnnnnnnnnnnnnnnnnnnnnnnnnnnnnnnnnnnnnnnnnnnnnnnnnnnnnnnnnnnnnnnnnnnnnnnnnnnnnnnnnnnnnnnnnnnnnnnnnnnnnnnnnnnnnnnnnnnnnnnnnnnnnnnnnnnnnnnnnnnnnnnnnnnnnnnnnnnnnnnnnnnnnnnnnnnnnnnnnnnnnnnnnnnnnnnnnnnnnnnnnnnnnnnnnnnnnnnnnnnnnnnnnnnnnnnnnnnnnnnnnnnnnnnnnnnnnnnnnnnnnnnnnnnnnnnnnnnnnnnnnnnnnnnnnnnnnnnnnnnnnnnnnnnnnnnnnnnnnnnnnnnnnnnnnnnnnnnnnnnnnnnnnnnnnnnnnnnnnnnnnnnnnnnnnnnnnnnnnnnnnnnnnnnnnnnnnnnnnnnnnnnnnnnnnnnnnnnnnnnnnnnnnnnnnnnnnnnnnnnnnnnnnnnnnnnnnnnnnnnnnnnnnnnnnnnnnnnnnnnnnnnnnnnnnnnnnnnnnnnnnnnnnnnnnnnnnnnnnnnnnnnnnnnnnnnnnnnnnnnnnnnnnnnnnnnnnnnnnnnnnnnnnnnnnnnnnnnnnnnnnnnnnnnnnnnnnnnnnnnnnnnnnnnnnnnnnnnnnnnnnnnnnnnnnnnnnnnnnnnnnnnnnnnnnnnnnnnnnnnnnnnnnnnnnnnnnnnnnnnnnnnnnnnnnnnnnnnnnnnnnnnnnnnnnnnnnnnnnnnnnnnnnnnnnnnnnnnnnnnnnnnnnnnnnnnnnnnnnnnnnnnnnnnnnnnnnnnnnnnnnnnnnnnnnnnnnnnnnnnnnnnnnnnnnnnnnnnnnnnnnnnnnnnnnnnnnnnnnnnnnnnnnnnnnnnnnnnnnnnnnnnnnnnnnnnnnnnnnnnnnnnnnnnnnnnnnnnnnnnnnnnnnnnnnnnnnnnnnnnnnnnnnnnnnnnnnnnnnnnnnnnnnnnnnnnnnnnnnnnnnnnnnnnnnnnnnnnnnnnnnnnnnnnnnnnnnnnnnnnnnnnnnnnnnnnnnnnnnnnnnnnnnnnnnnnnnnnnnnnnnnnnnnnnnnnnnnnnnnnnnnnnnnnnnnnnnnnnnnnnnnnnnnnnnnnnnnnnnnnnnnnnnnnnnnnnnnnnnnnnnnnnnnnnnnnnnnnnnnnnnnnnnnnnnnnnnnnnnnnnnnnnnnnnnnnnnnnnnnnnnnnnnnnnnnnnnnnnnnnnnnnnnnnnnnnnnnnnnnnnnnnnnnnnnnnnnnnnnnnnnnnnnnnnnnnnnnnnnnnnnnnnnnnnnnnnnnnnnnnnnnnnnnnnnnnnnnnnnnnnnnnnnnnnnnnnnnnnnnnnnnnnnnnnnnnnnnnnnnnnnnnnnnnnnnnnnnnnnnnnnnnnnnnnnnnnnnnnnnnnnnnnnnnnnnnnnnnnnnnnnnnnnnnnnnnnnnnnnnnnnnnnnnnnnnnnnnnnnnnnnnnnnnnnnnnnnnnnnnnnnnnnnnnnnnnnnnnnnnnnnnnnnnnnnnnnnnnnnnnnnnnnnnnnnnnnnnnnnnnnnnnnnnnnnnnnnnnnnnnnnnnnnnnnnnnnnnnnnnnnnnnnnnnnnnnnnnnnnnnnnnnnnnnnnnnnnnnnnnnnnnnnnnnnnnnnnnnnnnnnnnnnnnnnnnnnnnnnnnnnnnnnnnnnnnnnnnnnnnnnnnnnnnnnnnnnnnnnnnnnnnnnnnnnnnnnnnnnnnnnnnnnnnnnnnnnnnnnnnnnnnnnnnnnnnnnnnnnnnnnnnnnnnnnnnnnnnnnnnnnnnnnnnnnnnnnnnnnnnnnnnnnnnnnnnnnnnnnnnnnnnnnnnnnnnnnnnnnnnnnnnnnnnnnnnnnnnnnnnnnnnnnnnnnnnnnnnnnnnnnnnnnnnnnnnnnnnnnnnnnnnnnnnnnnnnnnnnnnnnnnnnnnnnnnnnnnnnnnnnnnnnnnnnnnnnnnnnnnnnnnnnnnnnnnnnnnnnnnnnnnnnnnnnnnnnnnnnnnnnnnnnnnnnnnnnnnnnnnnnnnnnnnnnnnnnnnnnnnnnnnnnnnnnnnnnnnnnnnnnnnnnnnnnnnnnnnnnnnnnnnnnnnnnnnnnnnnnnnnnnnnnnnnnnnnnnnnnnnnnnnnnnnnnnnnnnnnnnnnnnnnnnnnnnnnnnnnnnnnnnnnnnnnnnnnnnnnnnnnnnnnnnnnnnnnnnnnnnnnnnnnnnnnnnnnnnnnnnnnnnnnnnnnnnnnnnnnnnnnnnnnnnnnnnnnnnnnnnnnnnnnnnnnnnnnnnnnnnnnnnnnnnnnnnnnnnnnnnnnnnnnnnnnnnnnnnnnnnnnnnnnnnnnnnnnnnnnnnnnnnnnnnnnnnnnnnnnnnnnnnnnnnnnnnnnnnnnnnnnnnnnnnnnnnnnnnnnnnnnnnnnnnnnnnnnnnnnnnnnnnnnnnnnnnnnnnnnnnnnnnnnnnnnnnnnnnnnnnnnnnnnnnnnnnnnnnnnnnnnnnnnnnnnnnnnnnnnnnnnnnnnnnnnnnnnnnnnnnnnnnnnnnnnnnnnnnnnnnnnnnnnnnnnnnnnnnnnnnnnnnnnnnnnnnnnnnnnnnnnnnnnnnnnnnnnnnnnnnnnnnnnnnnnnnnnnnnnnnnnnnnnnnnnnnnnnnnnnnnnnnnnnnnnnnnnnnnnnnnnnnnnnnnnnnnnnnnnnnnnnnnnnnnnnnnnnnnnnnnnnnnnnnnnnnnnnnnnnnnnnnnnnnnnnnnnnnnnnnnnnnnnnnnnnnnnnnnnnnnnnnnnnnnnnnnnnnnnnnnnnnnnnnnnnnnnnnnnnnnnnnnnnnnnnnnnnnnnnnnnnnnnnnnnnnnnnnnnnnnnnnnnnnnnnnnnnnnnnnnnnnnnnnnnnnnnnnnnnnnnnnnnnnnnnnnnnnnnnnnnnnnnnnnnnnnnnnnnnnnnnnnnnnnnnnnnnnnnnnnnnnnnnnnnnnnnnnnnnnnnnnnnnnnnnnnnnnnnnnnnnnnnnnnnnnnnnnnnnnnnnnnnnnnnnnnnnnnnnnnnnnnnnnnnnnnnnnnnnnnnnnnnnnnnnnnnnnnnnnnnnnnnnnnnnnnnnnnnnnnnnnnnnnnnnnnnnnnnnnnnnnnnnnnnnnnnnnnnnnnnnnnnnnnnnnnnnnnnnnnnnnnnnnnnnnnnnnnnnnnnnnnnnnnnnnnnnnnnnnnnnnnnnnnnnnnnnnnnnnnnnnnnnnnnnnnnnnnnnnnnnnnnnnnnnnnnnnnnnnnnnnnnnnnnnnnnnnnnnnnnnnnnnnnnnnnnnnnnnnnnnnnnnnnnnnnnnnnnnnnnnnnnnnnnnnnnnnnnnnnnnnnnnnnnnnnnnnnnnnnnnnnnnnnnnnnnnnnnnnnnnnnnnnnnnnnnnnnnnnnnnnnnnnnnnnnnnnnnnnnnnnnnnnnnnnnnnnnnnnnnnnnnnnnnnnnnnnnnnnnnnnnnnnnnnnnnnnnnnnnnnnnnnnnnnnnnnnnnnnnnnnnnnnnnnnnnnnnnnnnnnnnnnnnnnnnnnnnnnnnnnnnnnnnnnnnnnnnnnnnnnnnnnnnnnnnnnnnnnnnnnnnnnnnnnnnnnnnnnnnnnnnnnnnnnnnnnnnnnnnnnnnnnnnnnnnnnnnnnnnnnnnnnnnnnnnnnnnnnnnnnnnnnnnnnnnnnnnnnnnnnnnnnnnnnnnnnnnnnnnnnnnnnnnnnnnnnnnnnnnnnnnnnnnnnnnnnnnnnnnnnnnnnnnnnnnnnnnnnnnnnnnnnnnnnnnnnnnnnnnnnnnnnnnnnnnnnnnnnnnnnnnnnnnnnnnnnnnnnnnnnnnnnnnnnnnnnnnnnnnnnnnnnnnnnnnnnnnnnnnnnnnnnnnnnnnnnnnnnnnnnnnnnnnnnnnnnnnnnnnnnnnnnnnnnnnnnnnnnnnnnnnnnnnnnnnnnnnnnnnnnnnnnnnnnnnnnnnnnnnnnnnnnnnnnnnnnnnnnnnnnnnnnnnnnnnnnnnnnnnnnnnnnnnnnnnnnnnnnnnnnnnnnnnnnnnnnnnnnnnnnnnnnnnnnnnnnnnnnnnnnnnnnnnnnnnnnnnnnnnnnnnnnnnnnnnnnnnnnnnnnnnnnnnnnnnnnnnnnnnnnnnnnnnnnnnnnnnnnnnnnnnnnnnnnnnnnnnnnnnnnnnnnnnnnnnnnnnnnnnnnnnnnnnnnnnnnnnnnnnnnnnnnnnnnnnnnnnnnnnnnnnnnnnnnnnnnnnnnnnnnnnnnnnnnnnnnnnnnnnnnnnnnnnnnnnnnnnnnnnnnnnnnnnnnnnnnnnnnnnnnnnnnnnnnnnnnnnnnnnnnnnnnnnnnnnnnnnnnnnnnnnnnnnnnnnnnnnnnnnnnnnnnnnnnnnnnnnnnnnnnnnnnnnnnnnnnnnnnnnnnnnnnnnnnnnnnnnnnnnnnnnnnnnnnnnnnnnnnnnnnnnnnnnnnnnnnnnnnnnnnnnnnnnnnnnnnnnnnnnnnnnnnnnnnnnnnnnnnnnnnnnnnnnnnnnnnnnnnnnnnnnnnnnnnnnnnnnnnnnnnnnnnnnnnnnnnnnnnnnnnnnnnnnnnnnnnnnnnnnnnnnnnnnnnnnnnnnnnnnnnnnnnnnnnnnnnnnnnnnnnnnnnnnnnnnnnnnnnnnnnnnnnnnnnnnnnnnnnnnnnnnnnnnnnnnnnnnnnnnnnnnnnnnnnnnnnnnnnnnnnnnnnnnnnnnnnnnnnnnnnnnnnnnnnnnnnnnnnnnnnnnnnnnnnnnnnnnnnnnnnnnnnnnnnnnnnnnnnnnnnnnnnnnnnnnnnnnnnnnnnnnnnnnnnnnnnnnnnnnnnnnnnnnnnnnnnnnnnnnnnnnnnnnnnnnnnnnnnnnnnnnnnnnnnnnnnnnnnnnnnnnnnnnnnnnnnnnnnnnnnnnnnnnnnnnnnnnnnnnnnnnnnnnnnnnnnnnnnnnnnnnnnnnnnnnnnnnnnnnnnnnnnnnnnnnnnnnnnnnnnnnnnnnnnnnnnnnnnnnnnnnnnnnnnnnnnnnnnnnnnnnnnnnnnnnnnnnnnnnnnnnnnnnnnnnnnnnnnnnnnnnnnnnnnnnnnnnnnnnnnnnnnnnnnnnnnnnnnnnnnnnnnnnnnnnnnnnnnnnnnnnnnnnnnnnnnnnnnnnnnnnnnnnnnnnnnnnnnnnnnnnnnnnnnnnnnnnnnnnnnnnnnnnnnnnnnnnnnnnnnnnnnnnnnnnnnnnnnnnnnnnnnnnnnnnnnnnnnnnnnnnnnnnnnnnnnnnnnnnnnnnnnnnnnnnnnnnnnnnnnnnnnnnnnnnnnnnnnnnnnnnnnnnnnnnnnnnnnnnnnnnnnnnnnnnnnnnnnnnnnnnnnnnnnnnnnnnnnnnnnnnnnnnnnnnnnnnnnnnnnnnnnnnnnnnnnnnnnnnnnnnnnnnnnnnnnnnnnnnnnnnnnnnnnnnnnnnnnnnnnnnnnnnnnnnnnnnnnnnnnnnnnnnnnnnnnnnnnnnnnnnnnnnnnnnnnnnnnnnnnnnnnnnnnnnnnnnnnnnnnnnnnnnnnnnnnnnnnnnnnnnnnnnnnnnnnnnnnnnnnnnnnnnnnnnnnnnnnnnnnnnnnnnnnnnnnnnnnnnnnnnnnnnnnnnnnnnnnnnnnnnnnnnnnnnnnnnnnnnnnnnnnnnnnnnnnnnnnnnnnnnnnnnnnnnnnnnnnnnnnnnnnnnnnnnnnnnnnnnnnnnnnnnnnnnnnnnnnnnnnnnnnnnnnnnnnnnnnnnnnnnnnnnnnnnnnnnnnnnnnnnnnnnnnnnnnnnnnnnnnnnnnnnnnnnnnnnnnnnnnnnnnnnnnnnnnnnnnnnnnnnnnnnnnnnnnnnnnnnnnnnnnnnnnnnnnnnnnnnnnnnnnnnnnnnnnnnnnnnnnnnnnnnnnnnnnnnnnnnnnnnnnnnnnnnnnnnnnnnnnnnnnnnnnnnnnnnnnnnnnnnnnnnnnnnnnnnnnnnnnnnnnnnnnnnnnnnnnnnnnnnnnnnnnnnnnnnnnnnnnnnnnnnnnnnnnnnnnnnnnnnnnnnnnnnnnnnnnnnnnnnnnnnnnnnnnnnnnnnnnnnnnnnnnnnnnnnnnnnnnnnnnnnnnnnnnnnnnnnnnnnnnnnnnnnnnnnnnnnnnnnnnnnnnnnnnnnnnnnnnnnnnnnnnnnnnnnnnnnnnnnnnnnnnnnnnnnnnnnnnnnnnnnnnnnnnnnnnnnnnnnnnnnnnnnnnnnnnnnnnnnnnnnnnnnnnnnnnnnnnnnnnnnnnnnnnnnnnnnnnnnnnnnnnnnnnnnnnnnnnnnnnnnnnnnnnnnnnnnnnnnnnnnnnnnnnnnnnnnnnnnnnnnnnnnnnnnnnnnnnnnnnnnnnnnnnnnnnnnnnnnnnnnnnnnnnnnnnnnnnnnnnnnnnnnnnnnnnnnnnnnnnnnnnnnnnnnnnnnnnnnnnnnnnnnnnnnnnnnnnnnnnnnnnnnnnnnnnnnnnnnnnnnnnnnnnnnnnnnnnnnnnnnnnnnnnnnnnnnnnnnnnnnnnnnnnnnnnnnnnnnnnnnnnnnnnnnnnnnnnnnnnnnnnnnnnnnnnnnnnnnnnnnnnnnnnnnnnnnnnnnnnnnnnnnnnnnnnnnnnnnnnnnnnnnnnnnnnnnnnnnnnnnnnnnnnnnnnnnnnnnnnnnnnnnnnnnnnnnnnnnnnnnnnnnnnnnnnnnnnnnnnnnnnnnnnnnnnnnnnnnnnnnnnnnnnnnnnnnnnnnnnnnnnnnnnnnnnnnnnnnnnnnnnnnnnnnnnnnnnnnnnnnnnnnnnnnnnnnnnnnnnnnnnnnnnnnnnnnnnnnnnnnnnnnnnnnnnnnnnnnnnnnnnnnnnnnnnnnnnnnnnnnnnnnnnnnnnnnnnnnnnnnnnnnnnnnnnnnnnnnnnnnnnnnnnnnnnnnnnnnnnnnnnnnnnnnnnnnnnnnnnnnnnnnnnnnnnnnnnnnnnnnnnnnnnnnnnnnnnnnnnnnnnnnnnnnnnnnnnnnnnnnnnnnnnnnnnnnnnnnnnnnnnnnnnnnnnnnnnnnnnnnnnnnnnnnnnnnnnnnnnnnnnnnnnnnnnnnnnnnnnnnnnnnnnnnnnnnnnnnnnnnnnnnnnnnnnnnnnnnnnnnnnnnnnnnnnnnnnnnnnnnnnnnnnnnnnnnnnnnnnnnnnnnnnnnnnnnnnnnnnnnnnnnnnnnnnnnnnnnnnnnnnnnnnnnnnnnnnnnnnnnnnnnnnnnnnnnnnnnnnnnnnnnnnnnnnnnnnnnnnnnnnnnnnnnnnnnnnnnnnnnnnnnnnnnnnnnnnnnnnnnnnnnnnnnnnnnnnnnnnnnnnnnnnnnnnnnnnnnnnnnnnnnnnnnnnnnnnnnnnnnnnnnnnnnnnnnnnnnnnnnnnnnnnnnnnnnnnnnnnnnnnnnnnnnnnnnnnnnnnnnnnnnnnnnnnnnnnnnnnnnnnnnnnnnnnnnnnnnnnnnnnnnnnnnnnnnnnnnnnnnnnnnnnnnnnnnnnnnnnnnnnnnnnnnnnnnnnnnnnnnnnnnnnnnnnnnnnnnnnnnnnnnnnnnnnnnnnnnnnnnnnnnnnnnnnnnnnnnnnnnnnnnnnnnnnnnnnnnnnnnnnnnnnnnnnnnnnnnnnnnnnnnnnnnnnnnnnnnnnnnnnnnnnnnnnnnnnnnnnnnnnnnnnnnnnnnnnnnnnnnnnnnnnnnnnnnnnnnnnnnnnnnnnnnnnnnnnnnnnnnnnnnnnnnnnnnnnnnnnnnnnnnnnnnnnnnnnnnnnnnnnnnnnnnnnnnnnnnnnnnnnnnnnnnnnnnnnnnnnnnnnnnnnnnnnnnnnnnnnnnnnnnnnnnnnnnnnnnnnnnnnnnnnnnnnnnnnnnnnnnnnnnnnnnnnnnnnnnnnnnnnnnnnnnnnnnnnnnnnnnnnnnnnnnnnnnnnnnnnnnnnnnnnnnnnnnnnnnnnnnnnnnnnnnnnnnnnnnnnnnnnnnnnnnnnnnnnnnnnnnnnnnnnnnnnnnnnnnnnnnnnnnnnnnnnnnnnnnnnnnnnnnnnnnnnnnnnnnnnnnnnnnnnnnnnnnnnnnnnnnnnnnnnnnnnnnnnnnnnnnnnnnnnnnnnnnnnnnnnnnnnnnnnnnnnnnnnnnnnnnnnnnnnnnnnnnnnnnnnnnnnnnnnnnnnnnnnnnnnnnnnnnnnnnnnnnnnnnnnnnnnnnnnnnnnnnnnnnnnnnnnnnnnnnnnnnnnnnnnnnnnnnnnnnnnnnnnnnnnnnnnnnnnnnnnnnnnnnnnnnnnnnnnnnnnnnnnnnnnnnnnnnnnnnnnnnnnnnnnnnnnnnnnnnnnnnnnnnnnnnnnnnnnnnnnnnnnnnnnnnnnnnnnnnnnnnnnnnnnnnnnnnnnnnnnnnnnnnnnnnnnnnnnnnnnnnnnnnnnnnnnnnnnnnnnnnnnnnnnnnnnnnnnnnnnnnnnnnnnnnnnnnnnnnnnnnnnnnnnnnnnnnnnnnnnnnnnnnnnnnnnnnnnnnnnnnnnnnnnnnnnnnnnnnnnnnnnnnnnnnnnnnnnnnnnnnnnnnnnnnnnnnnnnnnnnnnnnnnnnnnnnnnnnnnnnnnnnnnnnnnnnnnnnnnnnnnnnnnnnnnnnnnnnnnnnnnnnnnnnnnnnnnnnnnnnnnnnnnnnnnnnnnnnnnnnnnnnnnnnnnnnnnnnnnnnnnnnnnnnnnnnnnnnnnnnnnnnnnnnnnnnnnnnnnnnnnnnnnnnnnnnnnnnnnnnnnnnnnnnnnnnnnnnnnnnnnnnnnnnnnnnnnnnnnnnnnnnnnnnnnnnnnnnnnnnnnnnnnnnnnnnnnnnnnnnnnnnnnnnnnnnnnnnnnnnnnnnnnnnnnnnnnnnnnnnnnnnnnnnnnnnnnnnnnnnnnnnnnnnnnnnnnnnnnnnnnnnnnnnnnnnnnnnnnnnnnnnnnnnnnnnnnnnnnnnnnnnnnnnnnnnnnnnnnnnnnnnnnnnnnnnnnnnnnnnnnnnnnnnnnnnnnnnnnnnnnnnnnnnnnnnnnnnnnnnnnnnnnnnnnnnnnnnnnnnnnnnnnnnnnnnnnnnnnnnnnnnnnnnnnnnnnnnnnnnnnnnnnnnnnnnnnnnnnnnnnnnnnnnnnnnnnnnnnnnnnnnnnnnnnnnnnnnnnnnnnnnnnnnnnnnnnnnnnnnnnnnnnnnnnnnnnnnnnnnnnnnnnnnnnnnnnnnnnnnnnnnnnnnnnnnnnnnnnnnnnnnnnnnnnnnnnnnnnnnnnnnnnnnnnnnnnnnnnnnnnnnnnnnnnnnnnnnnnnnnnnnnnnnnnnnnnnnnnnnnnnnnnnnnnnnnnnnnnnnnnnnnnnnnnnnnnnnnnnnnnnnnnnnnnnnnnnnnnnnnnnnnnnnnnnnnnnnnnnnnnnnnnnnnnnnnnnnnnnnnnnnnnnnnnnnnnnnnnnnnnnnnnnnnnnnnnnnnnnnnnnnnnnnnnnnnnnnnnnnnnnnnnnnnnnnnnnnnnnnnnnnnnnnnnnnnnnnnnnnnnnnnnnnnnnnnnnnnnnnnnnnnnnnnnnnnnnnnnnnnnnnnnnnnnnnnnnnnnnnnnnnnnnnnnnnnnnnnnnnnnnnnnnnnnnnnnnnnnnnnnnnnnnnnnnnnnnnnnnnnnnnnnnnnnnnnnnnnnnnnnnnnnnnnnnnnnnnnnnnnnnnnnnnnnnnnnnnnnnnnnnnnnnnnnnnnnnnnnnnnnnnnnnnnnnnnnnnnnnnnnnnnnnnnnnnnnnnnnnnnnnnnnnnnnnnnnnnnnnnnnnnnnnnnnnnnnnnnnnnnnnnnnnnnnnnnnnnnnnnnnnnnnnnnnnnnnnnnnnnnnnnnnnnnnnnnnnnnnnnnnnnnnnnnnnnnnnnnnnnnnnnnnnnnnnnnnnnnnnnnnnnnnnnnnnnnnnnnnnnnnnnnnnnnnnnnnnnnnnnnnnnnnnnnnnnnnnnnnnnnnnnnnnnnnnnnnnnnnnnnnnnnnnnnnnnnnnnnnnnnnnnnnnnnnnnnnnnnnnnnnnnnnnnnnnnnnnnnnnnnnnnnnnnnnnnnnnnnnnnnnnnnnnnnnnnnnnnnnnnnnnnnnnnnnnnnnnnnnnnnnnnnnnnnnnnnnnnnnnnnnnnnnnnnnnnnnnnnnnnnnnnnnnnnnnnnnnnnnnnnnnnnnnnnnnnnnnnnnnnnnnnnnnnnnnnnnnnnnnnnnnnnnnnnnnnnnnnnnnnnnnnnnnnnnnnnnnnnnnnnnnnnnnnnnnnnnnnnnnnnnnnnnnnnnnnnnnnnnnnnnnnnnnnnnnnnnnnnnnnnnnnnnnnnnnnnnnnnnnnnnnnnnnnnnnnnnnnnnnnnnnnnnnnnnnnnnnnnnnnnnnnnnnnnnnnnnnnnnnnnnnnnnnnnnnnnnnnnnnnnnnnnnnnnnnnnnnnnnnnnnnnnnnnnnnnnnnnnnnnnnnnnnnnnnnnnnnnnnnnnnnnnnnnnnnnnnnnnnnnnnnnnnnnnnnnnnnnnnnnnnnnnnnnnnnnnnnnnnnnnnnnnnnnnnnnnnnnnnnnnnnnnnnnnnnnnnnnnnnnnnnnnnnnnnnnnnnnnnnnnnnnnnnnnnnnnnnnnnnnnnnnnnnnnnnnnnnnnnnnnnnnnnnnnnnnnnnnnnnnnnnnnnnnnnnnnnnnnnnnnnnnnnnnnnnnnnnnnnnnnnnnnnnnnnnnnnnnnnnnnnnnnnnnnnnnnnnnnnnnnnnnnnnnnnnnnnnnnnnnnnnnnnnnnnnnnnnnnnnnnnnnnnnnnnnnnnnnnnnnnnnnnnnnnnnnnnnnnnnnnnnnnnnnnnnnnnnnnnnnnnnnnnnnnnnnnnnnnnnnnnnnnnnnnnnnnnnnnnnnnnnnnnnnnnnnnnnnnnnnnnnnnnnnnnnnnnnnnnnnnnnnnnnnnnnnnnnnnnnnnnnnnnnnnnnnnnnnnnnnnnnnnnnnnnnnnnnnnnnnnnnnnnnnnnnnnnnnnnnnnnnnnnnnnnnnnnnnnnnnnnnnnnnnnnnnnnnnnnnnnnnnnnnnnnnnnnnnnnnnnnnnnnnnnnnnnnnnnnnnnnnnnnnnnnnnnnnnnnnnnnnnnnnnnnnnnnnnnnnnnnnnnnnnnnnnnnnnnnnnnnnnnnnnnnnnnnnnnnnnnnnnnnnnnnnnnnnnnnnnnnnnnnnnnnnnnnnnnnnnnnnnnnnnnnnnnnnnnnnnnnnnnnnnnnnnnnnnnnnnnnnnnnnnnnnnnnnnnnnnnnnnnnnnnnnnnnnnnnnnnnnnnnnnnnnnnnnnnnnnnnnnnnnnnnnnnnnnnnnnnnnnnnnnnnnnnnnnnnnnnnnnnnnnnnnnnnnnnnnnnnnnnnnnnnnnnnnnnnnnnnnnnnnnnnnnnnnnnnnnnnnnnnnnnnnnnnnnnnnnnnnnnnnnnnnnnnnnnnnnnnnnnnnnnnnnnnnnnnnnnnnnnnnnnnnnnnnnnnnnnnnnnnnnnnnnnnnnnnnnnnnnnnnnnnnnnnnnnnnnnnnnnnnnnnnnnnnnnnnnnnnnnnnnnnnnnnnnnnnnnnnnnnnnnnnnnnnnnnnnnnnnnnnnnnnnnnnnnnnnnnnnnnnnnnnnnnnnnnnnnnnnnnnnnnnnnnnnnnnnnnnnnnnnnnnnnnnnnnnnnnnnnnnnnnnnnnnnnnnnnnnnnnnnnnnnnnnnnnnnnnnnnnnnnnnnnnnnnnnnnnnnnnnnnnnnnnnnnnnnnnnnnnnnnnnnnnnnnnnnnnnnnnnnnnnnnnnnnnnnnnnnnnnnnnnnnnnnnnnnnnnnnnnnnnnnnnnnnnnnnnnnnnnnnnnnnnnnnnnnnnnnnnnnnnnnnnnnnnnnnnnnnnnnnnnnnnnnnnnnnnnnnnnnnnnnnnnnnnnnnnnnnnnnnnnnnnnnnnnnnnnnnnnnnnnnnnnnnnnnnnnnnnnnnnnnnnnnnnnnnnnnnnnnnnnnnnnnnnnnnnnnnnnnnnnnnnnnnnnnnnnnnnnnnnnnnnnnnnnnnnnnnnnnnnnnnnnnnnnnnnnnnnnnnnnnnnnnnnnnnnnnnnnnnnnnnnnnnnnnnnnnnnnnnnnnnnnnnnnnnnnnnnnnnnnnnnnnnnnnnnnnnnnnnnnnnnnnnnnnnnnnnnnnnnnnnnnnnnnnnnnnnnnnnnnnnnnnnnnnnnnnnnnnnnnnnnnnnnnnnnnnnnnnnnnnnnnnnnnnnnnnnnnnnnnnnnnnnnnnnnnnnnnnnnnnnnnnnnnnnnnnnnnnnnnnnnnnnnnnnnnnnnnnnnnnnnnnnnnnnnnnnnnnnnnnnnnnnnnnnnnnnnnnnnnnnnnnnnnnnnnnnnnnnnnnnnnnnnnnnnnnnnnnnnnnnnnnnnnnnnnnnnnnnnnnnnnnnnnnnnnnnnnnnnnnnnnnnnnnnnnnnnnnnnnnnnnnnnnnnnnnnnnnnnnnnnnnnnnnnnnnnnnnnnnnnnnnnnnnnnnnnnnnnnnnnnnnnnnnnnnnnnnnnnnnnnnnnnnnnnnnnnnnnnnnnnnnnnnnnnnnnnnnnnnnnnnnnnnnnnnnnnnnnnnnnnnnnnnnnnnnnnnnnnnnnnnnnnnnnnnnnnnnnnnnnnnnnnnnnnnnnnnnnnnnnnnnnnnnnnnnnnnnnnnnnnnnnnnnnnnnnnnnnnnnnnnnnnnnnnnnnnnnnnnnnnnnnnnnnnnnnnnnnnnnnnnnnnnnnnnnnnnnnnnnnnnnnnnnnnnnnnnnnnnnnnnnnnnnnnnnnnnnnnnnnnnnnnnnnnnnnnnnnnnnnnnnnnnnnnnnnnnnnnnnnnnnnnnnnnnnnnnnnnnnnnnnnnnnnnnnnnnnnnnnnnnnnnnnnnnnnnnnnnnnnnnnnnnnnnnnnnnnnnnnnnnnnnnnnnnnnnnnnnnnnnnnnnnnnnnnnnnnnnnnnnnnnnnnnnnnnnnnnnnnnnnnnnnnnnnnnnnnnnnnnnnnnnnnnnnnnnnnnnnnnnnnnnnnnnnnnnnnnnnnnnnnnnnnnnnnnnnnnnnnnnnnnnnnnnnnnnnnnnnnnnnnnnnnnnnnnnnnnnnnnnnnnnnnnnnnnnnnnnnnnnnnnnnnnnnnnnnnnnnnnnnnnnnnnnnnnnnnnnnnnnnnnnnnnnnnnnnnnnnnnnnnnnnnnnnnnnnnnnnnnnnnnnnnnnnnnnnnnnnnnnnnnnnnnnnnnnnnnnnnnnnnnnnnnnnnnnnnnnnnnnnnnnnnnnnnnnnnnnnnnnnnnnnnnnnnnnnnnnnnnnnnnnnnnnnnnnnnnnnnnnnnnnnnnnnnnnnnnnnnnnnnnnnnnnnnnnnnnnnnnnnnnnnnnnnnnnnnnnnnnnnnnnnnnnnnnnnnnnnnnnnnnnnnnnnnnnnnnnnnnnnnnnnnnnnnnnnnnnnnnnnnnnnnnnnnnnnnnnnnnnnnnnnnnnnnnnnnnnnnnnnnnnnnnnnnnnnnnnnnnnnnnnnnnnnnnnnnnnnnnnnnnnnnnnnnnnnnnnnnnnnnnnnnnnnnnnnnnnnnnnnnnnnnnnnnnnnnnnnnnnnnnnnnnnnnnnnnnnnnnnnnnnnnnnnnnnnnnnnnnnnnnnnnnnnnnnnnnnnnnnnnnnnnnnnnnnnnnnnnnnnnnnnnnnnnnnnnnnnnnnnnnnnnnnnnnnnnnnnnnnnnnnnnnnnnnnnnnnnnnnnnnnnnnnnnnnnnnnnnnnnnnnnnnnnnnnnnnnnnnnnnnnnnnnnnnnnnnnnnnnnnnnnnnnnnnnnnnnnnnnnnnnnnnnnnnnnnnnnnnnnnnnnnnnnnnnnnnnnnnnnnnnnnnnnnnnnnnnnnnnnnnnnnnnnnnnnnnnnnnnnnnnnnnnnnnnnnnnnnnnnnnnnnnnnnnnnnnnnnnnnnnnnnnnnnnnnnnnnnnnnnnnnnnnnnnnnnnnnnnnnnnnnnnnnnnnnnnnnnnnnnnnnnnnnnnnnnnnnnnnnnnnnnnnnnnnnnnnnnnnnnnnnnnnnnnnnnnnnnnnnnnnnnnnnnnnnnnnnnnnnnnnnnnnnnnnnnnnnnnnnnnnnnnnnnnnnnnnnnnnnnnnnnnnnnnnnnnnnnnnnnnnnnnnnnnnnnnnnnnnnnnnnnnnnnnnnnnnnnnnnnnnnnnnnnnnnnnnnnnnnnnnnnnnnnnnnnnnnnnnnnnnnnnnnnnnnnnnnnnnnnnnnnnnnnnnnnnnnnnnnnnnnnnnnnnnnnnnnnnnnnnnnnnnnnnnnnnnnnnnnnnnnnnnnnnnnnnnnnnnnnnnnnnnnnnnnnnnnnnnnnnnnnnnnnnnnnnnnnnnnnnnnnnnnnnnnnnnnnnnnnnnnnnnnnnnnnnnnnnnnnnnnnnnnnnnnnnnnnnnnnnnnnnnnnnnnnnnnnnnnnnnnnnnnnnnnnnnnnnnnnnnnnnnnnnnnnnnnnnnnnnnnnnnnnnnnnnnnnnnnnnnnnnnnnnnnnnnnnnnnnnnnnnnnnnnnnnnnnnnnnnnnnnnnnnnnnnnnnnnnnnnnnnnnnnnnnnnnnnnnnnnnnnnnnnnnnnnnnnnnnnnnnnnnnnnnnnnnnnnnnnnnnnnnnnnnnnnnnnnnnnnnnnnnnnnnnnnnnnnnnnnnnnnnnnnnnnnnnnnnnnnnnnnnnnnnnnnnnnnnnnnnnnnnnnnnnnnnnnnnnnnnnnnnnnnnnnnnnnnnnnnnnnnnnnnnnnnnnnnnnnnnnnnnnnnnnnnnnnnnnnnnnnnnnnnnnnnnnnnnnnnnnnnnnnnnnnnnnnnnnnnnnnnnnnnnnnnnnnnnnnnnnnnnnnnnnnnnnnnnnnnnnnnnnnnnnnnnnnnnnnnnnnnnnnnnnnnnnnnnnnnnnnnnnnnnnnnnnnnnnnnnnnnnnnnnnnnnnnnnnnnnnnnnnnnnnnnnnnnnnnnnnnnnnnnnnnnnnnnnnnnnnnnnnnnnnnnnnnnnnnnnnnnnnnnnnnnnnnnnnnnnnnnnnnnnnnnnnnnnnnnnnnnnnnnnnnnnnnnnnnnnnnnnnnnnnnnnnnnnnnnnnnnnnnnnnnnnnnnnnnnnnnnnnnnnnnnnnnnnnnnnnnnnnnnnnnnnnnnnnnnnnnnnnnnnnnnnnnnnnnnnnnnnnnnnnnnnnnnnnnnnnnnnnnnnnnnnnnnnnnnnnnnnnnnnnnnnnnnnnnnnnnnnnnnnnnnnnnnnnnnnnnnnnnnnnnnnnnnnnnnnnnnnnnnnnnnnnnnnnnnnnnnnnnnnnnnnnnnnnnnnnnnnnnnnnnnnnnnnnnnnnnnnnnnnnnnnnnnnnnnnnnnnnnnnnnnnnnnnnnnnnnnnnnnnnnnnnnnnnnnnnnnnnnnnnnnnnnnnnnnnnnnnnnnnnnnnnnnnnnnnnnnnnnnnnnnnnnnnnnnnnnnnnnnnnnnnnnnnnnnnnnnnnnnnnnnnnnnnnnnnnnnnnnnnnnnnnnnnnnnnnnnnnnnnnnnnnnnnnnnnnnnnnnnnnnnnnnnnnnnnnnnnnnnnnnnnnnnnnnnnnnnnnnnnnnnnnnnnnnnnnnnnnnnnnnnnnnnnnnnnnnnnnnnnnnnnnnnnnnnnnnnnnnnnnnnnnnnnnnnnnnnnnnnnnnnnnnnnnnnnnnnnnnnnnnnnnnnnnnnnnnnnnnnnnnnnnnnnnnnnnnnnnnnnnnnnnnnnnnnnnnnnnnnnnnnnnnnnnnnnnnnnnnnnnnnnnnnnnnnnnnnnnnnnnnnnnnnnnnnnnnnnnnnnnnnnnnnnnnnnnnnnnnnnnnnnnnnnnnnnnnnnnnnnnnnnnnnnnnnnnnnnnnnnnnnnnnnnnnnnnnnnnnnnnnnnnnnnnnnnnnnnnnnnnnnnnnnnnnnnnnnnnnnnnnnnnnnnnnnnnnnnnnnnnnnnnnnnnnnnnnnnnnnnnnnnnnnnnnnnnnnnnnnnnnnnnnnnnnnnnnnnnnnnnnnnnnnnnnnnnnnnnnnnnnnnnnnnnnnnnnnnnnnnnnnnnnnnnnnnnnnnnnnnnnnnnnnnnnnnnnnnnnnnnnnnnnnnnnnnnnnnnnnnnnnnnnnnnnnnnnnnnnnnnnnnnnnnnnnnnnnnnnnnnnnnnnnnnnnnnnnnnnnnnnnnnnnnnnnnnnnnnnnnnnnnnnnnnnnnnnnnnnnnnnnnnnnnnnnnnnnnnnnnnnnnnnnnnnnnnnnnnnnnnnnnnnnnnnnnnnnnnnnnnnnnnnnnnnnnnnnnnnnnnnnnnnnnnnnnnnnnnnnnnnnnnnnnnnnnnnnnnnnnnnnnnnnnnnnnnnnnnnnnnnnnnnnnnnnnnnnnnnnnnnnnnnnnnnnnnnnnnnnnnnnnnnnnnnnnnnnnnnnnnnnnnnnnnnnnnnnnnnnnnnnnnnnnnnnnnnnnnnnnnnnnnnnnnnnnnnnnnnnnnnnnnnnnnnnnnnnnnnnnnnnnnnnnnnnnnnnnnnnnnnnnnnnnnnnnnnnnnnnnnnnnnnnnnnnnnnnnnnnnnnnnnnnnnnnnnnnnnnnnnnnnnnnnnnnnnnnnnnnnnnnnnnnnnnnnnnnnnnnnnnnnnnnnnnnnnnnnnnnnnnnnnnnnnnnnnnnnnnnnnnnnnnnnnnnnnnnnnnnnnnnnnnnnnnnnnnnnnnnnnnnnnnnnnnnnnnnnnnnnnnnnnnnnnnnnnnnnnnnnnnnnnnnnnnnnnnnnnnnnnnnnnnnnnnnnnnnnnnnnnnnnnnnnnnnnnnnnnnnnnnnnnnnnnnnnnnnnnnnnnnnnnnnnnnnnnnnnnnnnnnnnnnnnnnnnnnnnnnnnnnnnnnnnnnnnnnnnnnnnnnnnnnnnnnnnnnnnnnnnnnnnnnnnnnnnnnnnnnnnnnnnnnnnnnnnnnnnnnnnnnnnnnnnnnnnnnnnnnnnnnnnnnnnnnnnnnnnnnnnnnnnnnnnnnnnnnnnnnnnnnnnnnnnnnnnnnnnnnnnnnnnnnnnnnnnnnnnnnnnnnnnnnnnnnnnnnnnnnnnnnnnnnnnnnnnnnnnnnnnnnnnnnnnnnnnnnnnnnnnnnnnnnnnnnnnnnnnnnnnnnnnnnnnnnnnnnnnnnnnnnnnnnnnnnnnnnnnnnnnnnnnnnnnnnnnnnnnnnnnnnnnnnnnnnnnnnnnnnnnnnnnnnnnnnnnnnnnnnnnnnnnnnnnnnnnnnnnnnnnnnnnnnnnnnnnnnnnnnnnnnnnnnnnnnnnnnnnnnnnnnnnnnnnnnnnnnnnnnnnnnnnnnnnnnnnnnnnnnnnnnnnnnnnnnnnnnnnnnnnnnnnnnnnnnnnnnnnnnnnnnnnnnnnnnnnnnnnnnnnnnnnnnnnnnnnnnnnnnnnnnnnnnnnnnnnnnnnnnnnnnnnnnnnnnnnnnnnnnnnnnnnnnnnnnnnnnnnnnnnnnnnnnnnnnnnnnnnnnnnnnnnnnnnnnnnnnnnnnnnnnnnnnnnnnnnnnnnnnnnnnnnnnnnnnnnnnnnnnnnnnnnnnnnnnnnnnnnnnnnnnnnnnnnnnnnnnnnnnnnnnnnnnnnnnnnnnnnnnnnnnnnnnnnnnnnnnnnnnnnnnnnnnnnnnnnnnnnnnnnnnnnnnnnnnnnnnnnnnnnnnnnnnnnnnnnnnnnnnnnnnnnnnnnnnnnnnnnnnnnnnnnnnnnnnnnnnnnnnnnnnnnnnnnnnnnnnnnnnnnnnnnnnnnnnnnnnnnnnnnnnnnnnnnnnnnnnnnnnnnnnnnnnnnnnnnnnnnnnnnnnnnnnnnnnnnnnnnnnnnnnnnnnnnnnnnnnnnnnnnnnnnnnnnnnnnnnnnnnnnnnnnnnnnnnnnnnnnnnnnnnnnnnnnnnnnnnnnnnnnnnnnnnnnnnnnnnnnnnnnnnnnnnnnnnnnnnnnnnnnnnnnnnnnnnnnnnnnnnnnnnnnnnnnnnnnnnnnnnnnnnnnnnnnnnnnnnnnnnnnnnnnnnnnnnnnnnnnnnnnnnnnnnnnnnnnnnnnnnnnnnnnnnnnnnnnnnnnnnnnnnnnnnnnnnnnnnnnnnnnnnnnnnnnnnnnnnnnnnnnnnnnnnnnnnnnnnnnnnnnnnnnnnnnnnnnnnnnnnnnnnnnnnnnnnnnnnnnnnnnnnnnnnnnnnnnnnnnnnnnnnnnnnnnnnnnnnnnnnnnnnnnnnnnnnnnnnnnnnnnnnnnnnnnnnnnnnnnnnnnnnnnnnnnnnnnnnnnnnnnnnnnnnnnnnnnnnnnnnnnnnnnnnnnnnnnnnnnnnnnnnnnnnnnnnnnnnnnnnnnnnnnnnnnnnnnnnnnnnnnnnnnnnnnnnnnnnnnnnnnnnnnnnnnnnnnnnnnnnnnnnnnnnnnnnnnnnnnnnnnnnnnnnnnnnnnnnnnnnnnnnnnnnnnnnnnnnnnnnnnnnnnnnnnnnnnnnnnnnnnnnnnnnnnnnnnnnnnnnnnnnnnnnnnnnnnnnnnnnnnnnnnnnnnnnnnnnnnnnnnnnnnnnnnnnnnnnnnnnnnnnnnnnnnnnnnnnnnnnnnnnnnnnnnnnnnnnnnnnnnnnnnnnnnnnnnnnnnnnnnnnnnnnnnnnnnnnnnnnnnnnnnnnnnnnnnnnnnnnnnnnnnnnnnnnnnnnnnnnnnnnnnnnnnnnnnnnnnnnnnnnnnnnnnnnnnnnnnnnnnnnnnnnnnnnnnnnnnnnnnnnnnnnnnnnnnnnnnnnnnnnnnnnnnnnnnnnnnnnnnnnnnnnnnnnnnnnnnnnnnnnnnnnnnnnnnnnnnnnnnnnnnnnnnnnnnnnnnnnnnnnnnnnnnnnnnnnnnnnnnnnnnnnnnnnnnnnnnnnnnnnnnnnnnnnnnnnnnnnnnnnnnnnnnnnnnnnnnnnnnnnnnnnnnnnnnnnnnnnnnnnnnnnnnnnnnnnnnnnnnnnnnnnnnnnnnnnnnnnnnnnnnnnnnnnnnnnnnnnnnnnnnnnnnnnnnnnnnnnnnnnnnnnnnnnnnnnnnnnnnnnnnnnnnnnnnnnnnnnnnnnnnnnnnnnnnnnnnnnnnnnnnnnnnnnnnnnnnnnnnnnnnnnnnnnnnnnnnnnnnnnnnnnnnnnnnnnnnnnnnnnnnnnnnnnnnnnnnnnnnnnnnnnnnnnnnnnnnnnnnnnnnnnnnnnnnnnnnnnnnnnnnnnnnnnnnnnnnnnnnnnnnnnnnnnnnnnnnnnnnnnnnnnnnnnnnnnnnnnnnnnnnnnnnnnnnnnnnnnnnnnnnnnnnnnnnnnnnnnnnnnnnnnnnnnnnnnnnnnnnnnnnnnnnnnnnnnnnnnnnnnnnnnnnnnnnnnnnnnnnnnnnnnnnnnnnnnnnnnnnnnnnnnnnnnnnnnnnnnnnnnnnnnnnnnnnnnnnnnnnnnnnnnnnnnnnnnnnnnnnnnnnnnnnnnnnnnnnnnnnnnnnnnnnnnnnnnnnnnnnnnnnnnnnnnnnnnnnnnnnnnnnnnnnnnnnnnnnnnnnnnnnnnnnnnnnnnnnnnnnnnnnnnnnnnnnnnnnnnnnnnnnnnnnnnnnnnnnnnnnnnnnnnnnnnnnnnnnnnnnnnnnnnnnnnnnnnnnnnnnnnnnnnnnnnnnnnnnnnnnnnnnnnnnnnnnnnnnnnnnnnnnnnnnnnnnnnnnnnnnnnnnnnnnnnnnnnnnnnnnnnnnnnnnnnnnnnnnnnnnnnnnnnnnnnnnnnnnnnnnnnnnnnnnnnnnnnnnnnnnnnnnnnnnnnnnnnnnnnnnnnnnnnnnnnnnnnnnnnnnnnnnnnnnnnnnnnnnnnnnnnnnnnnnnnnnnnnnnnnnnnnnnnnnnnnnnnnnnnnnnnnnnnnnnnnnnnnnnnnnnnnnnnnnnnnnnnnnnnnnnnnnnnnnnnnnnnnnnnnnnnnnnnnnnnnnnnnnnnnnnnnnnnnnnnnnnnnnnnnnnnnnnnnnnnnnnnnnnnnnnnnnnnnnnnnnnnnnnnnnnnnnnnnnnnnnnnnnnnnnnnnnnnnnnnnnnnnnnnnnnnnnnnnnnnnnnnnnnnnnnnnnnnnnnnnnnnnnnnnnnnnnnnnnnnnnnnnnnnnnnnnnnnnnnnnnnnnnnnnnnnnnnnnnnnnnnnnnnnnnnnnnnnnnnnnnnnnnnnnnnnnnnnnnnnnnnnnnnnnnnnnnnnnnnnnnnnnnnnnnnnnnnnnnnnnnnnnnnnnnnnnnnnnnnnnnnnnnnnnnnnnnnnnnnnnnnnnnnnnnnnnnnnnnnnnnnnnnnnnnnnnnnnnnnnnnnnnnnnnnnnnnnnnnnnnnnnnnnnnnnnnnnnnnnnnnnnnnnnnnnnnnnnnnnnnnnnnnnnnnnnnnnnnnnnnnnnnnnnnnnnnnnnnnnnnnnnnnnnnnnnnnnnnnnnnnnnnnnnnnnnnnnnnnnnnnnnnnnnnnnnnnnnnnnnnnnnnnnnnnnnnnnnnnnnnnnnnnnnnnnnnnnnnnnnnnnnnnnnnnnnnnnnnnnnnnnnnnnnnnnnnnnnnnnnnnnnnnnnnnnnnnnnnnnnnnnnnnnnnnnnnnnnnnnnnnnnnnnnnnnnnnnnnnnnnnnnnnnnnnnnnnnnnnnnnnnnnnnnnnnnnnnnnnnnnnnnnnnnnnnnnnnnnnnnnnnnnnnnnnnnnnnnnnnnnnnnnnnnnnnnnnnnnnnnnnnnnnnnnnnnnnnnnnnnnnnnnnnnnnnnnnnnnnnnnnnnnnnnnnnnnnnnnnnnnnnnnnnnnnnnnnnnnnnnnnnnnnnnnnnnnnnnnnnnnnnnnnnnnnnnnnnnnnnnnnnnnnnnnnnnnnnnnnnnnnnnnnnnnnnnnnnnnnnnnnnnnnnnnnnnnnnnnnnnnnnnnnnnnnnnnnnnnnnnnnnnnnnnnnnnnnnnnnnnnnnnnnnnnnnnnnnnnnnnnnnnnnnnnnnnnnnnnnnnnnnnnnnnnnnnnnnnnnnnnnnnnnnnnnnnnnnnnnnnnnnnnnnnnnnnnnnnnnnnnnnnnnnnnnnnnnnnnnnnnnnnnnnnnnnnnnnnnnnnnnnnnnnnnnnnnnnnnnnnnnnnnnnnnnnnnnnnnnnnnnnnnnnnnnnnnnnnnnnnnnnnnnnnnnnnnnnnnnnnnnnnnnnnnnnnnnnnnnnnnnnnnnnnnnnnnnnnnnnnnnnnnnnnnnnnnnnnnnnnnnnnnnnnnnnnnnnnnnnnnnnnnnnnnnnnnnnnnnnnnnnnnnnnnnnnnnnnnnnnnnnnnnnnnnnnnnnnnnnnnnnnnnnnnnnnnnnnnnnnnnnnnnnnnnnnnnnnnnnnnnnnnnnnnnnnnnnnnnnnnnnnnnnnnnnnnnnnnnnnnnnnnnnnnnnnnnnnnnnnnnnnnnnnnnnnnnnnnnnnnnnnnnnnnnnnnnnnnnnnnnnnnnnnnnnnnnnnnnnnnnnnnnnnnnnnnnnnnnnnnnnnnnnnnnnnnnnnnnnnnnnnnnnnnnnnnnnnnnnnnnnnnnnnnnnnnnnnnnnnnnnnnnnnnnnnnnnnnnnnnnnnnnnnnnnnnnnnnnnnnnnnnnnnnnnnnnnnnnnnnnnnnnnnnnnnnnnnnnnnnnnnnnnnnnnnnnnnnnnnnnnnnnnnnnnnnnnnnnnnnnnnnnnnnnnnnnnnnnnnnnnnnnnnnnnnnnnnnnnnnnnnnnnnnnnnnnnnnnnnnnnnnnnnnnnnnnnnnnnnnnnnnnnnnnnnnnnnnnnnnnnnnnnnnnnnnnnnnnnnnnnnnnnnnnnnnnnnnnnnnnnnnnnnnnnnnnnnnnnnnnnnnnnnnnnnnnnnnnnnnnnnnnnnnnnnnnnnnnnnnnnnnnnnnnnnnnnnnnnnnnnnnnnnnnnnnnnnnnnnnnnnnnnnnnnnnnnnnnnnnnnnnnnnnnnnnnnnnnnnnnnnnnnnnnnnnnnnnnnnnnnnnnnnnnnnnnnnnnnnnnnnnnnnnnnnnnnnnnnnnnnnnnnnnnnnnnnnnnnnnnnnnnnnnnnnnnnnnnnnnnnnnnnnnnnnnnnnnnnnnnnnnnnnnnnnnnnnnnnnnnnnnnnnnnnnnnnnnnnnnnnnnnnnnnnnnnnnnnnnnnnnnnnnnnnnnnnnnnnnnnnnnnnnnnnnnnnnnnnnnnnnnnnnnnnnnnnnnnnnnnnnnnnnnnnnnnnnnnnnnnnnnnnnnnnnnnnnnnnnnnnnnnnnnnnnnnnnnnnnnnnnnnnnnnnnnnnnnnnnnnnnnnnnnnnnnnnnnnnnnnnnnnnnnnnnnnnnnnnnnnnnnnnnnnnnnnnnnnnnnnnnnnnnnnnnnnnnnnnnnnnnnnnnnnnnnnnnnnnnnnnnnnnnnnnnnnnnnnnnnnnnnnnnnnnnnnnnnnnnnnnnnnnnnnnnnnnnnnnnnnnnnnnnnnnnnnnnnnnnnnnnnnnnnnnnnnnnnnnnnnnnnnnnnnnnnnnnnnnnnnnnnnnnnnnnnnnnnnnnnnnnnnnnnnnnnnnnnnnnnnnnnnnnnnnnnnnnnnnnnnnnnnnnnnnnnnnnnnnnnnnnnnnnnnnnnnnnnnnnnnnnnnnnnnnnnnnnnnnnnnnnnnnnnnnnnnnnnnnnnnnnnnnnnnnnnnnnnnnnnnnnnnnnnnnnnnnnnnnnnnnnnnnnnnnnnnnnnnnnnnnnnnnnnnnnnnnnnnnnnnnnnnnnnnnnnnnnnnnnnnnnnnnnnnnnnnnnnnnnnnnnnnnnnnnnnnnnnnnnnnnnnnnnnnnnnnnnnnnnnnnnnnnnnnnnnnnnnnnnnnnnnnnnnnnnnnnnnnnnnnnnnnnnnnnnnnnnnnnnnnnnnnnnnnnnnnnnnnnnnnnnnnnnnnnnnnnnnnnnnnnnnnnnnnnnnnnnnnnnnnnnnnnnnnnnnnnnnnnnnnnnnnnnnnnnnnnnnnnnnnnnnnnnnnnnnnnnnnnnnnnnnnnnnnnnnnnnnnnnnnnnnnnnnnnnnnnnnnnnnnnnnnnnnnnnnnnnnnnnnnnnnnnnnnnnnnnnnnnnnnnnnnnnnnnnnnnnnnnnnnnnnnnnnnnnnnnnnnnnnnnnnnnnnnnnnnnnnnnnnnnnnnnnnnnnnnnnnnnnnnnnnnnnnnnnnnnnnnnnnnnnnnnnnnnnnnnnnnnnnnnnnnnnnnnnnnnnnnnnnnnnnnnnnnnnnnnnnnnnnnnnnnnnnnnnnnnnnnnnnnnnnnnnnnnnnnnnnnnnnnnnnnnnnnnnnnnnnnnnnnnnnnnnnnnnnnnnnnnnnnnnnnnnnnnnnnnnnnnnnnnnnnnnnnnnnnnnnnnnnnnnnnnnnnnnnnnnnnnnnnnnnnnnnnnnnnnnnnnnnnnnnnnnnnnnnnnnnnnnnnnnnnnnnnnnnnnnnnnnnnnnnnnnnnnnnnnnnnnnnnnnnnnnnnnnnnnnnnnnnnnnnnnnnnnnnnnnnnnnnnnnnnnnnnnnnnnnnnnnnnnnnnnnnnnnnnnnnnnnnnnnnnnnnnnnnnnnnnnnnnnnnnnnnnnnnnnnnnnnnnnnnnnnnnnnnnnnnnnnnnnnnnnnnnnnnnnnnnnnnnnnnnnnnnnnnnnnnnnnnnnnnnnnnnnnnnnnnnnnnnnnnnnnnnnnnnnnnnnnnnnnnnnnnnnnnnnnnnnnnnnnnnnnnnnnnnnnnnnnnnnnnnnnnnnnnnnnnnnnnnnnnnnnnnnnnnnnnnnnnnnnnnnnnnnnnnnnnnnnnnnnnnnnnnnnnnnnnnnnnnnnnnnnnnnnnnnnnnnnnnnnnnnnnnnnnnnnnnnnnnnnnnnnnnnnnnnnnnnnnnnnnnnnnnnnnnnnnnnnnnnnnnnnnnnnnnnnnnnnnnnnnnnnnnnnnnnnnnnnnnnnnnnnnnnnnnnnnnnnnnnnnnnnnnnnnnnnnnnnnnnnnnnnnnnnnnnnnnnnnnnnnnnnnnnnnnnnnnnnnnnnnnnnnnnnnnnnnnnnnnnnnnnnnnnnnnnnnnnnnnnnnnnnnnnnnnnnnnnnnnnnnnnnnnnnnnnnnnnnnnnnnnnnnnnnnnnnnnnnnnnnnnnnnnnnnnnnnnnnnnnnnnnnnnnnnnnnnnnnnnnnnnnnnnnnnnnnnnnnnnnnnnnnnnnnnnnnnnnnnnnnnnnnnnnnnnnnnnnnnnnnnnnnnnnnnnnnnnnnnnnnnnnnnnnnnnnnnnnnnnnnnnnnnnnnnnnnnnnnnnnnnnnnnnnnnnnnnnnnnnnnnnnnnnnnnnnnnnnnnnnnnnnnnnnnnnnnnnnnnnnnnnnnnnnnnnnnnnnnnnnnnnnnnnnnnnnnnnnnnnnnnnnnnnnnnnnnnnnnnnnnnnnnnnnnnnnnnnnnnnnnnnnnnnnnnnnnnnnnnnnnnnnnnnnnnnnnnnnnnnnnnnnnnnnnnnnnnnnnnnnnnnnnnnnnnnnnnnnnnnnnnnnnnnnnnnnnnnnnnnnnnnnnnnnnnnnnnnnnnnnnnnnnnnnnnnnnnnnnnnnnnnnnnnnnnnnnnnnnnnnnnnnnnnnnnnnnnnnnnnnnnnnnnnnnnnnnnnnnnnnnnnnnnnnnnnnnnnnnnnnnnnnnnnnnnnnnnnnnnnnnnnnnnnnnnnnnnnnnnnnnnnnnnnnnnnnnnnnnnnnnnnnnnnnnnnnnnnnnnnnnnnnnnnnnnnnnnnnnnnnnnnnnnnnnnnnnnnnnnnnnnnnnnnnnnnnnnnnnnnnnnnnnnnnnnnnnnnnnnnnnnnnnnnnnnnnnnnnnnnnnnnnnnnnnnnnnnnnnnnnnnnnnnnnnnnnnnnnnnnnnnnnnnnnnnnnnnnnnnnnnnnnnnnnnnnnnnnnnnnnnnnnnnnnnnnnnnnnnnnnnnnnnnnnnnnnnnnnnnnnnnnnnnnnnnnnnnnnnnnnnnnnnnnnnnnnnnnnnnnnnnnnnnnnnnnnnnnnnnnnnnnnnnnnnnnnnnnnnnnnnnnnnnnnnnnnnnnnnnnnnnnnnnnnnnnnnnnnnnnnnnnnnnnnnnnnnnnnnnnnnnnnnnnnnnnnnnnnnnnnnnnnnnnnnnnnnnnnnnnnnnnnnnnnnnnnnnnnnnnnnnnnnnnnnnnnnnnnnnnnnnnnnnnnnnnnnnnnnnnnnnnnnnnnnnnnnnnnnnnnnnnnnnnnnnnnnnnnnnnnnnnnnnnnnnnnnnnnnnnnnnnnnnnnnnnnnnnnnnnnnnnnnnnnnnnnnnnnnnnnnnnnnnnnnnnnnnnnnnnnnnnnnnnnnnnnnnnnnnnnnnnnnnnnnnnnnnnnnnnnnnnnnnnnnnnnnnnnnnnnnnnnnnnnnnnnnnnnnnnnnnnnnnnnnnnnnnnnnnnnnnnnnnnnnnnnnnnnnnnnnnnnnnnnnnnnnnnnnnnnnnnnnnnnnnnnnnnnnnnnnnnnnnnnnnnnnnnnnnnnnnnnnnnnnnnnnnnnnnnnnnnnnnnnnnnnnnnnnnnnnnnnnnnnnnnnnnnnnnnnnnnnnnnnnnnnnnnnnnnnnnnnnnnnnnnnnnnnnnnnnnnnnnnnnnnnnnnnnnnnnnnnnnnnnnnnnnnnnnnnnnnnnnnnnnnnnnnnnnnnnnnnnnnnnnnnnnnnnnnnnnnnnnnnnnnnnnnnnnnnnnnnnnnnnnnnnnnnnnnnnnnnnnnnnnnnnnnnnnnnnnnnnnnnnnnnnnnnnnnnnnnnnnnnnnnnnnnnnnnnnnnnnnnnnnnnnnnnnnnnnnnnnnnnnnnnnnnnnnnnnnnnnnnnnnnnnnnnnnnnnnnnnnnnnnnnnnnnnnnnnnnnnnnnnnnnnnnnnnnnnnnnnnnnnnnnnnnnnnnnnnnnnnnnnnnnnnnnnnnnnnnnnnnnnnnnnnnnnnnnnnnnnnnnnnnnnnnnnnnnnnnnnnnnnnnnnnnnnnnnnntttggagcccgaaggtcccagaacgattggccgacggggacatcgaccttcctgacgctggcgtcgagcgaggcacgagcatggacgccagcaacatctcctgtagtccatactcgcaagctcgctgcactccaggctcaccaacgttggaaggcaaattcacaaattcacaaccggtaaatatggcttgtgaatttgcaacctgctgatagacgggtaattatgaggctaattcacaaaaaaggggtctcttatacatccgcggaagccgattgtaaacaggatatgatgtatccacgctaccagtctataatacatatagaaatagtatatataatatataatagtattatatattattatatattgatattatatcatctctaccttcccttcatctcttgtttgcggcatgagccactgcaaaccggcattctcccctggtccggctggatataagagataagcgtattttgtgaatttgtcccccaactcactgtgccacaataacacacggattcacaagccatatttaccggttgtgaatttgtgaatctgaccttgccggccttaaggaagtttgaaattagagccctattttggacttgacaaattattccttggtaaatttggtgtataatagctatggggcataatgatgttagcctgtggaacggcctctgtaaaggatcaacaagctatcaaccctccccatgcgacaggagcttcaatgtattataatttgacagacaaaccctggatcagtgtgctacagcttgacgggcattctgccaggctcggcctggctgaggtcctgcgaaaagcacacacactgcgtttggcttacggcaatccgatggaccgcatgtccgttttccgtttcctcctcgccctgggctattggtgttttgccaatacaaaacaagcgccggtatcagataagccactgcctcaggcatggacggactggcttgaacaaaaccaagaatatttcgaattgttcggtgatggccccagattctaccaatccccaggaacatccagaatacgccccagcacggaccttatccacgagcttcccacggcaaacaatttctggcacttccgccatgtgaccgatttcatcgatggcatttgcccagcttgctgcgttaccggtctgctgcgcctgccactctttaccaccgtaggcggcagcggaatcggagccggcatcaacagaactcctcccttctatgccatctggcagggtgatagtctgtcggaatcgatattcctgaattgggaacccacttcccggttgggtgttcctgcctggctgaacccgtttggatcccaaaacgagaaggatgtagccttgctgactggcctcacctggctgccccgcaaggtattcctgcttggcccggtgtcagacggagcaaaatgcagcgcctgcggagaagagcatgagcctctggtctatgcctgcaacaatgaggcggtgaaagtgcctccgaaccttgtctggaacgaccctcacgcgatttaccgggatgacaataatggcctgactgcccaggtggctctgatgtccggggacaaatacactttcgctaacagggattggcataaacccctggtcggcttcttacgggcgaaaggcatgtctcggaccgccacgctgtttttagtgggcttcacaagcgttcaagccaaatgtgtggacgtttgggaaaagaccattgccctatccggaaaaacaagctccgaggaactgctggaccagatatccgaaagagcctactccctgcacaggatgaggaaacaagaccgccggggcgattacaaggaatccgtgggaatcaccgccgtggcggacatcatcccgcacgtagagcatcgggttgacgtccattcgggcgagatggtggaaaacagcggcaatgtctggcaggaagcggatgaagattacggattcttcatgaagcgttttgccgtttctctagtgccggaaattacggttgccgccaagcttgaacgagaacaactggctcggcgcaagccctggcccctaaaaccaaaatcaattaaaaaaccttcatccggaggcgataatgaatgagagcaccgtgaaatttgttcggagcctgggcgaactcaaagagggcgacctgggcttgctcagaaagctcaggggtcgccgtctggatgaatccctgccgggtttcgacctgttttccggcctgtggtggccactccgcagtataagccccaaaacccccaggcggaaggtggtctggctagtcaccaagcttttcgcggaattccgctttgagcaaaagaaaggcgccagcctgccttggctcatgggcagaatatgccgtggacttaaagaagaaaaagagttcccacgtgttttagccaggttcgaccgcttgctcacgctcgagttgaaccaactggaggaaccgctggcgcaagtgctcgcgattttaaaaagacatgacattgccagtctggactgggttgccctcatcgatgacctctccgcttgggaacgggaatcaaacagagcgatatggtcagacacatttatttcagcatttaataatcagcaaggaggaatcaaatgttgattgaaatacacatgatccaaaaccacagcccggccaacctgaaccgggacgacctgggcgcgcccaagacctgttatttcggtggggtgttgcggtcccgcatctccagccagtgcctaaagcggagcatcaggatgagcgatgaattcaaaaacttgctcgggggtatccgtacccgtcggttggccgagttgattacaaaagctacaggacaggactgcaggaatcaggcagaggaagttctgaacaaagccggtttgaaacacgaaaacggacatagtaagatgctggtgttcatgacccggaacaagatcgatgcccttgctcaaattgtcaccagcgaaggcctgagtgttgcagagaaagccaagaaagcggcagatgtaatatcgggggcaatacattcccctgacatcgctctgtgcggaagaatgctcgagcccgataccaaggacaagaacacagacaaggtcaagtgggaaaataccactgttgaagcagccctgcaggtgtcgcacgccatttcaacccacatcgcccgcccagaaatagattactatgtagcagctgatgacgagcctggcgacgacacaggtgctggattcatagacgaggcgatgtttgcttcggcctgtttctacaaatattactcaattgattggaataccttgataatcaacctccagggtaatgaaaagttggcagctcatactgtcggagcctttatccaggccgctgcactcactaatcccagcggaaagcagaacagctttgccgcacataaccttcccgatggaatattggtagaaataaaagagacacctgtcagctatgcaaatgcctttgtgcgaccggtgggaatcgttaaggattctgacttggtagaacaaagcattggccaactggccaactatgtgaaggatataagtgccggtttcttccctggacagatgaaaggcaacgctctgtggttctcgcccaatggacgttatcccctaaagcctcaacagggcacgctggacataaagccagtttgcaacctgctagaacttgttcgcgaagcagttgagatgttgggttttgaatgggatgatgtaaaaaacgagaaagtagagagttgaaatgtcttctccgcctaataccctgttcctgagattggaggctccccttcaggcctggggaagcaatgaggccaaattcgccgtgcgcaggacagccgacgcgcccaccaaatccggagtggcaggcctgctctgcgctgccctgggaatcagccgggccgaagccggacagtattggctgggtgaaattgccaaattgcgcatgggggtgcggatagaccgcccgggcatccgctggtgggattaccatactgtgggagcggagcagaagctgcgcatttctgacctgaaaatgcccaacggcctagttctggttggcactgccctggccaaaaacctgggcgcggacaagatcaaatccaaacccggggctttgctctcccgacgcgagtatttggctgatgccagcttcctggttgcgctccagggtgaaccggatatcgtggcacaactggctgaagcgctgaaaaaaccagtctggacgctttatctggggcgaaaatcctgtcccccctcccgtccggtggatgaacacccgccagggttttatgccagtctgaaagaggctttgcggtcgatcccggcgcaactgagggaaaaaggcgaaccgatacctgacagtgttccctgtgtgctcgactgggttccggcccatgatgacgtgcacgctccgccgaacgccgaagcgcattacgacgtgccggtgtcctttgagcctccccaccacttgccccggctggtgatccgctgtaacctgccattggaccgcaacttcgaggcagagaccgtgctttccggcaaagcctggcaaccgccccgcaaccgggcaaattacgacaatcctgaatacaaaagggtccgcgctgagcgtttggtgatggacaatgccgcctgcatgttctgcaaggcacccgccactactgtgcagcacgtgaattaccgacgcgccggaggcagcgagaagccggaggacttgcgcgccctctgccgcctctgccacgatgcctgcaccatgctggaatatggcagcggcatgaccatggaccgcatagatccctgtgaccccgcctggcgtgagcgcatcttggccaaacgcgaggaaataatcaaattccgctcgctggagcagcgcaggcgcaaactcgatccgaaggaggagaacggatgatgtatctatcccaactgctcatcgacacaggcggcaaccctgaccggccaaggcccgggcgcttgtggctgaacaatatctataatgtccaccggcggctcagcatggctttccccatgcgcaagcgcaaggaaggagacccgaggtttctgcagccctttgaccccgcagattttgaaaagcgccagttcctctttcgggtggacaacaacaccgatggagaaaatcaaagggcgatggttttggtgcagtcgtccctgccgccggattgggactgggctttccagaatgccacgggatttttggcagcccctccccaggttaaggaatacgatccccagttctcagcaggtcagcggctgcgcttccgcatcctcgtgaatgccagtgtcaaacgcaaaatcgacgagttgcgggaaggacccggaggaaaggaaaaaacgggaagggttctgcacaaacgggtcgcccttacctgggacacaaattccaacccaaaggatgcggtggcgcaatggtttgccgccaaggctggcagactgggcttcacgcccggggagaccgaactggtaagcctgggctgggtatacggttccaaaccggagccccggggaaattcgccccggcgtgagaacgaataccgtcccctgagataccgttccgccctgctggaaggttatctgacagtggatgatgcctttctgttccgggaagccttggaaaaaggtatcggcagcgccaaaggaatgggcttcggcctcctttccgtggttccggcaagtgatgcgtaacagagaccttcacctaatgccaaaaatgcgggaccgcttcacctatctctatgtggagcatgccaaaatagacaaagaacaacaggcaatcgcctttcacgatgccatgggctccactcctgttccctgcgctggactggccctgctgatgctggggccaggcgtatccatcacccatgcggccatccttgttttagcagaatgcggctgtttggtggcttgggtgggggaacagggagtccgcttttactcatccgggacagggaccacccgtagttccgccaaccttatgcgtcaggctgccgcctggtcaaatcgagatacgcatctgcggatagttcgcagaatgtatgaattgaggttcaaggaaaaactggacccaaccctctctcttgaacagataaggggaaaagagggagcgagagtacgggatacctatttcagactttcaaaagaattcgatgtgcccatgagtgcgaggaattacgacaggagcaactggaataaaaccgaccccatcaacagagccctgtccgttgccaattcctgtctctatggcatctgccacgccgcgatagtggccgctggctattcacctgccctgggtttcgttcatactggcaaacaactgtcatttgtttatgacattgccgatctttataaaatggaaacctccgtgcccgcggctttcatagccacagccgcaggggtcgataacctggacagaaggacacgcattgcctgccgtgaccagttctatcaatttggtctgctaaagaagatagtggccgacattcacgcccttttcggtattctggaaacttcggacgatgagccagaccttgctgatgtcgatccagccgtgccaggcgggctttggaacccagatgataaagtgagccccggcggcttgtcatggggtctggatgatcctggaggccatgatgatggttctggtgcttgaaaaagttccctctggcctgagaggagaaattacacgctggctcctcgaaatcaaggctggagtatttgtcggtcaggtatcggccatgataagggaaaagctgtgggacaaggccaggtctggttgtgccggtggaacttgtatcatgatttacagcaagcattgcgaacaaggctttggaattgagttttggggtgccgcggaaaggatagtgacagaatgggaaggattgaaattgatgaccaagcatccgtgatccatacttgaagcctgttcaatggcctcaaagcgtctactttcgaagtgtgttccccacctgcgtgggggtgaaccgaacagacggcgttgttgacatcaccctccccggtgttccccacctgcgtgggggtgaaccgagataatcacgcttaataagcactttctcggcgtgttccccacctgcgtgggggtgaaccgaagccccagaccacagcaagccagccgcttaagtgttccccacctgcgtgggggtgaaccgtatgtccgacatcgtgcgcatcattcacgaacgtgttccccacctgcgtgggggtgaaccgccagacagcacggcatatccacacttaccgaagtgttccccacctgcgtgggggtgaaccgaagctgatctcgccaaagcaatattggcagacgtg

SEQ ID NO: 1109 - DNA, 104729 bp, Artificial Sequence
  Synthetic Oligonucleotide
  misc_feature (1)..(97443): n is a, c, g, or t
nnnnnnnnnnnnnnnnnnnnnnnnnnnnnnnnnnnnnnnnnnnnnnnnnnnnnnnnnnnnnnnnnnnnnnnnnnnnnnnnnnnnnnnnnnnnnnnnnnnnnnnnnnnnnnnnnnnnnnnnnnnnnnnnnnnnnnnnnnnnnnnnnnnnnnnnnnnnnnnnnnnnnnnnnnnnnnnnnnnnnnnnnnnnnnnnnnnnnnnnnnnnnnnnnnnnnnnnnnnnnnnnnnnnnnnnnnnnnnnnnnnnnnnnnnnnnnnnnnnnnnnnnnnnnnnnnnnnnnnnnnnnnnnnnnnnnnnnnnnnnnnnnnnnnnnnnnnnnnnnnnnnnnnnnnnnnnnnnnnnnnnnnnnnnnnnnnnnnnnnnnnnnnnnnnnnnnnnnnnnnnnnnnnnnnnnnnnnnnnnnnnnnnnnnnnnnnnnnnnnnnnnnnnnnnnnnnnnnnnnnnnnnnnnnnnnnnnnnnnnnnnnnnnnnnnnnnnnnnnnnnnnnnnnnnnnnnnnnnnnnnnnnnnnnnnnnnnnnnnnnnnnnnnnnnnnnnnnnnnnnnnnnnnnnnnnnnnnnnnnnnnnnnnnnnnnnnnnnnnnnnnnnnnnnnnnnnnnnnnnnnnnnnnnnnnnnnnnnnnnnnnnnnnnnnnnnnnnnnnnnnnnnnnnnnnnnnnnnnnnnnnnnnnnnnnnnnnnnnnnnnnnnnnnnnnnnnnnnnnnnnnnnnnnnnnnnnnnnnnnnnnnnnnnnnnnnnnnnnnnnnnnnnnnnnnnnnnnnnnnnnnnnnnnnnnnnnnnnnnnnnnnnnnnnnnnnnnnnnnnnnnnnnnnnnnnnnnnnnnnnnnnnnnnnnnnnnnnnnnnnnnnnnnnnnnnnnnnnnnnnnnnnnnnnnnnnnnnnnnnnnnnnnnnnnnnnnnnnnnnnnnnnnnnnnnnnnnnnnnnnnnnnnnnnnnnnnnnnnnnnnnnnnnnnnnnnnnnnnnnnnnnnnnnnnnnnnnnnnnnnnnnnnnnnnnnnnnnnnnnnnnnnnnnnnnnnnnnnnnnnnnnnnnnnnnnnnnnnnnnnnnnnnnnnnnnnnnnnnnnnnnnnnnnnnnnnnnnnnnnnnnnnnnnnnnnnnnnnnnnnnnnnnnnnnnnnnnnnnnnnnnnnnnnnnnnnnnnnnnnnnnnnnnnnnnnnnnnnnnnnnnnnnnnnnnnnnnnnnnnnnnnnnnnnnnnnnnnnnnnnnnnnnnnnnnnnnnnnnnnnnnnnnnnnnnnnnnnnnnnnnnnnnnnnnnnnnnnnnnnnnnnnnnnnnnnnnnnnnnnnnnnnnnnnnnnnnnnnnnnnnnnnnnnnnnnnnnnnnnnnnnnnnnnnnnnnnnnnnnnnnnnnnnnnnnnnnnnnnnnnnnnnnnnnnnnnnnnnnnnnnnnnnnnnnnnnnnnnnnnnnnnnnnnnnnnnnnnnnnnnnnnnnnnnnnnnnnnnnnnnnnnnnnnnnnnnnnnnnnnnnnnnnnnnnnnnnnnnnnnnnnnnnnnnnnnnnnnnnnnnnnnnnnnnnnnnnnnnnnnnnnnnnnnnnnnnnnnnnnnnnnnnnnnnnnnnnnnnnnnnnnnnnnnnnnnnnnnnnnnnnnnnnnnnnnnnnnnnnnnnnnnnnnnnnnnnnnnnnnnnnnnnnnnnnnnnnnnnnnnnnnnnnnnnnnnnnnnnnnnnnnnnnnnnnnnnnnnnnnnnnnnnnnnnnnnnnnnnnnnnnnnnnnnnnnnnnnnnnnnnnnnnnnnnnnnnnnnnnnnnnnnnnnnnnnnnnnnnnnnnnnnnnnnnnnnnnnnnnnnnnnnnnnnnnnnnnnnnnnnnnnnnnnnnnnnnnnnnnnnnnnnnnnnnnnnnnnnnnnnnnnnnnnnnnnnnnnnnnnnnnnnnnnnnnnnnnnnnnnnnnnnnnnnnnnnnnnnnnnnnnnnnnnnnnnnnnnnnnnnnnnnnnnnnnnnnnnnnnnnnnnnnnnnnnnnnnnnnnnnnnnnnnnnnnnnnnnnnnnnnnnnnnnnnnnnnnnnnnnnnnnnnnnnnnnnnnnnnnnnnnnnnnnnnnnnnnnnnnnnnnnnnnnnnnnnnnnnnnnnnnnnnnnnnnnnnnnnnnnnnnnnnnnnnnnnnnnnnnnnnnnnnnnnnnnnnnnnnnnnnnnnnnnnnnnnnnnnnnnnnnnnnnnnnnnnnnnnnnnnnnnnnnnnnnnnnnnnnnnnnnnnnnnnnnnnnnnnnnnnnnnnnnnnnnnnnnnnnnnnnnnnnnnnnnnnnnnnnnnnnnnnnnnnnnnnnnnnnnnnnnnnnnnnnnnnnnnnnnnnnnnnnnnnnnnnnnnnnnnnnnnnnnnnnnnnnnnnnnnnnnnnnnnnnnnnnnnnnnnnnnnnnnnnnnnnnnnnnnnnnnnnnnnnnnnnnnnnnnnnnnnnnnnnnnnnnnnnnnnnnnnnnnnnnnnnnnnnnnnnnnnnnnnnnnnnnnnnnnnnnnnnnnnnnnnnnnnnnnnnnnnnnnnnnnnnnnnnnnnnnnnnnnnnnnnnnnnnnnnnnnnnnnnnnnnnnnnnnnnnnnnnnnnnnnnnnnnnnnnnnnnnnnnnnnnnnnnnnnnnnnnnnnnnnnnnnnnnnnnnnnnnnnnnnnnnnnnnnnnnnnnnnnnnnnnnnnnnnnnnnnnnnnnnnnnnnnnnnnnnnnnnnnnnnnnnnnnnnnnnnnnnnnnnnnnnnnnnnnnnnnnnnnnnnnnnnnnnnnnnnnnnnnnnnnnnnnnnnnnnnnnnnnnnnnnnnnnnnnnnnnnnnnnnnnnnnnnnnnnnnnnnnnnnnnnnnnnnnnnnnnnnnnnnnnnnnnnnnnnnnnnnnnnnnnnnnnnnnnnnnnnnnnnnnnnnnnnnnnnnnnnnnnnnnnnnnnnnnnnnnnnnnnnnnnnnnnnnnnnnnnnnnnnnnnnnnnnnnnnnnnnnnnnnnnnnnnnnnnnnnnnnnnnnnnnnnnnnnnnnnnnnnnnnnnnnnnnnnnnnnnnnnnnnnnnnnnnnnnnnnnnnnnnnnnnnnnnnnnnnnnnnnnnnnnnnnnnnnnnnnnnnnnnnnnnnnnnnnnnnnnnnnnnnnnnnnnnnnnnnnnnnnnnnnnnnnnnnnnnnnnnnnnnnnnnnnnnnnnnnnnnnnnnnnnnnnnnnnnnnnnnnnnnnnnnnnnnnnnnnnnnnnnnnnnnnnnnnnnnnnnnnnnnnnnnnnnnnnnnnnnnnnnnnnnnnnnnnnnnnnnnnnnnnnnnnnnnnnnnnnnnnnnnnnnnnnnnnnnnnnnnnnnnnnnnnnnnnnnnnnnnnnnnnnnnnnnnnnnnnnnnnnnnnnnnnnnnnnnnnnnnnnnnnnnnnnnnnnnnnnnnnnnnnnnnnnnnnnnnnnnnnnnnnnnnnnnnnnnnnnnnnnnnnnnnnnnnnnnnnnnnnnnnnnnnnnnnnnnnnnnnnnnnnnnnnnnnnnnnnnnnnnnnnnnnnnnnnnnnnnnnnnnnnnnnnnnnnnnnnnnnnnnnnnnnnnnnnnnnnnnnnnnnnnnnnnnnnnnnnnnnnnnnnnnnnnnnnnnnnnnnnnnnnnnnnnnnnnnnnnnnnnnnnnnnnnnnnnnnnnnnnnnnnnnnnnnnnnnnnnnnnnnnnnnnnnnnnnnnnnnnnnnnnnnnnnnnnnnnnnnnnnnnnnnnnnnnnnnnnnnnnnnnnnnnnnnnnnnnnnnnnnnnnnnnnnnnnnnnnnnnnnnnnnnnnnnnnnnnnnnnnnnnnnnnnnnnnnnnnnnnnnnnnnnnnnnnnnnnnnnnnnnnnnnnnnnnnnnnnnnnnnnnnnnnnnnnnnnnnnnnnnnnnnnnnnnnnnnnnnnnnnnnnnnnnnnnnnnnnnnnnnnnnnnnnnnnnnnnnnnnnnnnnnnnnnnnnnnnnnnnnnnnnnnnnnnnnnnnnnnnnnnnnnnnnnnnnnnnnnnnnnnnnnnnnnnnnnnnnnnnnnnnnnnnnnnnnnnnnnnnnnnnnnnnnnnnnnnnnnnnnnnnnnnnnnnnnnnnnnnnnnnnnnnnnnnnnnnnnnnnnnnnnnnnnnnnnnnnnnnnnnnnnnnnnnnnnnnnnnnnnnnnnnnnnnnnnnnnnnnnnnnnnnnnnnnnnnnnnnnnnnnnnnnnnnnnnnnnnnnnnnnnnnnnnnnnnnnnnnnnnnnnnnnnnnnnnnnnnnnnnnnnnnnnnnnnnnnnnnnnnnnnnnnnnnnnnnnnnnnnnnnnnnnnnnnnnnnnnnnnnnnnnnnnnnnnnnnnnnnnnnnnnnnnnnnnnnnnnnnnnnnnnnnnnnnnnnnnnnnnnnnnnnnnnnnnnnnnnnnnnnnnnnnnnnnnnnnnnnnnnnnnnnnnnnnnnnnnnnnnnnnnnnnnnnnnnnnnnnnnnnnnnnnnnnnnnnnnnnnnnnnnnnnnnnnnnnnnnnnnnnnnnnnnnnnnnnnnnnnnnnnnnnnnnnnnnnnnnnnnnnnnnnnnnnnnnnnnnnnnnnnnnnnnnnnnnnnnnnnnnnnnnnnnnnnnnnnnnnnnnnnnnnnnnnnnnnnnnnnnnnnnnnnnnnnnnnnnnnnnnnnnnnnnnnnnnnnnnnnnnnnnnnnnnnnnnnnnnnnnnnnnnnnnnnnnnnnnnnnnnnnnnnnnnnnnnnnnnnnnnnnnnnnnnnnnnnnnnnnnnnnnnnnnnnnnnnnnnnnnnnnnnnnnnnnnnnnnnnnnnnnnnnnnnnnnnnnnnnnnnnnnnnnnnnnnnnnnnnnnnnnnnnnnnnnnnnnnnnnnnnnnnnnnnnnnnnnnnnnnnnnnnnnnnnnnnnnnnnnnnnnnnnnnnnnnnnnnnnnnnnnnnnnnnnnnnnnnnnnnnnnnnnnnnnnnnnnnnnnnnnnnnnnnnnnnnnnnnnnnnnnnnnnnnnnnnnnnnnnnnnnnnnnnnnnnnnnnnnnnnnnnnnnnnnnnnnnnnnnnnnnnnnnnnnnnnnnnnnnnnnnnnnnnnnnnnnnnnnnnnnnnnnnnnnnnnnnnnnnnnnnnnnnnnnnnnnnnnnnnnnnnnnnnnnnnnnnnnnnnnnnnnnnnnnnnnnnnnnnnnnnnnnnnnnnnnnnnnnnnnnnnnnnnnnnnnnnnnnnnnnnnnnnnnnnnnnnnnnnnnnnnnnnnnnnnnnnnnnnnnnnnnnnnnnnnnnnnnnnnnnnnnnnnnnnnnnnnnnnnnnnnnnnnnnnnnnnnnnnnnnnnnnnnnnnnnnnnnnnnnnnnnnnnnnnnnnnnnnnnnnnnnnnnnnnnnnnnnnnnnnnnnnnnnnnnnnnnnnnnnnnnnnnnnnnnnnnnnnnnnnnnnnnnnnnnnnnnnnnnnnnnnnnnnnnnnnnnnnnnnnnnnnnnnnnnnnnnnnnnnnnnnnnnnnnnnnnnnnnnnnnnnnnnnnnnnnnnnnnnnnnnnnnnnnnnnnnnnnnnnnnnnnnnnnnnnnnnnnnnnnnnnnnnnnnnnnnnnnnnnnnnnnnnnnnnnnnnnnnnnnnnnnnnnnnnnnnnnnnnnnnnnnnnnnnnnnnnnnnnnnnnnnnnnnnnnnnnnnnnnnnnnnnnnnnnnnnnnnnnnnnnnnnnnnnnnnnnnnnnnnnnnnnnnnnnnnnnnnnnnnnnnnnnnnnnnnnnnnnnnnnnnnnnnnnnnnnnnnnnnnnnnnnnnnnnnnnnnnnnnnnnnnnnnnnnnnnnnnnnnnnnnnnnnnnnnnnnnnnnnnnnnnnnnnnnnnnnnnnnnnnnnnnnnnnnnnnnnnnnnnnnnnnnnnnnnnnnnnnnnnnnnnnnnnnnnnnnnnnnnnnnnnnnnnnnnnnnnnnnnnnnnnnnnnnnnnnnnnnnnnnnnnnnnnnnnnnnnnnnnnnnnnnnnnnnnnnnnnnnnnnnnnnnnnnnnnnnnnnnnnnnnnnnnnnnnnnnnnnnnnnnnnnnnnnnnnnnnnnnnnnnnnnnnnnnnnnnnnnnnnnnnnnnnnnnnnnnnnnnnnnnnnnnnnnnnnnnnnnnnnnnnnnnnnnnnnnnnnnnnnnnnnnnnnnnnnnnnnnnnnnnnnnnnnnnnnnnnnnnnnnnnnnnnnnnnnnnnnnnnnnnnnnnnnnnnnnnnnnnnnnnnnnnnnnnnnnnnnnnnnnnnnnnnnnnnnnnnnnnnnnnnnnnnnnnnnnnnnnnnnnnnnnnnnnnnnnnnnnnnnnnnnnnnnnnnnnnnnnnnnnnnnnnnnnnnnnnnnnnnnnnnnnnnnnnnnnnnnnnnnnnnnnnnnnnnnnnnnnnnnnnnnnnnnnnnnnnnnnnnnnnnnnnnnnnnnnnnnnnnnnnnnnnnnnnnnnnnnnnnnnnnnnnnnnnnnnnnnnnnnnnnnnnnnnnnnnnnnnnnnnnnnnnnnnnnnnnnnnnnnnnnnnnnnnnnnnnnnnnnnnnnnnnnnnnnnnnnnnnnnnnnnnnnnnnnnnnnnnnnnnnnnnnnnnnnnnnnnnnnnnnnnnnnnnnnnnnnnnnnnnnnnnnnnnnnnnnnnnnnnnnnnnnnnnnnnnnnnnnnnnnnnnnnnnnnnnnnnnnnnnnnnnnnnnnnnnnnnnnnnnnnnnnnnnnnnnnnnnnnnnnnnnnnnnnnnnnnnnnnnnnnnnnnnnnnnnnnnnnnnnnnnnnnnnnnnnnnnnnnnnnnnnnnnnnnnnnnnnnnnnnnnnnnnnnnnnnnnnnnnnnnnnnnnnnnnnnnnnnnnnnnnnnnnnnnnnnnnnnnnnnnnnnnnnnnnnnnnnnnnnnnnnnnnnnnnnnnnnnnnnnnnnnnnnnnnnnnnnnnnnnnnnnnnnnnnnnnnnnnnnnnnnnnnnnnnnnnnnnnnnnnnnnnnnnnnnnnnnnnnnnnnnnnnnnnnnnnnnnnnnnnnnnnnnnnnnnnnnnnnnnnnnnnnnnnnnnnnnnnnnnnnnnnnnnnnnnnnnnnnnnnnnnnnnnnnnnnnnnnnnnnnnnnnnnnnnnnnnnnnnnnnnnnnnnnnnnnnnnnnnnnnnnnnnnnnnnnnnnnnnnnnnnnnnnnnnnnnnnnnnnnnnnnnnnnnnnnnnnnnnnnnnnnnnnnnnnnnnnnnnnnnnnnnnnnnnnnnnnnnnnnnnnnnnnnnnnnnnnnnnnnnnnnnnnnnnnnnnnnnnnnnnnnnnnnnnnnnnnnnnnnnnnnnnnnnnnnnnnnnnnnnnnnnnnnnnnnnnnnnnnnnnnnnnnnnnnnnnnnnnnnnnnnnnnnnnnnnnnnnnnnnnnnnnnnnnnnnnnnnnnnnnnnnnnnnnnnnnnnnnnnnnnnnnnnnnnnnnnnnnnnnnnnnnnnnnnnnnnnnnnnnnnnnnnnnnnnnnnnnnnnnnnnnnnnnnnnnnnnnnnnnnnnnnnnnnnnnnnnnnnnnnnnnnnnnnnnnnnnnnnnnnnnnnnnnnnnnnnnnnnnnnnnnnnnnnnnnnnnnnnnnnnnnnnnnnnnnnnnnnnnnnnnnnnnnnnnnnnnnnnnnnnnnnnnnnnnnnnnnnnnnnnnnnnnnnnnnnnnnnnnnnnnnnnnnnnnnnnnnnnnnnnnnnnnnnnnnnnnnnnnnnnnnnnnnnnnnnnnnnnnnnnnnnnnnnnnnnnnnnnnnnnnnnnnnnnnnnnnnnnnnnnnnnnnnnnnnnnnnnnnnnnnnnnnnnnnnnnnnnnnnnnnnnnnnnnnnnnnnnnnnnnnnnnnnnnnnnnnnnnnnnnnnnnnnnnnnnnnnnnnnnnnnnnnnnnnnnnnnnnnnnnnnnnnnnnnnnnnnnnnnnnnnnnnnnnnnnnnnnnnnnnnnnnnnnnnnnnnnnnnnnnnnnnnnnnnnnnnnnnnnnnnnnnnnnnnnnnnnnnnnnnnnnnnnnnnnnnnnnnnnnnnnnnnnnnnnnnnnnnnnnnnnnnnnnnnnnnnnnnnnnnnnnnnnnnnnnnnnnnnnnnnnnnnnnnnnnnnnnnnnnnnnnnnnnnnnnnnnnnnnnnnnnnnnnnnnnnnnnnnnnnnnnnnnnnnnnnnnnnnnnnnnnnnnnnnnnnnnnnnnnnnnnnnnnnnnnnnnnnnnnnnnnnnnnnnnnnnnnnnnnnnnnnnnnnnnnnnnnnnnnnnnnnnnnnnnnnnnnnnnnnnnnnnnnnnnnnnnnnnnnnnnnnnnnnnnnnnnnnnnnnnnnnnnnnnnnnnnnnnnnnnnnnnnnnnnnnnnnnnnnnnnnnnnnnnnnnnnnnnnnnnnnnnnnnnnnnnnnnnnnnnnnnnnnnnnnnnnnnnnnnnnnnnnnnnnnnnnnnnnnnnnnnnnnnnnnnnnnnnnnnnnnnnnnnnnnnnnnnnnnnnnnnnnnnnnnnnnnnnnnnnnnnnnnnnnnnnnnnnnnnnnnnnnnnnnnnnnnnnnnnnnnnnnnnnnnnnnnnnnnnnnnnnnnnnnnnnnnnnnnnnnnnnnnnnnnnnnnnnnnnnnnnnnnnnnnnnnnnnnnnnnnnnnnnnnnnnnnnnnnnnnnnnnnnnnnnnnnnnnnnnnnnnnnnnnnnnnnnnnnnnnnnnnnnnnnnnnnnnnnnnnnnnnnnnnnnnnnnnnnnnnnnnnnnnnnnnnnnnnnnnnnnnnnnnnnnnnnnnnnnnnnnnnnnnnnnnnnnnnnnnnnnnnnnnnnnnnnnnnnnnnnnnnnnnnnnnnnnnnnnnnnnnnnnnnnnnnnnnnnnnnnnnnnnnnnnnnnnnnnnnnnnnnnnnnnnnnnnnnnnnnnnnnnnnnnnnnnnnnnnnnnnnnnnnnnnnnnnnnnnnnnnnnnnnnnnnnnnnnnnnnnnnnnnnnnnnnnnnnnnnnnnnnnnnnnnnnnnnnnnnnnnnnnnnnnnnnnnnnnnnnnnnnnnnnnnnnnnnnnnnnnnnnnnnnnnnnnnnnnnnnnnnnnnnnnnnnnnnnnnnnnnnnnnnnnnnnnnnnnnnnnnnnnnnnnnnnnnnnnnnnnnnnnnnnnnnnnnnnnnnnnnnnnnnnnnnnnnnnnnnnnnnnnnnnnnnnnnnnnnnnnnnnnnnnnnnnnnnnnnnnnnnnnnnnnnnnnnnnnnnnnnnnnnnnnnnnnnnnnnnnnnnnnnnnnnnnnnnnnnnnnnnnnnnnnnnnnnnnnnnnnnnnnnnnnnnnnnnnnnnnnnnnnnnnnnnnnnnnnnnnnnnnnnnnnnnnnnnnnnnnnnnnnnnnnnnnnnnnnnnnnnnnnnnnnnnnnnnnnnnnnnnnnnnnnnnnnnnnnnnnnnnnnnnnnnnnnnnnnnnnnnnnnnnnnnnnnnnnnnnnnnnnnnnnnnnnnnnnnnnnnnnnnnnnnnnnnnnnnnnnnnnnnnnnnnnnnnnnnnnnnnnnnnnnnnnnnnnnnnnnnnnnnnnnnnnnnnnnnnnnnnnnnnnnnnnnnnnnnnnnnnnnnnnnnnnnnnnnnnnnnnnnnnnnnnnnnnnnnnnnnnnnnnnnnnnnnnnnnnnnnnnnnnnnnnnnnnnnnnnnnnnnnnnnnnnnnnnnnnnnnnnnnnnnnnnnnnnnnnnnnnnnnnnnnnnnnnnnnnnnnnnnnnnnnnnnnnnnnnnnnnnnnnnnnnnnnnnnnnnnnnnnnnnnnnnnnnnnnnnnnnnnnnnnnnnnnnnnnnnnnnnnnnnnnnnnnnnnnnnnnnnnnnnnnnnnnnnnnnnnnnnnnnnnnnnnnnnnnnnnnnnnnnnnnnnnnnnnnnnnnnnnnnnnnnnnnnnnnnnnnnnnnnnnnnnnnnnnnnnnnnnnnnnnnnnnnnnnnnnnnnnnnnnnnnnnnnnnnnnnnnnnnnnnnnnnnnnnnnnnnnnnnnnnnnnnnnnnnnnnnnnnnnnnnnnnnnnnnnnnnnnnnnnnnnnnnnnnnnnnnnnnnnnnnnnnnnnnnnnnnnnnnnnnnnnnnnnnnnnnnnnnnnnnnnnnnnnnnnnnnnnnnnnnnnnnnnnnnnnnnnnnnnnnnnnnnnnnnnnnnnnnnnnnnnnnnnnnnnnnnnnnnnnnnnnnnnnnnnnnnnnnnnnnnnnnnnnnnnnnnnnnnnnnnnnnnnnnnnnnnnnnnnnnnnnnnnnnnnnnnnnnnnnnnnnnnnnnnnnnnnnnnnnnnnnnnnnnnnnnnnnnnnnnnnnnnnnnnnnnnnnnnnnnnnnnnnnnnnnnnnnnnnnnnnnnnnnnnnnnnnnnnnnnnnnnnnnnnnnnnnnnnnnnnnnnnnnnnnnnnnnnnnnnnnnnnnnnnnnnnnnnnnnnnnnnnnnnnnnnnnnnnnnnnnnnnnnnnnnnnnnnnnnnnnnnnnnnnnnnnnnnnnnnnnnnnnnnnnnnnnnnnnnnnnnnnnnnnnnnnnnnnnnnnnnnnnnnnnnnnnnnnnnnnnnnnnnnnnnnnnnnnnnnnnnnnnnnnnnnnnnnnnnnnnnnnnnnnnnnnnnnnnnnnnnnnnnnnnnnnnnnnnnnnnnnnnnnnnnnnnnnnnnnnnnnnnnnnnnnnnnnnnnnnnnnnnnnnnnnnnnnnnnnnnnnnnnnnnnnnnnnnnnnnnnnnnnnnnnnnnnnnnnnnnnnnnnnnnnnnnnnnnnnnnnnnnnnnnnnnnnnnnnnnnnnnnnnnnnnnnnnnnnnnnnnnnnnnnnnnnnnnnnnnnnnnnnnnnnnnnnnnnnnnnnnnnnnnnnnnnnnnnnnnnnnnnnnnnnnnnnnnnnnnnnnnnnnnnnnnnnnnnnnnnnnnnnnnnnnnnnnnnnnnnnnnnnnnnnnnnnnnnnnnnnnnnnnnnnnnnnnnnnnnnnnnnnnnnnnnnnnnnnnnnnnnnnnnnnnnnnnnnnnnnnnnnnnnnnnnnnnnnnnnnnnnnnnnnnnnnnnnnnnnnnnnnnnnnnnnnnnnnnnnnnnnnnnnnnnnnnnnnnnnnnnnnnnnnnnnnnnnnnnnnnnnnnnnnnnnnnnnnnnnnnnnnnnnnnnnnnnnnnnnnnnnnnnnnnnnnnnnnnnnnnnnnnnnnnnnnnnnnnnnnnnnnnnnnnnnnnnnnnnnnnnnnnnnnnnnnnnnnnnnnnnnnnnnnnnnnnnnnnnnnnnnnnnnnnnnnnnnnnnnnnnnnnnnnnnnnnnnnnnnnnnnnnnnnnnnnnnnnnnnnnnnnnnnnnnnnnnnnnnnnnnnnnnnnnnnnnnnnnnnnnnnnnnnnnnnnnnnnnnnnnnnnnnnnnnnnnnnnnnnnnnnnnnnnnnnnnnnnnnnnnnnnnnnnnnnnnnnnnnnnnnnnnnnnnnnnnnnnnnnnnnnnnnnnnnnnnnnnnnnnnnnnnnnnnnnnnnnnnnnnnnnnnnnnnnnnnnnnnnnnnnnnnnnnnnnnnnnnnnnnnnnnnnnnnnnnnnnnnnnnnnnnnnnnnnnnnnnnnnnnnnnnnnnnnnnnnnnnnnnnnnnnnnnnnnnnnnnnnnnnnnnnnnnnnnnnnnnnnnnnnnnnnnnnnnnnnnnnnnnnnnnnnnnnnnnnnnnnnnnnnnnnnnnnnnnnnnnnnnnnnnnnnnnnnnnnnnnnnnnnnnnnnnnnnnnnnnnnnnnnnnnnnnnnnnnnnnnnnnnnnnnnnnnnnnnnnnnnnnnnnnnnnnnnnnnnnnnnnnnnnnnnnnnnnnnnnnnnnnnnnnnnnnnnnnnnnnnnnnnnnnnnnnnnnnnnnnnnnnnnnnnnnnnnnnnnnnnnnnnnnnnnnnnnnnnnnnnnnnnnnnnnnnnnnnnnnnnnnnnnnnnnnnnnnnnnnnnnnnnnnnnnnnnnnnnnnnnnnnnnnnnnnnnnnnnnnnnnnnnnnnnnnnnnnnnnnnnnnnnnnnnnnnnnnnnnnnnnnnnnnnnnnnnnnnnnnnnnnnnnnnnnnnnnnnnnnnnnnnnnnnnnnnnnnnnnnnnnnnnnnnnnnnnnnnnnnnnnnnnnnnnnnnnnnnnnnnnnnnnnnnnnnnnnnnnnnnnnnnnnnnnnnnnnnnnnnnnnnnnnnnnnnnnnnnnnnnnnnnnnnnnnnnnnnnnnnnnnnnnnnnnnnnnnnnnnnnnnnnnnnnnnnnnnnnnnnnnnnnnnnnnnnnnnnnnnnnnnnnnnnnnnnnnnnnnnnnnnnnnnnnnnnnnnnnnnnnnnnnnnnnnnnnnnnnnnnnnnnnnnnnnnnnnnnnnnnnnnnnnnnnnnnnnnnnnnnnnnnnnnnnnnnnnnnnnnnnnnnnnnnnnnnnnnnnnnnnnnnnnnnnnnnnnnnnnnnnnnnnnnnnnnnnnnnnnnnnnnnnnnnnnnnnnnnnnnnnnnnnnnnnnnnnnnnnnnnnnnnnnnnnnnnnnnnnnnnnnnnnnnnnnnnnnnnnnnnnnnnnnnnnnnnnnnnnnnnnnnnnnnnnnnnnnnnnnnnnnnnnnnnnnnnnnnnnnnnnnnnnnnnnnnnnnnnnnnnnnnnnnnnnnnnnnnnnnnnnnnnnnnnnnnnnnnnnnnnnnnnnnnnnnnnnnnnnnnnnnnnnnnnnnnnnnnnnnnnnnnnnnnnnnnnnnnnnnnnnnnnnnnnnnnnnnnnnnnnnnnnnnnnnnnnnnnnnnnnnnnnnnnnnnnnnnnnnnnnnnnnnnnnnnnnnnnnnnnnnnnnnnnnnnnnnnnnnnnnnnnnnnnnnnnnnnnnnnnnnnnnnnnnnnnnnnnnnnnnnnnnnnnnnnnnnnnnnnnnnnnnnnnnnnnnnnnnnnnnnnnnnnnnnnnnnnnnnnnnnnnnnnnnnnnnnnnnnnnnnnnnnnnnnnnnnnnnnnnnnnnnnnnnnnnnnnnnnnnnnnnnnnnnnnnnnnnnnnnnnnnnnnnnnnnnnnnnnnnnnnnnnnnnnnnnnnnnnnnnnnnnnnnnnnnnnnnnnnnnnnnnnnnnnnnnnnnnnnnnnnnnnnnnnnnnnnnnnnnnnnnnnnnnnnnnnnnnnnnnnnnnnnnnnnnnnnnnnnnnnnnnnnnnnnnnnnnnnnnnnnnnnnnnnnnnnnnnnnnnnnnnnnnnnnnnnnnnnnnnnnnnnnnnnnnnnnnnnnnnnnnnnnnnnnnnnnnnnnnnnnnnnnnnnnnnnnnnnnnnnnnnnnnnnnnnnnnnnnnnnnnnnnnnnnnnnnnnnnnnnnnnnnnnnnnnnnnnnnnnnnnnnnnnnnnnnnnnnnnnnnnnnnnnnnnnnnnnnnnnnnnnnnnnnnnnnnnnnnnnnnnnnnnnnnnnnnnnnnnnnnnnnnnnnnnnnnnnnnnnnnnnnnnnnnnnnnnnnnnnnnnnnnnnnnnnnnnnnnnnnnnnnnnnnnnnnnnnnnnnnnnnnnnnnnnnnnnnnnnnnnnnnnnnnnnnnnnnnnnnnnnnnnnnnnnnnnnnnnnnnnnnnnnnnnnnnnnnnnnnnnnnnnnnnnnnnnnnnnnnnnnnnnnnnnnnnnnnnnnnnnnnnnnnnnnnnnnnnnnnnnnnnnnnnnnnnnnnnnnnnnnnnnnnnnnnnnnnnnnnnnnnnnnnnnnnnnnnnnnnnnnnnnnnnnnnnnnnnnnnnnnnnnnnnnnnnnnnnnnnnnnnnnnnnnnnnnnnnnnnnnnnnnnnnnnnnnnnnnnnnnnnnnnnnnnnnnnnnnnnnnnnnnnnnnnnnnnnnnnnnnnnnnnnnnnnnnnnnnnnnnnnnnnnnnnnnnnnnnnnnnnnnnnnnnnnnnnnnnnnnnnnnnnnnnnnnnnnnnnnnnnnnnnnnnnnnnnnnnnnnnnnnnnnnnnnnnnnnnnnnnnnnnnnnnnnnnnnnnnnnnnnnnnnnnnnnnnnnnnnnnnnnnnnnnnnnnnnnnnnnnnnnnnnnnnnnnnnnnnnnnnnnnnnnnnnnnnnnnnnnnnnnnnnnnnnnnnnnnnnnnnnnnnnnnnnnnnnnnnnnnnnnnnnnnnnnnnnnnnnnnnnnnnnnnnnnnnnnnnnnnnnnnnnnnnnnnnnnnnnnnnnnnnnnnnnnnnnnnnnnnnnnnnnnnnnnnnnnnnnnnnnnnnnnnnnnnnnnnnnnnnnnnnnnnnnnnnnnnnnnnnnnnnnnnnnnnnnnnnnnnnnnnnnnnnnnnnnnnnnnnnnnnnnnnnnnnnnnnnnnnnnnnnnnnnnnnnnnnnnnnnnnnnnnnnnnnnnnnnnnnnnnnnnnnnnnnnnnnnnnnnnnnnnnnnnnnnnnnnnnnnnnnnnnnnnnnnnnnnnnnnnnnnnnnnnnnnnnnnnnnnnnnnnnnnnnnnnnnnnnnnnnnnnnnnnnnnnnnnnnnnnnnnnnnnnnnnnnnnnnnnnnnnnnnnnnnnnnnnnnnnnnnnnnnnnnnnnnnnnnnnnnnnnnnnnnnnnnnnnnnnnnnnnnnnnnnnnnnnnnnnnnnnnnnnnnnnnnnnnnnnnnnnnnnnnnnnnnnnnnnnnnnnnnnnnnnnnnnnnnnnnnnnnnnnnnnnnnnnnnnnnnnnnnnnnnnnnnnnnnnnnnnnnnnnnnnnnnnnnnnnnnnnnnnnnnnnnnnnnnnnnnnnnnnnnnnnnnnnnnnnnnnnnnnnnnnnnnnnnnnnnnnnnnnnnnnnnnnnnnnnnnnnnnnnnnnnnnnnnnnnnnnnnnnnnnnnnnnnnnnnnnnnnnnnnnnnnnnnnnnnnnnnnnnnnnnnnnnnnnnnnnnnnnnnnnnnnnnnnnnnnnnnnnnnnnnnnnnnnnnnnnnnnnnnnnnnnnnnnnnnnnnnnnnnnnnnnnnnnnnnnnnnnnnnnnnnnnnnnnnnnnnnnnnnnnnnnnnnnnnnnnnnnnnnnnnnnnnnnnnnnnnnnnnnnnnnnnnnnnnnnnnnnnnnnnnnnnnnnnnnnnnnnnnnnnnnnnnnnnnnnnnnnnnnnnnnnnnnnnnnnnnnnnnnnnnnnnnnnnnnnnnnnnnnnnnnnnnnnnnnnnnnnnnnnnnnnnnnnnnnnnnnnnnnnnnnnnnnnnnnnnnnnnnnnnnnnnnnnnnnnnnnnnnnnnnnnnnnnnnnnnnnnnnnnnnnnnnnnnnnnnnnnnnnnnnnnnnnnnnnnnnnnnnnnnnnnnnnnnnnnnnnnnnnnnnnnnnnnnnnnnnnnnnnnnnnnnnnnnnnnnnnnnnnnnnnnnnnnnnnnnnnnnnnnnnnnnnnnnnnnnnnnnnnnnnnnnnnnnnnnnnnnnnnnnnnnnnnnnnnnnnnnnnnnnnnnnnnnnnnnnnnnnnnnnnnnnnnnnnnnnnnnnnnnnnnnnnnnnnnnnnnnnnnnnnnnnnnnnnnnnnnnnnnnnnnnnnnnnnnnnnnnnnnnnnnnnnnnnnnnnnnnnnnnnnnnnnnnnnnnnnnnnnnnnnnnnnnnnnnnnnnnnnnnnnnnnnnnnnnnnnnnnnnnnnnnnnnnnnnnnnnnnnnnnnnnnnnnnnnnnnnnnnnnnnnnnnnnnnnnnnnnnnnnnnnnnnnnnnnnnnnnnnnnnnnnnnnnnnnnnnnnnnnnnnnnnnnnnnnnnnnnnnnnnnnnnnnnnnnnnnnnnnnnnnnnnnnnnnnnnnnnnnnnnnnnnnnnnnnnnnnnnnnnnnnnnnnnnnnnnnnnnnnnnnnnnnnnnnnnnnnnnnnnnnnnnnnnnnnnnnnnnnnnnnnnnnnnnnnnnnnnnnnnnnnnnnnnnnnnnnnnnnnnnnnnnnnnnnnnnnnnnnnnnnnnnnnnnnnnnnnnnnnnnnnnnnnnnnnnnnnnnnnnnnnnnnnnnnnnnnnnnnnnnnnnnnnnnnnnnnnnnnnnnnnnnnnnnnnnnnnnnnnnnnnnnnnnnnnnnnnnnnnnnnnnnnnnnnnnnnnnnnnnnnnnnnnnnnnnnnnnnnnnnnnnnnnnnnnnnnnnnnnnnnnnnnnnnnnnnnnnnnnnnnnnnnnnnnnnnnnnnnnnnnnnnnnnnnnnnnnnnnnnnnnnnnnnnnnnnnnnnnnnnnnnnnnnnnnnnnnnnnnnnnnnnnnnnnnnnnnnnnnnnnnnnnnnnnnnnnnnnnnnnnnnnnnnnnnnnnnnnnnnnnnnnnnnnnnnnnnnnnnnnnnnnnnnnnnnnnnnnnnnnnnnnnnnnnnnnnnnnnnnnnnnnnnnnnnnnnnnnnnnnnnnnnnnnnnnnnnnnnnnnnnnnnnnnnnnnnnnnnnnnnnnnnnnnnnnnnnnnnnnnnnnnnnnnnnnnnnnnnnnnnnnnnnnnnnnnnnnnnnnnnnnnnnnnnnnnnnnnnnnnnnnnnnnnnnnnnnnnnnnnnnnnnnnnnnnnnnnnnnnnnnnnnnnnnnnnnnnnnnnnnnnnnnnnnnnnnnnnnnnnnnnnnnnnnnnnnnnnnnnnnnnnnnnnnnnnnnnnnnnnnnnnnnnnnnnnnnnnnnnnnnnnnnnnnnnnnnnnnnnnnnnnnnnnnnnnnnnnnnnnnnnnnnnnnnnnnnnnnnnnnnnnnnnnnnnnnnnnnnnnnnnnnnnnnnnnnnnnnnnnnnnnnnnnnnnnnnnnnnnnnnnnnnnnnnnnnnnnnnnnnnnnnnnnnnnnnnnnnnnnnnnnnnnnnnnnnnnnnnnnnnnnnnnnnnnnnnnnnnnnnnnnnnnnnnnnnnnnnnnnnnnnnnnnnnnnnnnnnnnnnnnnnnnnnnnnnnnnnnnnnnnnnnnnnnnnnnnnnnnnnnnnnnnnnnnnnnnnnnnnnnnnnnnnnnnnnnnnnnnnnnnnnnnnnnnnnnnnnnnnnnnnnnnnnnnnnnnnnnnnnnnnnnnnnnnnnnnnnnnnnnnnnnnnnnnnnnnnnnnnnnnnnnnnnnnnnnnnnnnnnnnnnnnnnnnnnnnnnnnnnnnnnnnnnnnnnnnnnnnnnnnnnnnnnnnnnnnnnnnnnnnnnnnnnnnnnnnnnnnnnnnnnnnnnnnnnnnnnnnnnnnnnnnnnnnnnnnnnnnnnnnnnnnnnnnnnnnnnnnnnnnnnnnnnnnnnnnnnnnnnnnnnnnnnnnnnnnnnnnnnnnnnnnnnnnnnnnnnnnnnnnnnnnnnnnnnnnnnnnnnnnnnnnnnnnnnnnnnnnnnnnnnnnnnnnnnnnnnnnnnnnnnnnnnnnnnnnnnnnnnnnnnnnnnnnnnnnnnnnnnnnnnnnnnnnnnnnnnnnnnnnnnnnnnnnnnnnnnnnnnnnnnnnnnnnnnnnnnnnnnnnnnnnnnnnnnnnnnnnnnnnnnnnnnnnnnnnnnnnnnnnnnnnnnnnnnnnnnnnnnnnnnnnnnnnnnnnnnnnnnnnnnnnnnnnnnnnnnnnnnnnnnnnnnnnnnnnnnnnnnnnnnnnnnnnnnnnnnnnnnnnnnnnnnnnnnnnnnnnnnnnnnnnnnnnnnnnnnnnnnnnnnnnnnnnnnnnnnnnnnnnnnnnnnnnnnnnnnnnnnnnnnnnnnnnnnnnnnnnnnnnnnnnnnnnnnnnnnnnnnnnnnnnnnnnnnnnnnnnnnnnnnnnnnnnnnnnnnnnnnnnnnnnnnnnnnnnnnnnnnnnnnnnnnnnnnnnnnnnnnnnnnnnnnnnnnnnnnnnnnnnnnnnnnnnnnnnnnnnnnnnnnnnnnnnnnnnnnnnnnnnnnnnnnnnnnnnnnnnnnnnnnnnnnnnnnnnnnnnnnnnnnnnnnnnnnnnnnnnnnnnnnnnnnnnnnnnnnnnnnnnnnnnnnnnnnnnnnnnnnnnnnnnnnnnnnnnnnnnnnnnnnnnnnnnnnnnnnnnnnnnnnnnnnnnnnnnnnnnnnnnnnnnnnnnnnnnnnnnnnnnnnnnnnnnnnnnnnnnnnnnnnnnnnnnnnnnnnnnnnnnnnnnnnnnnnnnnnnnnnnnnnnnnnnnnnnnnnnnnnnnnnnnnnnnnnnnnnnnnnnnnnnnnnnnnnnnnnnnnnnnnnnnnnnnnnnnnnnnnnnnnnnnnnnnnnnnnnnnnnnnnnnnnnnnnnnnnnnnnnnnnnnnnnnnnnnnnnnnnnnnnnnnnnnnnnnnnnnnnnnnnnnnnnnnnnnnnnnnnnnnnnnnnnnnnnnnnnnnnnnnnnnnnnnnnnnnnnnnnnnnnnnnnnnnnnnnnnnnnnnnnnnnnnnnnnnnnnnnnnnnnnnnnnnnnnnnnnnnnnnnnnnnnnnnnnnnnnnnnnnnnnnnnnnnnnnnnnnnnnnnnnnnnnnnnnnnnnnnnnnnnnnnnnnnnnnnnnnnnnnnnnnnnnnnnnnnnnnnnnnnnnnnnnnnnnnnnnnnnnnnnnnnnnnnnnnnnnnnnnnnnnnnnnnnnnnnnnnnnnnnnnnnnnnnnnnnnnnnnnnnnnnnnnnnnnnnnnnnnnnnnnnnnnnnnnnnnnnnnnnnnnnnnnnnnnnnnnnnnnnnnnnnnnnnnnnnnnnnnnnnnnnnnnnnnnnnnnnnnnnnnnnnnnnnnnnnnnnnnnnnnnnnnnnnnnnnnnnnnnnnnnnnnnnnnnnnnnnnnnnnnnnnnnnnnnnnnnnnnnnnnnnnnnnnnnnnnnnnnnnnnnnnnnnnnnnnnnnnnnnnnnnnnnnnnnnnnnnnnnnnnnnnnnnnnnnnnnnnnnnnnnnnnnnnnnnnnnnnnnnnnnnnnnnnnnnnnnnnnnnnnnnnnnnnnnnnnnnnnnnnnnnnnnnnnnnnnnnnnnnnnnnnnnnnnnnnnnnnnnnnnnnnnnnnnnnnnnnnnnnnnnnnnnnnnnnnnnnnnnnnnnnnnnnnnnnnnnnnnnnnnnnnnnnnnnnnnnnnnnnnnnnnnnnnnnnnnnnnnnnnnnnnnnnnnnnnnnnnnnnnnnnnnnnnnnnnnnnnnnnnnnnnnnnnnnnnnnnnnnnnnnnnnnnnnnnnnnnnnnnnnnnnnnnnnnnnnnnnnnnnnnnnnnnnnnnnnnnnnnnnnnnnnnnnnnnnnnnnnnnnnnnnnnnnnnnnnnnnnnnnnnnnnnnnnnnnnnnnnnnnnnnnnnnnnnnnnnnnnnnnnnnnnnnnnnnnnnnnnnnnnnnnnnnnnnnnnnnnnnnnnnnnnnnnnnnnnnnnnnnnnnnnnnnnnnnnnnnnnnnnnnnnnnnnnnnnnnnnnnnnnnnnnnnnnnnnnnnnnnnnnnnnnnnnnnnnnnnnnnnnnnnnnnnnnnnnnnnnnnnnnnnnnnnnnnnnnnnnnnnnnnnnnnnnnnnnnnnnnnnnnnnnnnnnnnnnnnnnnnnnnnnnnnnnnnnnnnnnnnnnnnnnnnnnnnnnnnnnnnnnnnnnnnnnnnnnnnnnnnnnnnnnnnnnnnnnnnnnnnnnnnnnnnnnnnnnnnnnnnnnnnnnnnnnnnnnnnnnnnnnnnnnnnnnnnnnnnnnnnnnnnnnnnnnnnnnnnnnnnnnnnnnnnnnnnnnnnnnnnnnnnnnnnnnnnnnnnnnnnnnnnnnnnnnnnnnnnnnnnnnnnnnnnnnnnnnnnnnnnnnnnnnnnnnnnnnnnnnnnnnnnnnnnnnnnnnnnnnnnnnnnnnnnnnnnnnnnnnnnnnnnnnnnnnnnnnnnnnnnnnnnnnnnnnnnnnnnnnnnnnnnnnnnnnnnnnnnnnnnnnnnnnnnnnnnnnnnnnnnnnnnnnnnnnnnnnnnnnnnnnnnnnnnnnnnnnnnnnnnnnnnnnnnnnnnnnnnnnnnnnnnnnnnnnnnnnnnnnnnnnnnnnnnnnnnnnnnnnnnnnnnnnnnnnnnnnnnnnnnnnnnnnnnnnnnnnnnnnnnnnnnnnnnnnnnnnnnnnnnnnnnnnnnnnnnnnnnnnnnnnnnnnnnnnnnnnnnnnnnnnnnnnnnnnnnnnnnnnnnnnnnnnnnnnnnnnnnnnnnnnnnnnnnnnnnnnnnnnnnnnnnnnnnnnnnnnnnnnnnnnnnnnnnnnnnnnnnnnnnnnnnnnnnnnnnnnnnnnnnnnnnnnnnnnnnnnnnnnnnnnnnnnnnnnnnnnnnnnnnnnnnnnnnnnnnnnnnnnnnnnnnnnnnnnnnnnnnnnnnnnnnnnnnnnnnnnnnnnnnnnnnnnnnnnnnnnnnnnnnnnnnnnnnnnnnnnnnnnnnnnnnnnnnnnnnnnnnnnnnnnnnnnnnnnnnnnnnnnnnnnnnnnnnnnnnnnnnnnnnnnnnnnnnnnnnnnnnnnnnnnnnnnnnnnnnnnnnnnnnnnnnnnnnnnnnnnnnnnnnnnnnnnnnnnnnnnnnnnnnnnnnnnnnnnnnnnnnnnnnnnnnnnnnnnnnnnnnnnnnnnnnnnnnnnnnnnnnnnnnnnnnnnnnnnnnnnnnnnnnnnnnnnnnnnnnnnnnnnnnnnnnnnnnnnnnnnnnnnnnnnnnnnnnnnnnnnnnnnnnnnnnnnnnnnnnnnnnnnnnnnnnnnnnnnnnnnnnnnnnnnnnnnnnnnnnnnnnnnnnnnnnnnnnnnnnnnnnnnnnnnnnnnnnnnnnnnnnnnnnnnnnnnnnnnnnnnnnnnnnnnnnnnnnnnnnnnnnnnnnnnnnnnnnnnnnnnnnnnnnnnnnnnnnnnnnnnnnnnnnnnnnnnnnnnnnnnnnnnnnnnnnnnnnnnnnnnnnnnnnnnnnnnnnnnnnnnnnnnnnnnnnnnnnnnnnnnnnnnnnnnnnnnnnnnnnnnnnnnnnnnnnnnnnnnnnnnnnnnnnnnnnnnnnnnnnnnnnnnnnnnnnnnnnnnnnnnnnnnnnnnnnnnnnnnnnnnnnnnnnnnnnnnnnnnnnnnnnnnnnnnnnnnnnnnnnnnnnnnnnnnnnnnnnnnnnnnnnnnnnnnnnnnnnnnnnnnnnnnnnnnnnnnnnnnnnnnnnnnnnnnnnnnnnnnnnnnnnnnnnnnnnnnnnnnnnnnnnnnnnnnnnnnnnnnnnnnnnnnnnnnnnnnnnnnnnnnnnnnnnnnnnnnnnnnnnnnnnnnnnnnnnnnnnnnnnnnnnnnnnnnnnnnnnnnnnnnnnnnnnnnnnnnnnnnnnnnnnnnnnnnnnnnnnnnnnnnnnnnnnnnnnnnnnnnnnnnnnnnnnnnnnnnnnnnnnnnnnnnnnnnnnnnnnnnnnnnnnnnnnnnnnnnnnnnnnnnnnnnnnnnnnnnnnnnnnnnnnnnnnnnnnnnnnnnnnnnnnnnnnnnnnnnnnnnnnnnnnnnnnnnnnnnnnnnnnnnnnnnnnnnnnnnnnnnnnnnnnnnnnnnnnnnnnnnnnnnnnnnnnnnnnnnnnnnnnnnnnnnnnnnnnnnnnnnnnnnnnnnnnnnnnnnnnnnnnnnnnnnnnnnnnnnnnnnnnnnnnnnnnnnnnnnnnnnnnnnnnnnnnnnnnnnnnnnnnnnnnnnnnnnnnnnnnnnnnnnnnnnnnnnnnnnnnnnnnnnnnnnnnnnnnnnnnnnnnnnnnnnnnnnnnnnnnnnnnnnnnnnnnnnnnnnnnnnnnnnnnnnnnnnnnnnnnnnnnnnnnnnnnnnnnnnnnnnnnnnnnnnnnnnnnnnnnnnnnnnnnnnnnnnnnnnnnnnnnnnnnnnnnnnnnnnnnnnnnnnnnnnnnnnnnnnnnnnnnnnnnnnnnnnnnnnnnnnnnnnnnnnnnnnnnnnnnnnnnnnnnnnnnnnnnnnnnnnnnnnnnnnnnnnnnnnnnnnnnnnnnnnnnnnnnnnnnnnnnnnnnnnnnnnnnnnnnnnnnnnnnnnnnnnnnnnnnnnnnnnnnnnnnnnnnnnnnnnnnnnnnnnnnnnnnnnnnnnnnnnnnnnnnnnnnnnnnnnnnnnnnnnnnnnnnnnnnnnnnnnnnnnnnnnnnnnnnnnnnnnnnnnnnnnnnnnnnnnnnnnnnnnnnnnnnnnnnnnnnnnnnnnnnnnnnnnnnnnnnnnnnnnnnnnnnnnnnnnnnnnnnnnnnnnnnnnnnnnnnnnnnnnnnnnnnnnnnnnnnnnnnnnnnnnnnnnnnnnnnnnnnnnnnnnnnnnnnnnnnnnnnnnnnnnnnnnnnnnnnnnnnnnnnnnnnnnnnnnnnnnnnnnnnnnnnnnnnnnnnnnnnnnnnnnnnnnnnnnnnnnnnnnnnnnnnnnnnnnnnnnnnnnnnnnnnnnnnnnnnnnnnnnnnnnnnnnnnnnnnnnnnnnnnnnnnnnnnnnnnnnnnnnnnnnnnnnnnnnnnnnnnnnnnnnnnnnnnnnnnnnnnnnnnnnnnnnnnnnnnnnnnnnnnnnnnnnnnnnnnnnnnnnnnnnnnnnnnnnnnnnnnnnnnnnnnnnnnnnnnnnnnnnnnnnnnnnnnnnnnnnnnnnnnnnnnnnnnnnnnnnnnnnnnnnnnnnnnnnnnnnnnnnnnnnnnnnnnnnnnnnnnnnnnnnnnnnnnnnnnnnnnnnnnnnnnnnnnnnnnnnnnnnnnnnnnnnnnnnnnnnnnnnnnnnnnnnnnnnnnnnnnnnnnnnnnnnnnnnnnnnnnnnnnnnnnnnnnnnnnnnnnnnnnnnnnnnnnnnnnnnnnnnnnnnnnnnnnnnnnnnnnnnnnnnnnnnnnnnnnnnnnnnnnnnnnnnnnnnnnnnnnnnnnnnnnnnnnnnnnnnnnnnnnnnnnnnnnnnnnnnnnnnnnnnnnnnnnnnnnnnnnnnnnnnnnnnnnnnnnnnnnnnnnnnnnnnnnnnnnnnnnnnnnnnnnnnnnnnnnnnnnnnnnnnnnnnnnnnnnnnnnnnnnnnnnnnnnnnnnnnnnnnnnnnnnnnnnnnnnnnnnnnnnnnnnnnnnnnnnnnnnnnnnnnnnnnnnnnnnnnnnnnnnnnnnnnnnnnnnnnnnnnnnnnnnnnnnnnnnnnnnnnnnnnnnnnnnnnnnnnnnnnnnnnnnnnnnnnnnnnnnnnnnnnnnnnnnnnnnnnnnnnnnnnnnnnnnnnnnnnnnnnnnnnnnnnnnnnnnnnnnnnnnnnnnnnnnnnnnnnnnnnnnnnnnnnnnnnnnnnnnnnnnnnnnnnnnnnnnnnnnnnnnnnnnnnnnnnnnnnnnnnnnnnnnnnnnnnnnnnnnnnnnnnnnnnnnnnnnnnnnnnnnnnnnnnnnnnnnnnnnnnnnnnnnnnnnnnnnnnnnnnnnnnnnnnnnnnnnnnnnnnnnnnnnnnnnnnnnnnnnnnnnnnnnnnnnnnnnnnnnnnnnnnnnnnnnnnnnnnnnnnnnnnnnnnnnnnnnnnnnnnnnnnnnnnnnnnnnnnnnnnnnnnnnnnnnnnnnnnnnnnnnnnnnnnnnnnnnnnnnnnnnnnnnnnnnnnnnnnnnnnnnnnnnnnnnnnnnnnnnnnnnnnnnnnnnnnnnnnnnnnnnnnnnnnnnnnnnnnnnnnnnnnnnnnnnnnnnnnnnnnnnnnnnnnnnnnnnnnnnnnnnnnnnnnnnnnnnnnnnnnnnnnnnnnnnnnnnnnnnnnnnnnnnnnnnnnnnnnnnnnnnnnnnnnnnnnnnnnnnnnnnnnnnnnnnnnnnnnnnnnnnnnnnnnnnnnnnnnnnnnnnnnnnnnnnnnnnnnnnnnnnnnnnnnnnnnnnnnnnnnnnnnnnnnnnnnnnnnnnnnnnnnnnnnnnnnnnnnnnnnnnnnnnnnnnnnnnnnnnnnnnnnnnnnnnnnnnnnnnnnnnnnnnnnnnnnnnnnnnnnnnnnnnnnnnnnnnnnnnnnnnnnnnnnnnnnnnnnnnnnnnnnnnnnnnnnnnnnnnnnnnnnnnnnnnnnnnnnnnnnnnnnnnnnnnnnnnnnnnnnnnnnnnnnnnnnnnnnnnnnnnnnnnnnnnnnnnnnnnnnnnnnnnnnnnnnnnnnnnnnnnnnnnnnnnnnnnnnnnnnnnnnnnnnnnnnnnnnnnnnnnnnnnnnnnnnnnnnnnnnnnnnnnnnnnnnnnnnnnnnnnnnnnnnnnnnnnnnnnnnnnnnnnnnnnnnnnnnnnnnnnnnnnnnnnnnnnnnnnnnnnnnnnnnnnnnnnnnnnnnnnnnnnnnnnnnnnnnnnnnnnnnnnnnnnnnnnnnnnnnnnnnnnnnnnnnnnnnnnnnnnnnnnnnnnnnnnnnnnnnnnnnnnnnnnnnnnnnnnnnnnnnnnnnnnnnnnnnnnnnnnnnnnnnnnnnnnnnnnnnnnnnnnnnnnnnnnnnnnnnnnnnnnnnnnnnnnnnnnnnnnnnnnnnnnnnnnnnnnnnnnnnnnnnnnnnnnnnnnnnnnnnnnnnnnnnnnnnnnnnnnnnnnnnnnnnnnnnnnnnnnnnnnnnnnnnnnnnnnnnnnnnnnnnnnnnnnnnnnnnnnnnnnnnnnnnnnnnnnnnnnnnnnnnnnnnnnnnnnnnnnnnnnnnnnnnnnnnnnnnnnnnnnnnnnnnnnnnnnnnnnnnnnnnnnnnnnnnnnnnnnnnnnnnnnnnnnnnnnnnnnnnnnnnnnnnnnnnnnnnnnnnnnnnnnnnnnnnnnnnnnnnnnnnnnnnnnnnnnnnnnnnnnnnnnnnnnnnnnnnnnnnnnnnnnnnnnnnnnnnnnnnnnnnnnnnnnnnnnnnnnnnnnnnnnnnnnnnnnnnnnnnnnnnnnnnnnnnnnnnnnnnnnnnnnnnnnnnnnnnnnnnnnnnnnnnnnnnnnnnnnnnnnnnnnnnnnnnnnnnnnnnnnnnnnnnnnnnnnnnnnnnnnnnnnnnnnnnnnnnnnnnnnnnnnnnnnnnnnnnnnnnnnnnnnnnnnnnnnnnnnnnnnnnnnnnnnnnnnnnnnnnnnnnnnnnnnnnnnnnnnnnnnnnnnnnnnnnnnnnnnnnnnnnnnnnnnnnnnnnnnnnnnnnnnnnnnnnnnnnnnnnnnnnnnnnnnnnnnnnnnnnnnnnnnnnnnnnnnnnnnnnnnnnnnnnnnnnnnnnnnnnnnnnnnnnnnnnnnnnnnnnnnnnnnnnnnnnnnnnnnnnnnnnnnnnnnnnnnnnnnnnnnnnnnnnnnnnnnnnnnnnnnnnnnnnnnnnnnnnnnnnnnnnnnnnnnnnnnnnnnnnnnnnnnnnnnnnnnnnnnnnnnnnnnnnnnnnnnnnnnnnnnnnnnnnnnnnnnnnnnnnnnnnnnnnnnnnnnnnnnnnnnnnnnnnnnnnnnnnnnnnnnnnnnnnnnnnnnnnnnnnnnnnnnnnnnnnnnnnnnnnnnnnnnnnnnnnnnnnnnnnnnnnnnnnnnnnnnnnnnnnnnnnnnnnnnnnnnnnnnnnnnnnnnnnnnnnnnnnnnnnnnnnnnnnnnnnnnnnnnnnnnnnnnnnnnnnnnnnnnnnnnnnnnnnnnnnnnnnnnnnnnnnnnnnnnnnnnnnnnnnnnnnnnnnnnnnnnnnnnnnnnnnnnnnnnnnnnnnnnnnnnnnnnnnnnnnnnnnnnnnnnnnnnnnnnnnnnnnnnnnnnnnnnnnnnnnnnnnnnnnnnnnnnnnnnnnnnnnnnnnnnnnnnnnnnnnnnnnnnnnnnnnnnnnnnnnnnnnnnnnnnnnnnnnnnnnnnnnnnnnnnnnnnnnnnnnnnnnnnnnnnnnnnnnnnnnnnnnnnnnnnnnnnnnnnnnnnnnnnnnnnnnnnnnnnnnnnnnnnnnnnnnnnnnnnnnnnnnnnnnnnnnnnnnnnnnnnnnnnnnnnnnnnnnnnnnnnnnnnnnnnnnnnnnnnnnnnnnnnnnnnnnnnnnnnnnnnnnnnnnnnnnnnnnnnnnnnnnnnnnnnnnnnnnnnnnnnnnnnnnnnnnnnnnnnnnnnnnnnnnnnnnnnnnnnnnnnnnnnnnnnnnnnnnnnnnnnnnnnnnnnnnnnnnnnnnnnnnnnnnnnnnnnnnnnnnnnnnnnnnnnnnnnnnnnnnnnnnnnnnnnnnnnnnnnnnnnnnnnnnnnnnnnnnnnnnnnnnnnnnnnnnnnnnnnnnnnnnnnnnnnnnnnnnnnnnnnnnnnnnnnnnnnnnnnnnnnnnnnnnnnnnnnnnnnnnnnnnnnnnnnnnnnnnnnnnnnnnnnnnnnnnnnnnnnnnnnnnnnnnnnnnnnnnnnnnnnnnnnnnnnnnnnnnnnnnnnnnnnnnnnnnnnnnnnnnnnnnnnnnnnnnnnnnnnnnnnnnnnnnnnnnnnnnnnnnnnnnnnnnnnnnnnnnnnnnnnnnnnnnnnnnnnnnnnnnnnnnnnnnnnnnnnnnnnnnnnnnnnnnnnnnnnnnnnnnnnnnnnnnnnnnnnnnnnnnnnnnnnnnnnnnnnnnnnnnnnnnnnnnnnnnnnnnnnnnnnnnnnnnnnnnnnnnnnnnnnnnnnnnnnnnnnnnnnnnnnnnnnnnnnnnnnnnnnnnnnnnnnnnnnnnnnnnnnnnnnnnnnnnnnnnnnnnnnnnnnnnnnnnnnnnnnnnnnnnnnnnnnnnnnnnnnnnnnnnnnnnnnnnnnnnnnnnnnnnnnnnnnnnnnnnnnnnnnnnnnnnnnnnnnnnnnnnnnnnnnnnnnnnnnnnnnnnnnnnnnnnnnnnnnnnnnnnnnnnnnnnnnnnnnnnnnnnnnnnnnnnnnnnnnnnnnnnnnnnnnnnnnnnnnnnnnnnnnnnnnnnnnnnnnnnnnnnnnnnnnnnnnnnnnnnnnnnnnnnnnnnnnnnnnnnnnnnnnnnnnnnnnnnnnnnnnnnnnnnnnnnnnnnnnnnnnnnnnnnnnnnnnnnnnnnnnnnnnnnnnnnnnnnnnnnnnnnnnnnnnnnnnnnnnnnnnnnnnnnnnnnnnnnnnnnnnnnnnnnnnnnnnnnnnnnnnnnnnnnnnnnnnnnnnnnnnnnnnnnnnnnnnnnnnnnnnnnnnnnnnnnnnnnnnnnnnnnnnnnnnnnnnnnnnnnnnnnnnnnnnnnnnnnnnnnnnnnnnnnnnnnnnnnnnnnnnnnnnnnnnnnnnnnnnnnnnnnnnnnnnnnnnnnnnnnnnnnnnnnnnnnnnnnnnnnnnnnnnnnnnnnnnnnnnnnnnnnnnnnnnnnnnnnnnnnnnnnnnnnnnnnnnnnnnnnnnnnnnnnnnnnnnnnnnnnnnnnnnnnnnnnnnnnnnnnnnnnnnnnnnnnnnnnnnnnnnnnnnnnnnnnnnnnnnnnnnnnnnnnnnnnnnnnnnnnnnnnnnnnnnnnnnnnnnnnnnnnnnnnnnnnnnnnnnnnnnnnnnnnnnnnnnnnnnnnnnnnnnnnnnnnnnnnnnnnnnnnnnnnnnnnnnnnnnnnnnnnnnnnnnnnnnnnnnnnnnnnnnnnnnnnnnnnnnnnnnnnnnnnnnnnnnnnnnnnnnnnnnnnnnnnnnnnnnnnnnnnnnnnnnnnnnnnnnnnnnnnnnnnnnnnnnnnnnnnnnnnnnnnnnnnnnnnnnnnnnnnnnnnnnnnnnnnnnnnnnnnnnnnnnnnnnnnnnnnnnnnnnnnnnnnnnnnnnnnnnnnnnnnnnnnnnnnnnnnnnnnnnnnnnnnnnnnnnnnnnnnnnnnnnnnnnnnnnnnnnnnnnnnnnnnnnnnnnnnnnnnnnnnnnnnnnnnnnnnnnnnnnnnnnnnnnnnnnnnnnnnnnnnnnnnnnnnnnnnnnnnnnnnnnnnnnnnnnnnnnnnnnnnnnnnnnnnnnnnnnnnnnnnnnnnnnnnnnnnnnnnnnnnnnnnnnnnnnnnnnnnnnnnnnnnnnnnnnnnnnnnnnnnnnnnnnnnnnnnnnnnnnnnnnnnnnnnnnnnnnnnnnnnnnnnnnnnnnnnnnnnnnnnnnnnnnnnnnnnnnnnnnnnnnnnnnnnnnnnnnnnnnnnnnnnnnnnnnnnnnnnnnnnnnnnnnnnnnnnnnnnnnnnnnnnnnnnnnnnnnnnnnnnnnnnnnnnnnnnnnnnnnnnnnnnnnnnnnnnnnnnnnnnnnnnnnnnnnnnnnnnnnnnnnnnnnnnnnnnnnnnnnnnnnnnnnnnnnnnnnnnnnnnnnnnnnnnnnnnnnnnnnnnnnnnnnnnnnnnnnnnnnnnnnnnnnnnnnnnnnnnnnnnnnnnnnnnnnnnnnnnnnnnnnnnnnnnnnnnnnnnnnnnnnnnnnnnnnnnnnnnnnnnnnnnnnnnnnnnnnnnnnnnnnnnnnnnnnnnnnnnnnnnnnnnnnnnnnnnnnnnnnnnnnnnnnnnnnnnnnnnnnnnnnnnnnnnnnnnnnnnnnnnnnnnnnnnnnnnnnnnnnnnnnnnnnnnnnnnnnnnnnnnnnnnnnnnnnnnnnnnnnnnnnnnnnnnnnnnnnnnnnnnnnnnnnnnnnnnnnnnnnnnnnnnnnnnnnnnnnnnnnnnnnnnnnnnnnnnnnnnnnnnnnnnnnnnnnnnnnnnnnnnnnnnnnnnnnnnnnnnnnnnnnnnnnnnnnnnnnnnnnnnnnnnnnnnnnnnnnnnnnnnnnnnnnnnnnnnnnnnnnnnnnnnnnnnnnnnnnnnnnnnnnnnnnnnnnnnnnnnnnnnnnnnnnnnnnnnnnnnnnnnnnnnnnnnnnnnnnnnnnnnnnnnnnnnnnnnnnnnnnnnnnnnnnnnnnnnnnnnnnnnnnnnnnnnnnnnnnnnnnnnnnnnnnnnnnnnnnnnnnnnnnnnnnnnnnnnnnnnnnnnnnnnnnnnnnnnnnnnnnnnnnnnnnnnnnnnnnnnnnnnnnnnnnnnnnnnnnnnnnnnnnnnnnnnnnnnnnnnnnnnnnnnnnnnnnnnnnnnnnnnnnnnnnnnnnnnnnnnnnnnnnnnnnnnnnnnnnnnnnnnnnnnnnnnnnnnnnnnnnnnnnnnnnnnnnnnnnnnnnnnnnnnnnnnnnnnnnnnnnnnnnnnnnnnnnnnnnnnnnnnnnnnnnnnnnnnnnnnnnnnnnnnnnnnnnnnnnnnnnnnnnnnnnnnnnnnnnnnnnnnnnnnnnnnnnnnnnnnnnnnnnnnnnnnnnnnnnnnnnnnnnnnnnnnnnnnnnnnnnnnnnnnnnnnnnnnnnnnnnnnnnnnnnnnnnnnnnnnnnnnnnnnnnnnnnnnnnnnnnnnnnnnnnnnnnnnnnnnnnnnnnnnnnnnnnnnnnnnnnnnnnnnnnnnnnnnnnnnnnnnnnnnnnnnnnnnnnnnnnnnnnnnnnnnnnnnnnnnnnnnnnnnnnnnnnnnnnnnnnnnnnnnnnnnnnnnnnnnnnnnnnnnnnnnnnnnnnnnnnnnnnnnnnnnnnnnnnnnnnnnnnnnnnnnnnnnnnnnnnnnnnnnnnnnnnnnnnnnnnnnnnnnnnnnnnnnnnnnnnnnnnnnnnnnnnnnnnnnnnnnnnnnnnnnnnnnnnnnnnnnnnnnnnnnnnnnnnnnnnnnnnnnnnnnnnnnnnnnnnnnnnnnnnnnnnnnnnnnnnnnnnnnnnnnnnnnnnnnnnnnnnnnnnnnnnnnnnnnnnnnnnnnnnnnnnnnnnnnnnnnnnnnnnnnnnnnnnnnnnnnnnnnnnnnnnnnnnnnnnnnnnnnnnnnnnnnnnnnnnnnnnnnnnnnnnnnnnnnnnnnnnnnnnnnnnnnnnnnnnnnnnnnnnnnnnnnnnnnnnnnnnnnnnnnnnnnnnnnnnnnnnnnnnnnnnnnnnnnnnnnnnnnnnnnnnnnnnnnnnnnnnnnnnnnnnnnnnnnnnnnnnnnnnnnnnnnnnnnnnnnnnnnnnnnnnnnnnnnnnnnnnnnnnnnnnnnnnnnnnnnnnnnnnnnnnnnnnnnnnnnnnnnnnnnnnnnnnnnnnnnnnnnnnnnnnnnnnnnnnnnnnnnnnnnnnnnnnnnnnnnnnnnnnnnnnnnnnnnnnnnnnnnnnnnnnnnnnnnnnnnnnnnnnnnnnnnnnnnnnnnnnnnnnnnnnnnnnnnnnnnnnnnnnnnnnnnnnnnnnnnnnnnnnnnnnnnnnnnnnnnnnnnnnnnnnnnnnnnnnnnnnnnnnnnnnnnnnnnnnnnnnnnnnnnnnnnnnnnnnnnnnnnnnnnnnnnnnnnnnnnnnnnnnnnnnnnnnnnnnnnnnnnnnnnnnnnnnnnnnnnnnnnnnnnnnnnnnnnnnnnnnnnnnnnnnnnnnnnnnnnnnnnnnnnnnnnnnnnnnnnnnnnnnnnnnnnnnnnnnnnnnnnnnnnnnnnnnnnnnnnnnnnnnnnnnnnnnnnnnnnnnnnnnnnnnnnnnnnnnnnnnnnnnnnnnnnnnnnnnnnnnnnnnnnnnnnnnnnnnnnnnnnnnnnnnnnnnnnnnnnnnnnnnnnnnnnnnnnnnnnnnnnnnnnnnnnnnnnnnnnnnnnnnnnnnnnnnnnnnnnnnnnnnnnnnnnnnnnnnnnnnnnnnnnnnnnnnnnnnnnnnnnnnnnnnnnnnnnnnnnnnnnnnnnnnnnnnnnnnnnnnnnnnnnnnnnnnnnnnnnnnnnnnnnnnnnnnnnnnnnnnnnnnnnnnnnnnnnnnnnnnnnnnnnnnnnnnnnnnnnnnnnnnnnnnnnnnnnnnnnnnnnnnnnnnnnnnnnnnnnnnnnnnnnnnnnnnnnnnnnnnnnnnnnnnnnnnnnnnnnnnnnnnnnnnnnnnnnnnnnnnnnnnnnnnnnnnnnnnnnnnnnnnnnnnnnnnnnnnnnnnnnnnnnnnnnnnnnnnnnnnnnnnnnnnnnnnnnnnnnnnnnnnnnnnnnnnnnnnnnnnnnnnnnnnnnnnnnnnnnnnnnnnnnnnnnnnnnnnnnnnnnnnnnnnnnnnnnnnnnnnnnnnnnnnnnnnnnnnnnnnnnnnnnnnnnnnnnnnnnnnnnnnnnnnnnnnnnnnnnnnnnnnnnnnnnnnnnnnnnnnnnnnnnnnnnnnnnnnnnnnnnnnnnnnnnnnnnnnnnnnnnnnnnnnnnnnnnnnnnnnnnnnnnnnnnnnnnnnnnnnnnnnnnnnnnnnnnnnnnnnnnnnnnnnnnnnnnnnnnnnnnnnnnnnnnnnnnnnnnnnnnnnnnnnnnnnnnnnnnnnnnnnnnnnnnnnnnnnnnnnnnnnnnnnnnnnnnnnnnnnnnnnnnnnnnnnnnnnnnnnnnnnnnnnnnnnnnnnnnnnnnnnnnnnnnnnnnnnnnnnnnnnnnnnnnnnnnnnnnnnnnnnnnnnnnnnnnnnnnnnnnnnnnnnnnnnnnnnnnnnnnnnnnnnnnnnnnnnnnnnnnnnnnnnnnnnnnnnnnnnnnnnnnnnnnnnnnnnnnnnnnnnnnnnnnnnnnnnnnnnnnnnnnnnnnnnnnnnnnnnnnnnnnnnnnnnnnnnnnnnnnnnnnnnnnnnnnnnnnnnnnnnnnnnnnnnnnnnnnnnnnnnnnnnnnnnnnnnnnnnnnnnnnnnnnnnnnnnnnnnnnnnnnnnnnnnnnnnnnnnnnnnnnnnnnnnnnnnnnnnnnnnnnnnnnnnnnnnnnnnnnnnnnnnnnnnnnnnnnnnnnnnnnnnnnnnnnnnnnnnnnnnnnnnnnnnnnnnnnnnnnnnnnnnnnnnnnnnnnnnnnnnnnnnnnnnnnnnnnnnnnnnnnnnnnnnnnnnnnnnnnnnnnnnnnnnnnnnnnnnnnnnnnnnnnnnnnnnnnnnnnnnnnnnnnnnnnnnnnnnnnnnnnnnnnnnnnnnnnnnnnnnnnnnnnnnnnnnnnnnnnnnnnnnnnnnnnnnnnnnnnnnnnnnnnnnnnnnnnnnnnnnnnnnnnnnnnnnnnnnnnnnnnnnnnnnnnnnnnnnnnnnnnnnnnnnnnnnnnnnnnnnnnnnnnnnnnnnnnnnnnnnnnnnnnnnnnnnnnnnnnnnnnnnnnnnnnnnnnnnnnnnnnnnnnnnnnnnnnnnnnnnnnnnnnnnnnnnnnnnnnnnnnnnnnnnnnnnnnnnnnnnnnnnnnnnnnnnnnnnnnnnnnnnnnnnnnnnnnnnnnnnnnnnnnnnnnnnnnnnnnnnnnnnnnnnnnnnnnnnnnnnnnnnnnnnnnnnnnnnnnnnnnnnnnnnnnnnnnnnnnnnnnnnnnnnnnnnnnnnnnnnnnnnnnnnnnnnnnnnnnnnnnnnnnnnnnnnnnnnnnnnnnnnnnnnnnnnnnnnnnnnnnnnnnnnnnnnnnnnnnnnnnnnnnnnnnnnnnnnnnnnnnnnnnnnnnnnnnnnnnnnnnnnnnnnnnnnnnnnnnnnnnnnnnnnnnnnnnnnnnnnnnnnnnnnnnnnnnnnnnnnnnnnnnnnnnnnnnnnnnnnnnnnnnnnnnnnnnnnnnnnnnnnnnnnnnnnnnnnnnnnnnnnnnnnnnnnnnnnnnnnnnnnnnnnnnnnnnnnnnnnnnnnnnnnnnnnnnnnnnnnnnnnnnnnnnnnnnnnnnnnnnnnnnnnnnnnnnnnnnnnnnnnnnnnnnnnnnnnnnnnnnnnnnnnnnnnnnnnnnnnnnnnnnnnnnnnnnnnnnnnnnnnnnnnnnnnnnnnnnnnnnnnnnnnnnnnnnnnnnnnnnnnnnnnnnnnnnnnnnnnnnnnnnnnnnnnnnnnnnnnnnnnnnnnnnnnnnnnnnnnnnnnnnnnnnnnnnnnnnnnnnnnnnnnnnnnnnnnnnnnnnnnnnnnnnnnnnnnnnnnnnnnnnnnnnnnnnnnnnnnnnnnnnnnnnnnnnnnnnnnnnnnnnnnnnnnnnnnnnnnnnnnnnnnnnnnnnnnnnnnnnnnnnnnnnnnnnnnnnnnnnnnnnnnnnnnnnnnnnnnnnnnnnnnnnnnnnnnnnnnnnnnnnnnnnnnnnnnnnnnnnnnnnnnnnnnnnnnnnnnnnnnnnnnnnnnnnnnnnnnnnnnnnnnnnnnnnnnnnnnnnnnnnnnnnnnnnnnnnnnnnnnnnnnnnnnnnnnnnnnnnnnnnnnnnnnnnnnnnnnnnnnnnnnnnnnnnnnnnnnnnnnnnnnnnnnnnnnnnnnnnnnnnnnnnnnnnnnnnnnnnnnnnnnnnnnnnnnnnnnnnnnnnnnnnnnnnnnnnnnnnnnnnnnnnnnnnnnnnnnnnnnnnnnnnnnnnnnnnnnnnnnnnnnnnnnnnnnnnnnnnnnnnnnnnnnnnnnnnnnnnnnnnnnnnnnnnnnnnnnnnnnnnnnnnnnnnnnnnnnnnnnnnnnnnnnnnnnnnnnnnnnnnnnnnnnnnnnnnnnnnnnnnnnnnnnnnnnnnnnnnnnnnnnnnnnnnnnnnnnnnnnnnnnnnnnnnnnnnnnnnnnnnnnnnnnnnnnnnnnnnnnnnnnnnnnnnnnnnnnnnnnnnnnnnnnnnnnnnnnnnnnnnnnnnnnnnnnnnnnnnnnnnnnnnnnnnnnnnnnnnnnnnnnnnnnnnnnnnnnnnnnnnnnnnnnnnnnnnnnnnnnnnnnnnnnnnnnnnnnnnnnnnnnnnnnnnnnnnnnnnnnnnnnnnnnnnnnnnnnnnnnnnnnnnnnnnnnnnnnnnnnnnnnnnnnnnnnnnnnnnnnnnnnnnnnnnnnnnnnnnnnnnnnnnnnnnnnnnnnnnnnnnnnnnnnnnnnnnnnnnnnnnnnnnnnnnnnnnnnnnnnnnnnnnnnnnnnnnnnnnnnnnnnnnnnnnnnnnnnnnnnnnnnnnnnnnnnnnnnnnnnnnnnnnnnnnnnnnnnnnnnnnnnnnnnnnnnnnnnnnnnnnnnnnnnnnnnnnnnnnnnnnnnnnnnnnnnnnnnnnnnnnnnnnnnnnnnnnnnnnnnnnnnnnnnnnnnnnnnnnnnnnnnnnnnnnnnnnnnnnnnnnnnnnnnnnnnnnnnnnnnnnnnnnnnnnnnnnnnnnnnnnnnnnnnnnnnnnnnnnnnnnnnnnnnnnnnnnnnnnnnnnnnnnnnnnnnnnnnnnnnnnnnnnnnnnnnnnnnnnnnnnnnnnnnnnnnnnnnnnnnnnnnnnnnnnnnnnnnnnnnnnnnnnnnnnnnnnnnnnnnnnnnnnnnnnnnnnnnnnnnnnnnnnnnnnnnnnnnnnnnnnnnnnnnnnnnnnnnnnnnnnnnnnnnnnnnnnnnnnnnnnnnnnnnnnnnnnnnnnnnnnnnnnnnnnnnnnnnnnnnnnnnnnnnnnnnnnnnnnnnnnnnnnnnnnnnnnnnnnnnnnnnnnnnnnnnnnnnnnnnnnnnnnnnnnnnnnnnnnnnnnnnnnnnnnnnnnnnnnnnnnnnnnnnnnnnnnnnnnnnnnnnnnnnnnnnnnnnnnnnnnnnnnnnnnnnnnnnnnnnnnnnnnnnnnnnnnnnnnnnnnnnnnnnnnnnnnnnnnnnnnnnnnnnnnnnnnnnnnnnnnnnnnnnnnnnnnnnnnnnnnnnnnnnnnnnnnnnnnnnnnnnnnnnnnnnnnnnnnnnnnnnnnnnnnnnnnnnnnnnnnnnnnnnnnnnnnnnnnnnnnnnnnnnnnnnnnnnnnnnnnnnnnnnnnnnnnnnnnnnnnnnnnnnnnnnnnnnnnnnnnnnnnnnnnnnnnnnnnnnnnnnnnnnnnnnnnnnnnnnnnnnnnnnnnnnnnnnnnnnnnnnnnnnnnnnnnnnnnnnnnnnnnnnnnnnnnnnnnnnnnnnnnnnnnnnnnnnnnnnnnnnnnnnnnnnnnnnnnnnnnnnnnnnnnnnnnnnnnnnnnnnnnnnnnnnnnnnnnnnnnnnnnnnnnnnnnnnnnnnnnnnnnnnnnnnnnnnnnnnnnnnnnnnnnnnnnnnnnnnnnnnnnnnnnnnnnnnnnnnnnnnnnnnnnnnnnnnnnnnnnnnnnnnnnnnnnnnnnnnnnnnnnnnnnnnnnnnnnnnnnnnnnnnnnnnnnnnnnnnnnnnnnnnnnnnnnnnnnnnnnnnnnnnnnnnnnnnnnnnnnnnnnnnnnnnnnnnnnnnnnnnnnnnnnnnnnnnnnnnnnnnnnnnnnnnnnnnnnnnnnnnnnnnnnnnnnnnnnnnnnnnnnnnnnnnnnnnnnnnnnnnnnnnnnnnnnnnnnnnnnnnnnnnnnnnnnnnnnnnnnnnnnnnnnnnnnnnnnnnnnnnnnnnnnnnnnnnnnnnnnnnnnnnnnnnnnnnnnnnnnnnnnnnnnnnnnnnnnnnnnnnnnnnnnnnnnnnnnnnnnnnnnnnnnnnnnnnnnnnnnnnnnnnnnnnnnnnnnnnnnnnnnnnnnnnnnnnnnnnnnnnnnnnnnnnnnnnnnnnnnnnnnnnnnnnnnnnnnnnnnnnnnnnnnnnnnnnnnnnnnnnnnnnnnnnnnnnnnnnnnnnnnnnnnnnnnnnnnnnnnnnnnnnnnnnnnnnnnnnnnnnnnnnnnnnnnnnnnnnnnnnnnnnnnnnnnnnnnnnnnnnnnnnnnnnnnnnnnnnnnnnnnnnnnnnnnnnnnnnnnnnnnnnnnnnnnnnnnnnnnnnnnnnnnnnnnnnnnnnnnnnnnnnnnnnnnnnnnnnnnnnnnnnnnnnnnnnnnnnnnnnnnnnnnnnnnnnnnnnnnnnnnnnnnnnnnnnnnnnnnnnnnnnnnnnnnnnnnnnnnnnnnnnnnnnnnnnnnnnnnnnnnnnnnnnnnnnnnnnnnnnnnnnnnnnnnnnnnnnnnnnnnnnnnnnnnnnnnnnnnnnnnnnnnnnnnnnnnnnnnnnnnnnnnnnnnnnnnnnnnnnnnnnnnnnnnnnnnnnnnnnnnnnnnnnnnnnnnnnnnnnnnnnnnnnnnnnnnnnnnnnnnnnnnnnnnnnnnnnnnnnnnnnnnnnnnnnnnnnnnnnnnnnnnnnnnnnnnnnnnnnnnnnnnnnnnnnnnnnnnnnnnnnnnnnnnnnnnnnnnnnnnnnnnnnnnnnnnnnnnnnnnnnnnnnnnnnnnnnnnnnnnnnnnnnnnnnnnnnnnnnnnnnnnnnnnnnnnnnnnnnnnnnnnnnnnnnnnnnnnnnnnnnnnnnnnnnnnnnnnnnnnnnnnnnnnnnnnnnnnnnnnnnnnnnnnnnnnnnnnnnnnnnnnnnnnnnnnnnnnnnnnnnnnnnnnnnnnnnnnnnnnnnnnnnnnnnnnnnnnnnnnnnnnnnnnnnnnnnnnnnnnnnnnnnnnnnnnnnnnnnnnnnnnnnnnnnnnnnnnnnnnnnnnnnnnnnnnnnnnnnnnnnnnnnnnnnnnnnnnnnnnnnnnnnnnnnnnnnnnnnnnnnnnnnnnnnnnnnnnnnnnnnnnnnnnnnnnnnnnnnnnnnnnnnnnnnnnnnnnnnnnnnnnnnnnnnnnnnnnnnnnnnnnnnnnnnnnnnnnnnnnnnnnnnnnnnnnnnnnnnnnnnnnnnnnnnnnnnnnnnnnnnnnnnnnnnnnnnnnnnnnnnnnnnnnnnnnnnnnnnnnnnnnnnnnnnnnnnnnnnnnnnnnnnnnnnnnnnnnnnnnnnnnnnnnnnnnnnnnnnnnnnnnnnnnnnnnnnnnnnnnnnnnnnnnnnnnnnnnnnnnnnnnnnnnnnnnnnnnnnnnnnnnnnnnnnnnnnnnnnnnnnnnnnnnnnnnnnnnnnnnnnnnnnnnnnnnnnnnnnnnnnnnnnnnnnnnnnnnnnnnnnnnnnnnnnnnnnnnnnnnnnnnnnnnnnnnnnnnnnnnnnnnnnnnnnnnnnnnnnnnnnnnnnnnnnnnnnnnnnnnnnnnnnnnnnnnnnnnnnnnnnnnnnnnnnnnnnnnnnnnnnnnnnnnnnnnnnnnnnnnnnnnnnnnnnnnnnnnnnnnnnnnnnnnnnnnnnnnnnnnnnnnnnnnnnnnnnnnnnnnnnnnnnnnnnnnnnnnnnnnnnnnnnnnnnnnnnnnnnnnnnnnnnnnnnnnnnnnnnnnnnnnnnnnnnnnnnnnnnnnnnnnnnnnnnnnnnnnnnnnnnnnnnnnnnnnnnnnnnnnnnnnnnnnnnnnnnnnnnnnnnnnnnnnnnnnnnnnnnnnnnnnnnnnnnnnnnnnnnnnnnnnnnnnnnnnnnnnnnnnnnnnnnnnnnnnnnnnnnnnnnnnnnnnnnnnnnnnnnnnnnnnnnnnnnnnnnnnnnnnnnnnnnnnnnnnnnnnnnnnnnnnnnnnnnnnnnnnnnnnnnnnnnnnnnnnnnnnnnnnnnnnnnnnnnnnnnnnnnnnnnnnnnnnnnnnnnnnnnnnnnnnnnnnnnnnnnnnnnnnnnnnnnnnnnnnnnnnnnnnnnnnnnnnnnnnnnnnnnnnnnnnnnnnnnnnnnnnnnnnnnnnnnnnnnnnnnnnnnnnnnnnnnnnnnnnnnnnnnnnnnnnnnnnnnnnnnnnnnnnnnnnnnnnnnnnnnnnnnnnnnnnnnnnnnnnnnnnnnnnnnnnnnnnnnnnnnnnnnnnnnnnnnnnnnnnnnnnnnnnnnnnnnnnnnnnnnnnnnnnnnnnnnnnnnnnnnnnnnnnnnnnnnnnnnnnnnnnnnnnnnnnnnnnnnnnnnnnnnnnnnnnnnnnnnnnnnnnnnnnnnnnnnnnnnnnnnnnnnnnnnnnnnnnnnnnnnnnnnnnnnnnnnnnnnnnnnnnnnnnnnnnnnnnnnnnnnnnnnnnnnnnnnnnnnnnnnnnnnnnnnnnnnnnnnnnnnnnnnnnnnnnnnnnnnnnnnnnnnnnnnnnnnnnnnnnnnnnnnnnnnnnnnnnnnnnnnnnnnnnnnnnnnnnnnnnnnnnnnnnnnnnnnnnnnnnnnnnnnnnnnnnnnnnnnnnnnnnnnnnnnnnnnnnnnnnnnnnnnnnnnnnnnnnnnnnnnnnnnnnnnnnnnnnnnnnnnnnnnnnnnnnnnnnnnnnnnnnnnnnnnnnnnnnnnnnnnnnnnnnnnnnnnnnnnnnnnnnnnnnnnnnnnnnnnnnnnnnnnnnnnnnnnnnnnnnnnnnnnnnnnnnnnnnnnnnnnnnnnnnnnnnnnnnnnnnnnnnnnnnnnnnnnnnnnnnnnnnnnnnnnnnnnnnnnnnnnnnnnnnnnnnnnnnnnnnnnnnnnnnnnnnnnnnnnnnnnnnnnnnnnnnnnnnnnnnnnnnnnnnnnnnnnnnnnnnnnnnnnnnnnnnnnnnnnnnnnnnnnnnnnnnnnnnnnnnnnnnnnnnnnnnnnnnnnnnnnnnnnnnnnnnnnnnnnnnnnnnnnnnnnnnnnnnnnnnnnnnnnnnnnnnnnnnnnnnnnnnnnnnnnnnnnnnnnnnnnnnnnnnnnnnnnnnnnnnnnnnnnnnnnnnnnnnnnnnnnnnnnnnnnnnnnnnnnnnnnnnnnnnnnnnnnnnnnnnnnnnnnnnnnnnnnnnnnnnnnnnnnnnnnnnnnnnnnnnnnnnnnnnnnnnnnnnnnnnnnnnnnnnnnnnnnnnnnnnnnnnnnnnnnnnnnnnnnnnnnnnnnnnnnnnnnnnnnnnnnnnnnnnnnnnnnnnnnnnnnnnnnnnnnnnnnnnnnnnnnnnnnnnnnnnnnnnnnnnnnnnnnnnnnnnnnnnnnnnnnnnnnnnnnnnnnnnnnnnnnnnnnnnnnnnnnnnnnnnnnnnnnnnnnnnnnnnnnnnnnnnnnnnnnnnnnnnnnnnnnnnnnnnnnnnnnnnnnnnnnnnnnnnnnnnnnnnnnnnnnnnnnnnnnnnnnnnnnnnnnnnnnnnnnnnnnnnnnnnnnnnnnnnnnnnnnnnnnnnnnnnnnnnnnnnnnnnnnnnnnnnnnnnnnnnnnnnnnnnnnnnnnnnnnnnnnnnnnnnnnnnnnnnnnnnnnnnnnnnnnnnnnnnnnnnnnnnnnnnnnnnnnnnnnnnnnnnnnnnnnnnnnnnnnnnnnnnnnnnnnnnnnnnnnnnnnnnnnnnnnnnnnnnnnnnnnnnnnnnnnnnnnnnnnnnnnnnnnnnnnnnnnnnnnnnnnnnnnnnnnnnnnnnnnnnnnnnnnnnnnnnnnnnnnnnnnnnnnnnnnnnnnnnnnnnnnnnnnnnnnnnnnnnnnnnnnnnnnnnnnnnnnnnnnnnnnnnnnnnnnnnnnnnnnnnnnnnnnnnnnnnnnnnnnnnnnnnnnnnnnnnnnnnnnnnnnnnnnnnnnnnnnnnnnnnnnnnnnnnnnnnnnnnnnnnnnnnnnnnnnnnnnnnnnnnnnnnnnnnnnnnnnnnnnnnnnnnnnnnnnnnnnnnnnnnnnnnnnnnnnnnnnnnnnnnnnnnnnnnnnnnnnnnnnnnnnnnnnnnnnnnnnnnnnnnnnnnnnnnnnnnnnnnnnnnnnnnnnnnnnnnnnnnnnnnnnnnnnnnnnnnnnnnnnnnnnnnnnnnnnnnnnnnnnnnnnnnnnnnnnnnnnnnnnnnnnnnnnnnnnnnnnnnnnnnnnnnnnnnnnnnnnnnnnnnnnnnnnnnnnnnnnnnnnnnnnnnnnnnnnnnnnnnnnnnnnnnnnnnnnnnnnnnnnnnnnnnnnnnnnnnnnnnnnnnnnnnnnnnnnnnnnnnnnnnnnnnnnnnnnnnnnnnnnnnnnnnnnnnnnnnnnnnnnnnnnnnnnnnnnnnnnnnnnnnnnnnnnnnnnnnnnnnnnnnnnnnnnnnnnnnnnnnnnnnnnnnnnnnnnnnnnnnnnnnnnnnnnnnnnnnnnnnnnnnnnnnnnnnnnnnnnnnnnnnnnnnnnnnnnnnnnnnnnnnnnnnnnnnnnnnnnnnnnnnnnnnnnnnnnnnnnnnnnnnnnnnnnnnnnnnnnnnnnnnnnnnnnnnnnnnnnnnnnnnnnnnnnnnnnnnnnnnnnnnnnnnnnnnnnnnnnnnnnnnnnnnnnnnnnnnnnnnnnnnnnnnnnnnnnnnnnnnnnnnnnnnnnnnnnnnnnnnnnnnnnnnnnnnnnnnnnnnnnnnnnnnnnnnnnnnnnnnnnnnnnnnnnnnnnnnnnnnnnnnnnnnnnnnnnnnnnnnnnnnnnnnnnnnnnnnnnnnnnnnnnnnnnnnnnnnnnnnnnnnnnnnnnnnnnnnnnnnnnnnnnnnnnnnnnnnnnnnnnnnnnnnnnnnnnnnnnnnnnnnnnnnnnnnnnnnnnnnnnnnnnnnnnnnnnnnnnnnnnnnnnnnnnnnnnnnnnnnnnnnnnnnnnnnnnnnnnnnnnnnnnnnnnnnnnnnnnnnnnnnnnnnnnnnnnnnnnnnnnnnnnnnnnnnnnnnnnnnnnnnnnnnnnnnnnnnnnnnnnnnnnnnnnnnnnnnnnnnnnnnnnnnnnnnnnnnnnnnnnnnnnnnnnnnnnnnnnnnnnnnnnnnnnnnnnnnnnnnnnnnnnnnnnnnnnnnnnnnnnnnnnnnnnnnnnnnnnnnnnnnnnnnnnnnnnnnnnnnnnnnnnnnnnnnnnnnnnnnnnnnnnnnnnnnnnnnnnnnnnnnnnnnnnnnnnnnnnnnnnnnnnnnnnnnnnnnnnnnnnnnnnnnnnnnnnnnnnnnnnnnnnnnnnnnnnnnnnnnnnnnnnnnnnnnnnnnnnnnnnnnnnnnnnnnnnnnnnnnnnnnnnnnnnnnnnnnnnnnnnnnnnnnnnnnnnnnnnnnnnnnnnnnnnnnnnnnnnnnnnnnnnnnnnnnnnnnnnnnnnnnnnnnnnnnnnnnnnnnnnnnnnnnnnnnnnnnnnnnnnnnnnnnnnnnnnnnnnnnnnnnnnnnnnnnnnnnnnnnnnnnnnnnnnnnnnnnnnnnnnnnnnnnnnnnnnnnnnnnnnnnnnnnnnnnnnnnnnnnnnnnnnnnnnnnnnnnnnnnnnnnnnnnnnnnnnnnnnnnnnnnnnnnnnnnnnnnnnnnnnnnnnnnnnnnnnnnnnnnnnnnnnnnnnnnnnnnnnnnnnnnnnnnnnnnnnnnnnnnnnnnnnnnnnnnnnnnnnnnnnnnnnnnnnnnnnnnnnnnnnnnnnnnnnnnnnnnnnnnnnnnnnnnnnnnnnnnnnnnnnnnnnnnnnnnnnnnnnnnnnnnnnnnnnnnnnnnnnnnnnnnnnnnnnnnnnnnnnnnnnnnnnnnnnnnnnnnnnnnnnnnnnnnnnnnnnnnnnnnnnnnnnnnnnnnnnnnnnnnnnnnnnnnnnnnnnnnnnnnnnnnnnnnnnnnnnnnnnnnnnnnnnnnnnnnnnnnnnnnnnnnnnnnnnnnnnnnnnnnnnnnnnnnnnnnnnnnnnnnnnnnnnnnnnnnnnnnnnnnnnnnnnnnnnnnnnnnnnnnnnnnnnnnnnnnnnnnnnnnnnnnnnnnnnnnnnnnnnnnnnnnnnnnnnnnnnnnnnnnnnnnnnnnnnnnnnnnnnnnnnnnnnnnnnnnnnnnnnnnnnnnnnnnnnnnnnnnnnnnnnnnnnnnnnnnnnnnnnnnnnnnnnnnnnnnnnnnnnnnnnnnnnnnnnnnnnnnnnnnnnnnnnnnnnnnnnnnnnnnnnnnnnnnnnnnnnnnnnnnnnnnnnnnnnnnnnnnnnnnnnnnnnnnnnnnnnnnnnnnnnnnnnnnnnnnnnnnnnnnnnnnnnnnnnnnnnnnnnnnnnnnnnnnnnnnnnnnnnnnnnnnnnnnnnnnnnnnnnnnnnnnnnnnnnnnnnnnnnnnnnnnnnnnnnnnnnnnnnnnnnnnnnnnnnnnnnnnnnnnnnnnnnnnnnnnnnnnnnnnnnnnnnnnnnnnnnnnnnnnnnnnnnnnnnnnnnnnnnnnnnnnnnnnnnnnnnnnnnnnnnnnnnnnnnnnnnnnnnnnnnnnnnnnnnnnnnnnnnnnnnnnnnnnnnnnnnnnnnnnnnnnnnnnnnnnnnnnnnnnnnnnnnnnnnnnnnnnnnnnnnnnnnnnnnnnnnnnnnnnnnnnnnnnnnnnnnnnnnnnnnnnnnnnnnnnnnnnnnnnnnnnnnnnnnnnnnnnnnnnnnnnnnnnnnnnnnnnnnnnnnnnnnnnnnnnnnnnnnnnnnnnnnnnnnnnnnnnnnnnnnnnnnnnnnnnnnnnnnnnnnnnnnnnnnnnnnnnnnnnnnnnnnnnnnnnnnnnnnnnnnnnnnnnnnnnnnnnnnnnnnnnnnnnnnnnnnnnnnnnnnnnnnnnnnnnnnnnnnnnnnnnnnnnnnnnnnnnnnnnnnnnnnnnnnnnnnnnnnnnnnnnnnnnnnnnnnnnnnnnnnnnnnnnnnnnnnnnnnnnnnnnnnnnnnnnnnnnnnnnnnnnnnnnnnnnnnnnnnnnnnnnnnnnnnnnnnnnnnnnnnnnnnnnnnnnnnnnnnnnnnnnnnnnnnnnnnnnnnnnnnnnnnnnnnnnnnnnnnnnnnnnnnnnnnnnnnnnnnnnnnnnnnnnnnnnnnnnnnnnnnnnnnnnnnnnnnnnnnnnnnnnnnnnnnnnnnnnnnnnnnnnnnnnnnnnnnnnnnnnnnnnnnnnnnnnnnnnnnnnnnnnnnnnnnnnnnnnnnnnnnnnnnnnnnnnnnnnnnnnnnnnnnnnnnnnnnnnnnnnnnnnnnnnnnnnnnnnnnnnnnnnnnnnnnnnnnnnnnnnnnnnnnnnnnnnnnnnnnnnnnnnnnnnnnnnnnnnnnnnnnnnnnnnnnnnnnnnnnnnnnnnnnnnnnnnnnnnnnnnnnnnnnnnnnnnnnnnnnnnnnnnnnnnnnnnnnnnnnnnnnnnnnnnnnnnnnnnnnnnnnnnnnnnnnnnnnnnnnnnnnnnnnnnnnnnnnnnnnnnnnnnnnnnnnnnnnnnnnnnnnnnnnnnnnnnnnnnnnnnnnnnnnnnnnnnnnnnnnnnnnnnnnnnnnnnnnnnnnnnnnnnnnnnnnnnnnnnnnnnnnnnnnnnnnnnnnnnnnnnnnnnnnnnnnnnnnnnnnnnnnnnnnnnnnnnnnnnnnnnnnnnnnnnnnnnnnnnnnnnnnnnnnnnnnnnnnnnnnnnnnnnnnnnnnnnnnnnnnnnnnnnnnnnnnnnnnnnnnnnnnnnnnnnnnnnnnnnnnnnnnnnnnnnnnnnnnnnnnnnnnnnnnnnnnnnnnnnnnnnnnnnnnnnnnnnnnnnnnnnnnnnnnnnnnnnnnnnnnnnnnnnnnnnnnnnnnnnnnnnnnnnnnnnnnnnnnnnnnnnnnnnnnnnnnnnnnnnnnnnnnnnnnnnnnnnnnnnnnnnnnnnnnnnnnnnnnnnnnnnnnnnnnnnnnnnnnnnnnnnnnnnnnnnnnnnnnnnnnnnnnnnnnnnnnnnnnnnnnnnnnnnnnnnnnnnnnnnnnnnnnnnnnnnnnnnnnnnnnnnnnnnnnnnnnnnnnnnnnnnnnnnnnnnnnnnnnnnnnnnnnnnnnnnnnnnnnnnnnnnnnnnnnnnnnnnnnnnnnnnnnnnnnnnnnnnnnnnnnnnnnnnnnnnnnnnnnnnnnnnnnnnnnnnnnnnnnnnnnnnnnnnnnnnnnnnnnnnnnnnnnnnnnnnnnnnnnnnnnnnnnnnnnnnnnnnnnnnnnnnnnnnnnnnnnnnnnnnnnnnnnnnnnnnnnnnnnnnnnnnnnnnnnnnnnnnnnnnnnnnnnnnnnnnnnnnnnnnnnnnnnnnnnnnnnnnnnnnnnnnnnnnnnnnnnnnnnnnnnnnnnnnnnnnnnnnnnnnnnnnnnnnnnnnnnnnnnnnnnnnnnnnnnnnnnnnnnnnnnnnnnnnnnnnnnnnnnnnnnnnnnnnnnnnnnnnnnnnnnnnnnnnnnnnnnnnnnnnnnnnnnnnnnnnnnnnnnnnnnnnnnnnnnnnnnnnnnnnnnnnnnnnnnnnnnnnnnnnnnnnnnnnnnnnnnnnnnnnnnnnnnnnnnnnnnnnnnnnnnnnnnnnnnnnnnnnnnnnnnnnnnnnnnnnnnnnnnnnnnnnnnnnnnnnnnnnnnnnnnnnnnnnnnnnnnnnnnnnnnnnnnnnnnnnnnnnnnnnnnnnnnnnnnnnnnnnnnnnnnnnnnnnnnnnnnnnnnnnnnnnnnnnnnnnnnnnnnnnnnnnnnnnnnnnnnnnnnnnnnnnnnnnnnnnnnnnnnnnnnnnnnnnnnnnnnnnnnnnnnnnnnnnnnnnnnnnnnnnnnnnnnnnnnnnnnnnnnnnnnnnnnnnnnnnnnnnnnnnnnnnnnnnnnnnnnnnnnnnnnnnnnnnnnnnnnnnnnnnnnnnnnnnnnnnnnnnnnnnnnnnnnnnnnnnnnnnnnnnnnnnnnnnnnnnnnnnnnnnnnnnnnnnnnnnnnnnnnnnnnnnnnnnnnnnnnnnnnnnnnnnnnnnnnnnnnnnnnnnnnnnnnnnnnnnnnnnnnnnnnnnnnnnnnnnnnnnnnnnnnnnnnnnnnnnnnnnnnnnnnnnnnnnnnnnnnnnnnnnnnnnnnnnnnnnnnnnnnnnnnnnnnnnnnnnnnnnnnnnnnnnnnnnnnnnnnnnnnnnnnnnnnnnnnnnnnnnnnnnnnnnnnnnnnnnnnnnnnnnnnnnnnnnnnnnnnnnnnnnnnnnnnnnnnnnnnnnnnnnnnnnnnnnnnnnnnnnnnnnnnnnnnnnnnnnnnnnnnnnnnnnnnnnnnnnnnnnnnnnnnnnnnnnnnnnnnnnnnnnnnnnnnnnnnnnnnnnnnnnnnnnnnnnnnnnnnnnnnnnnnnnnnnnnnnnnnnnnnnnnnnnnnnnnnnnnnnnnnnnnnnnnnnnnnnnnnnnnnnnnnnnnnnnnnnnnnnnnnnnnnnnnnnnnnnnnnnnnnnnnnnnnnnnnnnnnnnnnnnnnnnnnnnnnnnnnnnnnnnnnnnnnnnnnnnnnnnnnnnnnnnnnnnnnnnnnnnnnnnnnnnnnnnnnnnnnnnnnnnnnnnnnnnnnnnnnnnnnnnnnnnnnnnnnnnnnnnnnnnnnnnnnnnnnnnnnnnnnnnnnnnnnnnnnnnnnnnnnnnnnnnnnnnnnnnnnnnnnnnnnnnnnnnnnnnnnnnnnnnnnnnnnnnnnnnnnnnnnnnnnnnnnnnnnnnnnnnnnnnnnnnnnnnnnnnnnnnnnnnnnnnnnnnnnnnnnnnnnnnnnnnnnnnnnnnnnnnnnnnnnnnnnnnnnnnnnnnnnnnnnnnnnnnnnnnnnnnnnnnnnnnnnnnnnnnnnnnnnnnnnnnnnnnnnnnnnnnnnnnnnnnnnnnnnnnnnnnnnnnnnnnnnnnnnnnnnnnnnnnnnnnnnnnnnnnnnnnnnnnnnnnnnnnnnnnnnnnnnnnnnnnnnnnnnnnnnnnnnnnnnnnnnnnnnnnnnnnnnnnnnnnnnnnnnnnnnnnnnnnnnnnnnnnnnnnnnnnnnnnnnnnnnnnnnnnnnnnnnnnnnnnnnnnnnnnnnnnnnnnnnnnnnnnnnnnnnnnnnnnnnnnnnnnnnnnnnnnnnnnnnnnnnnnnnnnnnnnnnnnnnnnnnnnnnnnnnnnnnnnnnnnnnnnnnnnnnnnnnnnnnnnnnnnnnnnnnnnnnnnnnnnnnnnnnnnnnnnnnnnnnnnnnnnnnnnnnnnnnnnnnnnnnnnnnnnnnnnnnnnnnnnnnnnnnnnnnnnnnnnnnnnnnnnnnnnnnnnnnnnnnnnnnnnnnnnnnnnnnnnnnnnnnnnnnnnnnnnnnnnnnnnnnnnnnnnnnnnnnnnnnnnnnnnnnnnnnnnnnnnnnnnnnnnnnnnnnnnnnnnnnnnnnnnnnnnnnnnnnnnnnnnnnnnnnnnnnnnnnnnnnnnnnnnnnnnnnnnnnnnnnnnnnnnnnnnnnnnnnnnnnnnnnnnnnnnnnnnnnnnnnnnnnnnnnnnnnnnnnnnnnnnnnnnnnnnnnnnnnnnnnnnnnnnnnnnnnnnnnnnnnnnnnnnnnnnnnnnnnnnnnnnnnnnnnnnnnnnnnnnnnnnnnnnnnnnnnnnnnnnnnnnnnnnnnnnnnnnnnnnnnnnnnnnnnnnnnnnnnnnnnnnnnnnnnnnnnnnnnnnnnnnnnnnnnnnnnnnnnnnnnnnnnnnnnnnnnnnnnnnnnnnnnnnnnnnnnnnnnnnnnnnnnnnnnnnnnnnnnnnnnnnnnnnnnnnnnnnnnnnnnnnnnnnnnnnnnnnnnnnnnnnnnnnnnnnnnnnnnnnnnnnnnnnnnnnnnnnnnnnnnnnnnnnnnnnnnnnnnnnnnnnnnnnnnnnnnnnnnnnnnnnnnnnnnnnnnnnnnnnnnnnnnnnnnnnnnnnnnnnnnnnnnnnnnnnnnnnnnnnnnnnnnnnnnnnnnnnnnnnnnnnnnnnnnnnnnnnnnnnnnnnnnnnnnnnnnnnnnnnnnnnnnnnnnnnnnnnnnnnnnnnnnnnnnnnnnnnnnnnnnnnnnnnnnnnnnnnnnnnnnnnnnnnnnnnnnnnnnnnnnnnnnnnnnnnnnnnnnnnnnnnnnnnnnnnnnnnnnnnnnnnnnnnnnnnnnnnnnnnnnnnnnnnnnnnnnnnnnnnnnnnnnnnnnnnnnnnnnnnnnnnnnnnnnnnnnnnnnnnnnnnnnnnnnnnnnnnnnnnnnnnnnnnnnnnnnnnnnnnnnnnnnnnnnnnnnnnnnnnnnnnnnnnnnnnnnnnnnnnnnnnnnnnnnnnnnnnnnnnnnnnnnnnnnnnnnnnnnnnnnnnnnnnnnnnnnnnnnnnnnnnnnnnnnnnnnnnnnnnnnnnnnnnnnnnnnnnnnnnnnnnnnnnnnnnnnnnnnnnnnnnnnnnnnnnnnnnnnnnnnnnnnnnnnnnnnnnnnnnnnnnnnnnnnnnnnnnnnnnnnnnnnnnnnnnnnnnnnnnnnnnnnnnnnnnnnnnnnnnnnnnnnnnnnnnnnnnnnnnnnnnnnnnnnnnnnnnnnnnnnnnnnnnnnnnnnnnnnnnnnnnnnnnnnnnnnnnnnnnnnnnnnnnnnnnnnnnnnnnnnnnnnnnnnnnnnnnnnnnnnnnnnnnnnnnnnnnnnnnnnnnnnnnnnnnnnnnnnnnnnnnnnnnnnnnnnnnnnnnnnnnnnnnnnnnnnnnnnnnnnnnnnnnnnnnnnnnnnnnnnnnnnnnnnnnnnnnnnnnnnnnnnnnnnnnnnnnnnnnnnnnnnnnnnnnnnnnnnnnnnnnnnnnnnnnnnnnnnnnnnnnnnnnnnnnnnnnnnnnnnnnnnnnnnnnnnnnnnnnnnnnnnnnnnnnnnnnnnnnnnnnnnnnnnnnnnnnnnnnnnnnnnnnnnnnnnnnnnnnnnnnnnnnnnnnnnnnnnnnnnnnnnnnnnnnnnnnnnnnnnnnnnnnnnnnnnnnnnnnnnnnnnnnnnnnnnnnnnnnnnnnnnnnnnnnnnnnnnnnnnnnnnnnnnnnnnnnnnnnnnnnnnnnnnnnnnnnnnnnnnnnnnnnnnnnnnnnnnnnnnnnnnnnnnnnnnnnnnnnnnnnnnnnnnnnnnnnnnnnnnnnnnnnnnnnnnnnnnnnnnnnnnnnnnnnnnnnnnnnnnnnnnnnnnnnnnnnnnnnnnnnnnnnnnnnnnnnnnnnnnnnnnnnnnnnnnnnnnnnnnnnnnnnnnnnnnnnnnnnnnnnnnnnnnnnnnnnnnnnnnnnnnnnnnnnnnnnnnnnnnnnnnnnnnnnnnnnnnnnnnnnnnnnnnnnnnnnnnnnnnnnnnnnnnnnnnnnnnnnnnnnnnnnnnnnnnnnnnnnnnnnnnnnnnnnnnnnnnnnnnnnnnnnnnnnnnnnnnnnnnnnnnnnnnnnnnnnnnnnnnnnnnnnnnnnnnnnnnnnnnnnnnnnnnnnnnnnnnnnnnnnnnnnnnnnnnnnnnnnnnnnnnnnnnnnnnnnnnnnnnnnnnnnnnnnnnnnnnnnnnnnnnnnnnnnnnnnnnnnnnnnnnnnnnnnnnnnnnnnnnnnnnnnnnnnnnnnnnnnnnnnnnnnnnnnnnnnnnnnnnnnnnnnnnnnnnnnnnnnnnnnnnnnnnnnnnnnnnnnnnnnnnnnnnnnnnnnnnnnnnnnnnnnnnnnnnnnnnnnnnnnnnnnnnnnnnnnnnnnnnnnnnnnnnnnnnnnnnnnnnnnnnnnnnnnnnnnnnnnnnnnnnnnnnnnnnnnnnnnnnnnnnnnnnnnnnnnnnnnnnnnnnnnnnnnnnnnnnnnnnnnnnnnnnnnnnnnnnnnnnnnnnnnnnnnnnnnnnnnnnnnnnnnnnnnnnnnnnnnnnnnnnnnnnnnnnnnnnnnnnnnnnnnnnnnnnnnnnnnnnnnnnnnnnnnnnnnnnnnnnnnnnnnnnnnnnnnnnnnnnnnnnnnnnnnnnnnnnnnnnnnnnnnnnnnnnnnnnnnnnnnnnnnnnnnnnnnnnnnnnnnnnnnnnnnnnnnnnnnnnnnnnnnnnnnnnnnnnnnnnnnnnnnnnnnnnnnnnnnnnnnnnnnnnnnnnnnnnnnnnnnnnnnnnnnnnnnnnnnnnnnnnnnnnnnnnnnnnnnnnnnnnnnnnnnnnnnnnnnnnnnnnnnnnnnnnnnnnnnnnnnnnnnnnnnnnnnnnnnnnnnnnnnnnnnnnnnnnnnnnnnnnnnnnnnnnnnnnnnnnnnnnnnnnnnnnnnnnnnnnnnnnnnnnnnnnnnnnnnnnnnnnnnnnnnnnnnnnnnnnnnnnnnnnnnnnnnnnnnnnnnnnnnnnnnnnnnnnnnnnnnnnnnnnnnnnnnnnnnnnnnnnnnnnnnnnnnnnnnnnnnnnnnnnnnnnnnnnnnnnnnnnnnnnnnnnnnnnnnnnnnnnnnnnnnnnnnnnnnnnnnnnnnnnnnnnnnnnnnnnnnnnnnnnnnnnnnnnnnnnnnnnnnnnnnnnnnnnnnnnnnnnnnnnnnnnnnnnnnnnnnnnnnnnnnnnnnnnnnnnnnnnnnnnnnnnnnnnnnnnnnnnnnnnnnnnnnnnnnnnnnnnnnnnnnnnnnnnnnnnnnnnnnnnnnnnnnnnnnnnnnnnnnnnnnnnnnnnnnnnnnnnnnnnnnnnnnnnnnnnnnnnnnnnnnnnnnnnnnnnnnnnnnnnnnnnnnnnnnnnnnnnnnnnnnnnnnnnnnnnnnnnnnnnnnnnnnnnnnnnnnnnnnnnnnnnnnnnnnnnnnnnnnnnnnnnnnnnnnnnnnnnnnnnnnnnnnnnnnnnnnnnnnnnnnnnnnnnnnnnnnnnnnnnnnnnnnnnnnnnnnnnnnnnnnnnnnnnnnnnnnnnnnnnnnnnnnnnnnnnnnnnnnnnnnnnnnnnnnnnnnnnnnnnnnnnnnnnnnnnnnnnnnnnnnnnnnnnnnnnnnnnnnnnnnnnnnnnnnnnnnnnnnnnnnnnnnnnnnnnnnnnnnnnnnnnnnnnnnnnnnnnnnnnnnnnnnnnnnnnnnnnnnnnnnnnnnnnnnnnnnnnnnnnnnnnnnnnnnnnnnnnnnnnnnnnnnnnnnnnnnnnnnnnnnnnnnnnnnnnnnnnnnnnnnnnnnnnnnnnnnnnnnnnnnnnnnnnnnnnnnnnnnnnnnnnnnnnnnnnnnnnnnnnnnnnnnnnnnnnnnnnnnnnnnnnnnnnnnnnnnnnnnnnnnnnnnnnnnnnnnnnnnnnnnnnnnnnnnnnnnnnnnnnnnnnnnnnnnnnnnnnnnnnnnnnnnnnnnnnnnnnnnnnnnnnnnnnnnnnnnnnnnnnnnnnnnnnnnnnnnnnnnnnnnnnnnnnnnnnnnnnnnnnnnnnnnnnnnnnnnnnnnnnnnnnnnnnnnnnnnnnnnnnnnnnnnnnnnnnnnnnnnnnnnnnnnnnnnnnnnnnnnnnnnnnnnnnnnnnnnnnnnnnnnnnnnnnnnnnnnnnnnnnnnnnnnnnnnnnnnnnnnnnnnnnnnnnnnnnnnnnnnnnnnnnnnnnnnnnnnnnnnnnnnnnnnnnnnnnnnnnnnnnnnnnnnnnnnnnnnnnnnnnnnnnnnnnnnnnnnnnnnnnnnnnnnnnnnnnnnnnnnnnnnnnnnnnnnnnnnnnnnnnnnnnnnnnnnnnnnnnnnnnnnnnnnnnnnnnnnnnnnnnnnnnnnnnnnnnnnnnnnnnnnnnnnnnnnnnnnnnnnnnnnnnnnnnnnnnnnnnnnnnnnnnnnnnnnnnnnnnnnnnnnnnnnnnnnnnnnnnnnnnnnnnnnnnnnnnnnnnnnnnnnnnnnnnnnnnnnnnnnnnnnnnnnnnnnnnnnnnnnnnnnnnnnnnnnnnnnnnnnnnnnnnnnnnnnnnnnnnnnnnnnnnnnnnnnnnnnnnnnnnnnnnnnnnnnnnnnnnnnnnnnnnnnnnnnnnnnnnnnnnnnnnnnnnnnnnnnnnnnnnnnnnnnnnnnnnnnnnnnnnnnnnnnnnnnnnnnnnnnnnnnnnnnnnnnnnnnnnnnnnnnnnnnnnnnnnnnnnnnnnnnnnnnnnnnnnnnnnnnnnnnnnnnnnnnnnnnnnnnnnnnnnnnnnnnnnnnnnnnnnnnnnnnnnnnnnnnnnnnnnnnnnnnnnnnnnnnnnnnnnnnnnnnnnnnnnnnnnnnnnnnnnnnnnnnnnnnnnnnnnnnnnnnnnnnnnnnnnnnnnnnnnnnnnnnnnnnnnnnnnnnnnnnnnnnnnnnnnnnnnnnnnnnnnnnnnnnnnnnnnnnnnnnnnnnnnnnnnnnnnnnnnnnnnnnnnnnnnnnnnnnnnnnnnnnnnnnnnnnnnnnnnnnnnnnnnnnnnnnnnnnnnnnnnnnnnnnnnnnnnnnnnnnnnnnnnnnnnnnnnnnnnnnnnnnnnnnnnnnnnnnnnnnnnnnnnnnnnnnnnnnnnnnnnnnnnnnnnnnnnnnnnnnnnnnnnnnnnnnnnnnnnnnnnnnnnnnnnnnnnnnnnnnnnnnnnnnnnnnnnnnnnnnnnnnnnnnnnnnnnnnnnnnnnnnnnnnnnnnnnnnnnnnnnnnnnnnnnnnnnnnnnnnnnnnnnnnnnnnnnnnnnnnnnnnnnnnnnnnnnnnnnnnnnnnnnnnnnnnnnnnnnnnnnnnnnnnnnnnnnnnnnnnnnnnnnnnnnnnnnnnnnnnnnnnnnnnnnnnnnnnnnnnnnnnnnnnnnnnnnnnnnnnnnnnnnnnnnnnnnnnnnnnnnnnnnnnnnnnnnnnnnnnnnnnnnnnnnnnnnnnnnnnnnnnnnnnnnnnnnnnnnnnnnnnnnnnnnnnnnnnnnnnnnnnnnnnnnnnnnnnnnnnnnnnnnnnnnnnnnnnnnnnnnnnnnnnnnnnnnnnnnnnnnnnnnnnnnnnnnnnnnnnnnnnnnnnnnnnnnnnnnnnnnnnnnnnnnnnnnnnnnnnnnnnnnnnnnnnnnnnnnnnnnnnnnnnnnnnnnnnnnnnnnnnnnnnnnnnnnnnnnnnnnnnnnnnnnnnnnnnnnnnnnnnnnnnnnnnnnnnnnnnnnnnnnnnnnnnnnnnnnnnnnnnnnnnnnnnnnnnnnnnnnnnnnnnnnnnnnnnnnnnnnnnnnnnnnnnnnnnnnnnnnnnnnnnnnnnnnnnnnnnnnnnnnnnnnnnnnnnnnnnnnnnnnnnnnnnnnnnnnnnnnnnnnnnnnnnnnnnnnnnnnnnnnnnnnnnnnnnnnnnnnnnnnnnnnnnnnnnnnnnnnnnnnnnnnnnnnnnnnnnnnnnnnnnnnnnnnnnnnnnnnnnnnnnnnnnnnnnnnnnnnnnnnnnnnnnnnnnnnnnnnnnnnnnnnnnnnnnnnnnnnnnnnnnnnnnnnnnnnnnnnnnnnnnnnnnnnnnnnnnnnnnnnnnnnnnnnnnnnnnnnnnnnnnnnnnnnnnnnnnnnnnnnnnnnnnnnnnnnnnnnnnnnnnnnnnnnnnnnnnnnnnnnnnnnnnnnnnnnnnnnnnnnnnnnnnnnnnnnnnnnnnnnnnnnnnnnnnnnnnnnnnnnnnnnnnnnnnnnnnnnnnnnnnnnnnnnnnnnnnnnnnnnnnnnnnnnnnnnnnnnnnnnnnnnnnnnnnnnnnnnnnnnnnnnnnnnnnnnnnnnnnnnnnnnnnnnnnnnnnnnnnnnnnnnnnnnnnnnnnnnnnnnnnnnnnnnnnnnnnnnnnnnnnnnnnnnnnnnnnnnnnnnnnnnnnnnnnnnnnnnnnnnnnnnnnnnnnnnnnnnnnnnnnnnnnnnnnnnnnnnnnnnnnnnnnnnnnnnnnnnnnnnnnnnnnnnnnnnnnnnnnnnnnnnnnnnnnnnnnnnnnnnnnnnnnnnnnnnnnnnnnnnnnnnnnnnnnnnnnnnnnnnnnnnnnnnnnnnnnnnnnnnnnnnnnnnnnnnnnnnnnnnnnnnnnnnnnnnnnnnnnnnnnnnnnnnnnnnnnnnnnnnnnnnnnnnnnnnnnnnnnnnnnnnnnnnnnnnnnnnnnnnnnnnnnnnnnnnnnnnnnnnnnnnnnnnnnnnnnnnnnnnnnnnnnnnnnnnnnnnnnnnnnnnnnnnnnnnnnnnnnnnnnnnnnnnnnnnnnnnnnnnnnnnnnnnnnnnnnnnnnnnnnnnnnnnnnnnnnnnnnnnnnnnnnnnnnnnnnnnnnnnnnnnnnnnnnnnnnnnnnnnnnnnnnnnnnnnnnnnnnnnnnnnnnnnnnnnnnnnnnnnnnnnnnnnnnnnnnnnnnnnnnnnnnnnnnnnnnnnnnnnnnnnnnnnnnnnnnnnnnnnnnnnnnnnnnnnnnnnnnnnnnnnnnnnnnnnnnnnnnnnnnnnnnnnnnnnnnnnnnnnnnnnnnnnnnnnnnnnnnnnnnnnnnnnnnnnnnnnnnnnnnnnnnnnnnnnnnnnnnnnnnnnnnnnnnnnnnnnnnnnnnnnnnnnnnnnnnnnnnnnnnnnnnnnnnnnnnnnnnnnnnnnnnnnnnnnnnnnnnnnnnnnnnnnnnnnnnnnnnnnnnnnnnnnnnnnnnnnnnnnnnnnnnnnnnnnnnnnnnnnnnnnnnnnnnnnnnnnnnnnnnnnnnnnnnnnnnnnnnnnnnnnnnnnnnnnnnnnnnnnnnnnnnnnnnnnnnnnnnnnnnnnnnnnnnnnnnnnnnnnnnnnnnnnnnnnnnnnnnnnnnnnnnnnnnnnnnnnnnnnnnnnnnnnnnnnnnnnnnnnnnnnnnnnnnnnnnnnnnnnnnnnnnnnnnnnnnnnnnnnnnnnnnnnnnnnnnnnnnnnnnnnnnnnnnnnnnnnnnnnnnnnnnnnnnnnnnnnnnnnnnnnnnnnnnnnnnnnnnnnnnnnnnnnnnnnnnnnnnnnnnnnnnnnnnnnnnnnnnnnnnnnnnnnnnnnnnnnnnnnnnnnnnnnnnnnnnnnnnnnnnnnnnnnnnnnnnnnnnnnnnnnnnnnnnnnnnnnnnnnnnnnnnnnnnnnnnnnnnnnnnnnnnnnnnnnnnnnnnnnnnnnnnnnnnnnnnnnnnnnnnnnnnnnnnnnnnnnnnnnnnnnnnnnnnnnnnnnnnnnnnnnnnnnnnnnnnnnnnnnnnnnnnnnnnnnnnnnnnnnnnnnnnnnnnnnnnnnnnnnnnnnnnnnnnnnnnnnnnnnnnnnnnnnnnnnnnnnnnnnnnnnnnnnnnnnnnnnnnnnnnnnnnnnnnnnnnnnnnnnnnnnnnnnnnnnnnnnnnnnnnnnnnnnnnnnnnnnnnnnnnnnnnnnnnnnnnnnnnnnnnnnnnnnnnnnnnnnnnnnnnnnnnnnnnnnnnnnnnnnnnnnnnnnnnnnnnnnnnnnnnnnnnnnnnnnnnnnnnnnnnnnnnnnnnnnnnnnnnnnnnnnnnnnnnnnnnnnnnnnnnnnnnnnnnnnnnnnnnnnnnnnnnnnnnnnnnnnnnnnnnnnnnnnnnnnnnnnnnnnnnnnnnnnnnnnnnnnnnnnnnnnnnnnnnnnnnnnnnnnnnnnnnnnnnnnnnnnnnnnnnnnnnnnnnnnnnnnnnnnnnnnnnnnnnnnnnnnnnnnnnnnnnnnnnnnnnnnnnnnnnnnnnnnnnnnnnnnnnnnnnnnnnnnnnnnnnnnnnnnnnnnnnnnnnnnnnnnnnnnnnnnnnnnnnnnnnnnnnnnnnnnnnnnnnnnnnnnnnnnnnnnnnnnnnnnnnnnnnnnnnnnnnnnnnnnnnnnnnnnnnnnnnnnnnnnnnnnnnnnnnnnnnnnnnnnnnnnnnnnnnnnnnnnnnnnnnnnnnnnnnnnnnnnnnnnnnnnnnnnnnnnnnnnnnnnnnnnnnnnnnnnnnnnnnnnnnnnnnnnnnnnnnnnnnnnnnnnnnnnnnnnnnnnnnnnnnnnnnnnnnnnnnnnnnnnnnnnnnnnnnnnnnnnnnnnnnnnnnnnnnnnnnnnnnnnnnnnnnnnnnnnnnnnnnnnnnnnnnnnnnnnnnnnnnnnnnnnnnnnnnnnnnnnnnnnnnnnnnnnnnnnnnnnnnnnnnnnnnnnnnnnnnnnnnnnnnnnnnnnnnnnnnnnnnnnnnnnnnnnnnnnnnnnnnnnnnnnnnnnnnnnnnnnnnnnnnnnnnnnnnnnnnnnnnnnnnnnnnnnnnnnnnnnnnnnnnnnnnnnnnnnnnnnnnnnnnnnnnnnnnnnnnnnnnnnnnnnnnnnnnnnnnnnnnnnnnnnnnnnnnnnnnnnnnnnnnnnnnnnnnnnnnnnnnnnnnnnnnnnnnnnnnnnnnnnnnnnnnnnnnnnnnnnnnnnnnnnnnnnnnnnnnnnnnnnnnnnnnnnnnnnnnnnnnnnnnnnnnnnnnnnnnnnnnnnnnnnnnnnnnnnnnnnnnnnnnnnnnnnnnnnnnnnnnnnnnnnnnnnnnnnnnnnnnnnnnnnnnnnnnnnnnnnnnnnnnnnnnnnnnnnnnnnnnnnnnnnnnnnnnnnnnnnnnnnnnnnnnnnnnnnnnnnnnnnnnnnnnnnnnnnnnnnnnnnnnnnnnnnnnnnnnnnnnnnnnnnnnnnnnnnnnnnnnnnnnnnnnnnnnnnnnnnnnnnnnnnnnnnnnnnnnnnnnnnnnnnnnnnnnnnnnnnnnnnnnnnnnnnnnnnnnnnnnnnnnnnnnnnnnnnnnnnnnnnnnnnnnnnnnnnnnnnnnnnnnnnnnnnnnnnnnnnnnnnnnnnnnnnnnnnnnnnnnnnnnnnnnnnnnnnnnnnnnnnnnnnnnnnnnnnnnnnnnnnnnnnnnnnnnnnnnnnnnnnnnnnnnnnnnnnnnnnnnnnnnnnnnnnnnnnnnnnnnnnnnnnnnnnnnnnnnnnnnnnnnnnnnnnnnnnnnnnnnnnnnnnnnnnnnnnnnnnnnnnnnnnnnnnnnnnnnnnnnnnnnnnnnnnnnnnnnnnnnnnnnnnnnnnnnnnnnnnnnnnnnnnnnnnnnnnnnnnnnnnnnnnnnnnnnnnnnnnnnnnnnnnnnnnnnnnnnnnnnnnnnnnnnnnnnnnnnnnnnnnnnnnnnnnnnnnnnnnnnnnnnnnnnnnnnnnnnnnnnnnnnnnnnnnnnnnnnnnnnnnnnnnnnnnnnnnnnnnnnnnnnnnnnnnnnnnnnnnnnnnnnnnnnnnnnnnnnnnnnnnnnnnnnnnnnnnnnnnnnnnnnnnnnnnnnnnnnnnnnnnnnnnnnnnnnnnnnnnnnnnnnnnnnnnnnnnnnnnnnnnnnnnnnnnnnnnnnnnnnnnnnnnnnnnnnnnnnnnnnnnnnnnnnnnnnnnnnnnnnnnnnnnnnnnnnnnnnnnnnnnnnnnnnnnnnnnnnnnnnnnnnnnnnnnnnnnnnnnnnnnnnnnnnnnnnnnnnnnnnnnnnnnnnnnnnnnnnnnnnnnnnnnnnnnnnnnnnnnnnnnnnnnnnnnnnnnnnnnnnnnnnnnnnnnnnnnnnnnnnnnnnnnnnnnnnnnnnnnnnnnnnnnnnnnnnnnnnnnnnnnnnnnnnnnnnnnnnnnnnnnnnnnnnnnnnnnnnnnnnnnnnnnnnnnnnnnnnnnnnnnnnnnnnnnnnnnnnnnnnnnnnnnnnnnnnnnnnnnnnnnnnnnnnnnnnnnnnnnnnnnnnnnnnnnnnnnnnnnnnnnnnnnnnnnnnnnnnnnnnnnnnnnnnnnnnnnnnnnnnnnnnnnnnnnnnnnnnnnnnnnnnnnnnnnnnnnnnnnnnnnnnnnnnnnnnnnnnnnnnnnnnnnnnnnnnnnnnnnnnnnnnnnnnnnnnnnnnnnnnnnnnnnnnnnnnnnnnnnnnnnnnnnnnnnnnnnnnnnnnnnnnnnnnnnnnnnnnnnnnnnnnnnnnnnnnnnnnnnnnnnnnnnnnnnnnnnnnnnnnnnnnnnnnnnnnnnnnnnnnnnnnnnnnnnnnnnnnnnnnnnnnnnnnnnnnnnnnnnnnnnnnnnnnnnnnnnnnnnnnnnnnnnnnnnnnnnnnnnnnnnnnnnnnnnnnnnnnnnnnnnnnnnnnnnnnnnnnnnnnnnnnnnnnnnnnnnnnnnnnnnnnnnnnnnnnnnnnnnnnnnnnnnnnnnnnnnnnnnnnnnnnnnnnnnnnnnnnnnnnnnnnnnnnnnnnnnnnnnnnnnnnnnnnnnnnnnnnnnnnnnnnnnnnnnnnnnnnnnnnnnnnnnnnnnnnnnnnnnnnnnnnnnnnnnnnnnnnnnnnnnnnnnnnnnnnnnnnnnnnnnnnnnnnnnnnnnnnnnnnnnnnnnnnnnnnnnnnnnnnnnnnnnnnnnnnnnnnnnnnnnnnnnnnnnnnnnnnnnnnnnnnnnnnnnnnnnnnnnnnnnnnnnnnnnnnnnnnnnnnnnnnnnnnnnnnnnnnnnnnnnnnnnnnnnnnnnnnnnnnnnnnnnnnnnnnnnnnnnnnnnnnnnnnnnnnnnnnnnnnnnnnnnnnnnnnnnnnnnnnnnnnnnnnnnnnnnnnnnnnnnnnnnnnnnnnnnnnnnnnnnnnnnnnnnnnnnnnnnnnnnnnnnnnnnnnnnnnnnnnnnnnnnnnnnnnnnnnnnnnnnnnnnnnnnnnnnnnnnnnnnnnnnnnnnnnnnnnnnnnnnnnnnnnnnnnnnnnnnnnnnnnnnnnnnnnnnnnnnnnnnnnnnnnnnnnnnnnnnnnnnnnnnnnnnnnnnnnnnnnnnnnnnnnnnnnnnnnnnnnnnnnnnnnnnnnnnnnnnnnnnnnnnnnnnnnnnnnnnnnnnnnnnnnnnnnnnnnnnnnnnnnnnnnnnnnnnnnnnnnnnnnnnnnnnnnnnnnnnnnnnnnnnnnnnnnnnnnnnnnnnnnnnnnnnnnnnnnnnnnnnnnnnnnnnnnnnnnnnnnnnnnnnnnnnnnnnnnnnnnnnnnnnnnnnnnnnnnnnnnnnnnnnnnnnnnnnnnnnnnnnnnnnnnnnnnnnnnnnnnnnnnnnnnnnnnnnnnnnnnnnnnnnnnnnnnnnnnnnnnnnnnnnnnnnnnnnnnnnnnnnnnnnnnnnnnnnnnnnnnnnnnnnnnnnnnnnnnnnnnnnnnnnnnnnnnnnnnnnnnnnnnnnnnnnnnnnnnnnnnnnnnnnnnnnnnnnnnnnnnnnnnnnnnnnnnnnnnnnnnnnnnnnnnnnnnnnnnnnnnnnnnnnnnnnnnnnnnnnnnnnnnnnnnnnnnnnnnnnnnnnnnnnnnnnnnnnnnnnnnnnnnnnnnnnnnnnnnnnnnnnnnnnnnnnnnnnnnnnnnnnnnnnnnnnnnnnnnnnnnnnnnnnnnnnnnnnnnnnnnnnnnnnnnnnnnnnnnnnnnnnnnnnnnnnnnnnnnnnnnnnnnnnnnnnnnnnnnnnnnnnnnnnnnnnnnnnnnnnnnnnnnnnnnnnnnnnnnnnnnnnnnnnnnnnnnnnnnnnnnnnnnnnnnnnnnnnnnnnnnnnnnnnnnnnnnnnnnnnnnnnnnnnnnnnnnnnnnnnnnnnnnnnnnnnnnnnnnnnnnnnnnnnnnnnnnnnnnnnnnnnnnnnnnnnnnnnnnnnnnnnnnnnnnnnnnnnnnnnnnnnnnnnnnnnnnnnnnnnnnnnnnnnnnnnnnnnnnnnnnnnnnnnnnnnnnnnnnnnnnnnnnnnnnnnnnnnnnnnnnnnnnnnnnnnnnnnnnnnnnnnnnnnnnnnnnnnnnnnnnnnnnnnnnnnnnnnnnnnnnnnnnnnnnnnnnnnnnnnnnnnnnnnnnnnnnnnnnnnnnnnnnnnnnnnnnnnnnnnnnnnnnnnnnnnnnnnnnnnnnnnnnnnnnnnnnnnnnnnnnnnnnnnnnnnnnnnnnnnnnnnnnnnnnnnnnnnnnnnnnnnnnnnnnnnnnnnnnnnnnnnnnnnnnnnnnnnnnnnnnnnnnnnnnnnnnnnnnnnnnnnnnnnnnnnnnnnnnnnnnnnnnnnnnnnnnnnnnnnnnnnnnnnnnnnnnnnnnnnnnnnnnnnnnnnnnnnnnnnnnnnnnnnnnnnnnnnnnnnnnnnnnnnnnnnnnnnnnnnnnnnnnnnnnnnnnnnnnnnnnnnnnnnnnnnnnnnnnnnnnnnnnnnnnnnnnnnnnnnnnnnnnnnnnnnnnnnnnnnnnnnnnnnnnnnnnnnnnnnnnnnnnnnnnnnnnnnnnnnnnnnnnnnnnnnnnnnnnnnnnnnnnnnnnnnnnnnnnnnnnnnnnnnnnnnnnnnnnnnnnnnnnnnnnnnnnnnnnnnnnnnnnnnnnnnnnnnnnnnnnnnnnnnnnnnnnnnnnnnnnnnnnnnnnnnnnnnnnnnnnnnnnnnnnnnnnnnnnnnnnnnnnnnnnnnnnnnnnnnnnnnnnnnnnnnnnnnnnnnnnnnnnnnnnnnnnnnnnnnnnnnnnnnnnnnnnnnnnnnnnnnnnnnnnnnnnnnnnnnnnnnnnnnnnnnnnnnnnnnnnnnnnnnnnnnnnnnnnnnnnnnnnnnnnnnnnnnnnnnnnnnnnnnnnnnnnnnnnnnnnnnnnnnnnnnnnnnnnnnnnnnnnnnnnnnnnnnnnnnnnnnnnnnnnnnnnnnnnnnnnnnnnnnnnnnnnnnnnnnnnnnnnnnnnnnnnnnnnnnnnnnnnnnnnnnnnnnnnnnnnnnnnnnnnnnnnnnnnnnnnnnnnnnnnnnnnnnnnnnnnnnnnnnnnnnnnnnnnnnnnnnnnnnnnnnnnnnnnnnnnnnnnnnnnnnnnnnnnnnnnnnnnnnnnnnnnnnnnnnnnnnnnnnnnnnnnnnnnnnnnnnnnnnnnnnnnnnnnnnnnnnnnnnnnnnnnnnnnnnnnnnnnnnnnnnnnnnnnnnnnnnnnnnnnnnnnnnnnnnnnnnnnnnnnnnnnnnnnnnnnnnnnnnnnnnnnnnnnnnnnnnnnnnnnnnnnnnnnnnnnnnnnnnnnnnnnnnnnnnnnnnnnnnnnnnnnnnnnnnnnnnnnnnnnnnnnnnnnnnnnnnnnnnnnnnnnnnnnnnnnnnnnnnnnnnnnnnnnnnnnnnnnnnnnnnnnnnnnnnnnnnnnnnnnnnnnnnnnnnnnnnnnnnnnnnnnnnnnnnnnnnnnnnnnnnnnnnnnnnnnnnnnnnnnnnnnnnnnnnnnnnnnnnnnnnnnnnnnnnnnnnnnnnnnnnnnnnnnnnnnnnnnnnnnnnnnnnnnnnnnnnnnnnnnnnnnnnnnnnnnnnnnnnnnnnnnnnnnnnnnnnnnnnnnnnnnnnnnnnnnnnnnnnnnnnnnnnnnnnnnnnnnnnnnnnnnnnnnnnnnnnnnnnnnnnnnnnnnnnnnnnnnnnnnnnnnnnnnnnnnnnnnnnnnnnnnnnnnnnnnnnnnnnnnnnnnnnnnnnnnnnnnnnnnnnnnnnnnnnnnnnnnnnnnnnnnnnnnnnnnnnnnnnnnnnnnnnnnnnnnnnnnnnnnnnnnnnnnnnnnnnnnnnnnnnnnnnnnnnnnnnnnnnnnnnnnnnnnnnnnnnnnnnnnnnnnnnnnnnnnnnnnnnnnnnnnnnnnnnnnnnnnnnnnnnnnnnnnnnnnnnnnnnnnnnnnnnnnnnnnnnnnnnnnnnnnnnnnnnnnnnnnnnnnnnnnnnnnnnnnnnnnnnnnnnnnnnnnnnnnnnnnnnnnnnnnnnnnnnnnnnnnnnnnnnnnnnnnnnnnnnnnnnnnnnnnnnnnnnnnnnnnnnnnnnnnnnnnnnnnnnnnnnnnnnnnnnnnnnnnnnnnnnnnnnnnnnnnnnnnnnnnnnnnnnnnnnnnnnnnnnnnnnnnnnnnnnnnnnnnnnnnnnnnnnnnnnnnnnnnnnnnnnnnnnnnnnnnnnnnnnnnnnnnnnnnnnnnnnnnnnnnnnnnnnnnnnnnnnnnnnnnnnnnnnnnnnnnnnnnnnnnnnnnnnnnnnnnnnnnnnnnnnnnnnnnnnnnnnnnnnnnnnnnnnnnnnnnnnnnnnnnnnnnnnnnnnnnnnnnnnnnnnnnnnnnnnnnnnnnnnnnnnnnnnnnnnnnnnnnnnnnnnnnnnnnnnnnnnnnnnnnnnnnnnnnnnnnnnnnnnnnnnnnnnnnnnnnnnnnnnnnnnnnnnnnnnnnnnnnnnnnnnnnnnnnnnnnnnnnnnnnnnnnnnnnnnnnnnnnnnnnnnnnnnnnnnnnnnnnnnnnnnnnnnnnnnnnnnnnnnnnnnnnnnnnnnnnnnnnnnnnnnnnnnnnnnnnnnnnnnnnnnnnnnnnnnnnnnnnnnnnnnnnnnnnnnnnnnnnnnnnnnnnnnnnnnnnnnnnnnnnnnnnnnnnnnnnnnnnnnnnnnnnnnnnnnnnnnnnnnnnnnnnnnnnnnnnnnnnnnnnnnnnnnnnnnnnnnnnnnnnnnnnnnnnnnnnnnnnnnnnnnnnnnnnnnnnnnnnnnnnnnnnnnnnnnnnnnnnnnnnnnnnnnnnnnnnnnnnnnnnnnnnnnnnnnnnnnnnnnnnnnnnnnnnnnnnnnnnnnnnnnnnnnnnnnnnnnnnnnnnnnnnnnnnnnnnnnnnnnnnnnnnnnnnnnnnnnnnnnnnnnnnnnnnnnnnnnnnnnnnnnnnnnnnnnnnnnnnnnnnnnnnnnnnnnnnnnnnnnnnnnnnnnnnnnnnnnnnnnnnnnnnnnnnnnnnnnnnnnnnnnnnnnnnnnnnnnnnnnnnnnnnnnnnnnnnnnnnnnnnnnnnnnnnnnnnnnnnnnnnnnnnnnnnnnnnnnnnnnnnnnnnnnnnnnnnnnnnnnnnnnnnnnnnnnnnnnnnnnnnnnnnnnnnnnnnnnnnnnnnnnnnnnnnnnnnnnnnnnnnnnnnnnnnnnnnnnnnnnnnnnnnnnnnnnnnnnnnnnnnnnnnnnnnnnnnnnnnnnnnnnnnnnnnnnnnnnnnnnnnnnnnnnnnnnnnnnnnnnnnnnnnnnnnnnnnnnnnnnnnnnnnnnnnnnnnnnnnnnnnnnnnnnnnnnnnnnnnnnnnnnnnnnnnnnnnnnnnnnnnnnnnnnnnnnnnnnnnnnnnnnnnnnnnnnnnnnnnnnnnnnnnnnnnnnnnnnnnnnnnnnnnnnnnnnnnnnnnnnnnnnnnnnnnnnnnnnnnnnnnnnnnnnnnnnnnnnnnnnnnnnnnnnnnnnnnnnnnnnnnnnnnnnnnnnnnnnnnnnnnnnnnnnnnnnnnnnnnnnnnnnnnnnnnnnnnnnnnnnnnnnnnnnnnnnnnnnnnnnnnnnnnnnnnnnnnnnnnnnnnnnnnnnnnnnnnnnnnnnnnnnnnnnnnnnnnnnnnnnnnnnnnnnnnnnnnnnnnnnnnnnnnnnnnnnnnnnnnnnnnnnnnnnnnnnnnnnnnnnnnnnnnnnnnnnnnnnnnnnnnnnnnnnnnnnnnnnnnnnnnnnnnnnnnnnnnnnnnnnnnnnnnnnnnnnnnnnnnnnnnnnnnnnnnnnnnnnnnnnnnnnnnnnnnnnnnnnnnnnnnnnnnnnnnnnnnnnnnnnnnnnnnnnnnnnnnnnnnnnnnnnnnnnnnnnnnnnnnnnnnnnnnnnnnnnnnnnnnnnnnnnnnnnnnnnnnnnnnnnnnnnnnnnnnnnnnnnnnnnnnnnnnnnnnnnnnnnnnnnnnnnnnnnnnnnnnnnnnnnnnnnnnnnnnnnnnnnnnnnnnnnnnnnnnnnnnnnnnnnnnnnnnnnnnnnnnnnnnnnnnnnnnnnnnnnnnnnnnnnnnnnnnnnnnnnnnnnnnnnnnnnnnnnnnnnnnnnnnnnnnnnnnnnnnnnnnnnnnnnnnnnnnnnnnnnnnnnnnnnnnnnnnnnnnnnnnnnnnnnnnnnnnnnnnnnnnnnnnnnnnnnnnnnnnnnnnnnnnnnnnnnnnnnnnnnnnnnnnnnnnnnnnnnnnnnnnnnnnnnnnnnnnnnnnnnnnnnnnnnnnnnnnnnnnnnnnnnnnnnnnnnnnnnnnnnnnnnnnnnnnnnnnnnnnnnnnnnnnnnnnnnnnnnnnnnnnnnnnnnnnnnnnnnnnnnnnnnnnnnnnnnnnnnnnnnnnnnnnnnnnnnnnnnnnnnnnnnnnnnnnnnnnnnnnnnnnnnnnnnnnnnnnnnnnnnnnnnnnnnnnnnnnnnnnnnnnnnnnnnnnnnnnnnnnnnnnnnnnnnnnnnnnnnnnnnnnnnnnnnnnnnnnnnnnnnnnnnnnnnnnnnnnnnnnnnnnnnnnnnnnnnnnnnnnnnnnnnnnnnnnnnnnnnnnnnnnnnnnnnnnnnnnnnnnnnnnnnnnnnnnnnnnnnnnnnnnnnnnnnnnnnnnnnnnnnnnnnnnnnnnnnnnnnnnnnnnnnnnnnnnnnnnnnnnnnnnnnnnnnnnnnnnnnnnnnnnnnnnnnnnnnnnnnnnnnnnnnnnnnnnnnnnnnnnnnnnnnnnnnnnnnnnnnnnnnnnnnnnnnnnnnnnnnnnnnnnnnnnnnnnnnnnnnnnnnnnnnnnnnnnnnnnnnnnnnnnnnnnnnnnnnnnnnnnnnnnnnnnnnnnnnnnnnnnnnnnnnnnnnnnnnnnnnnnnnnnnnnnnnnnnnnnnnnnnnnnnnnnnnnnnnnnnnnnnnnnnnnnnnnnnnnnnnnnnnnnnnnnnnnnnnnnnnnnnnnnnnnnnnnnnnnnnnnnnnnnnnnnnnnnnnnnnnnnnnnnnnnnnnnnnnnnnnnnnnnnnnnnnnnnnnnnnnnnnnnnnnnnnnnnnnnnnnnnnnnnnnnnnnnnnnnnnnnnnnnnnnnnnnnnnnnnnnnnnnnnnnnnnnnnnnnnnnnnnnnnnnnnnnnnnnnnnnnnnnnnnnnnnnnnnnnnnnnnnnnnnnnnnnnnnnnnnnnnnnnnnnnnnnnnnnnnnnnnnnnnnnnnnnnnnnnnnnnnnnnnnnnnnnnnnnnnnnnnnnnnnnnnnnnnnnnnnnnnnnnnnnnnnnnnnnnnnnnnnnnnnnnnnnnnnnnnnnnnnnnnnnnnnnnnnnnnnnnnnnnnnnnnnnnnnnnnnnnnnnnnnnnnnnnnnnnnnnnnnnnnnnnnnnnnnnnnnnnnnnnnnnnnnnnnnnnnnnnnnnnnnnnnnnnnnnnnnnnnnnnnnnnnnnnnnnnnnnnnnnnnnnnnnnnnnnnnnnnnnnnnnnnnnnnnnnnnnnnnnnnnnnnnnnnnnnnnnnnnnnnnnnnnnnnnnnnnnnnnnnnnnnnnnnnnnnnnnnnnnnnnnnnnnnnnnnnnnnnnnnnnnnnnnnnnnnnnnnnnnnnnnnnnnnnnnnnnnnnnnnnnnnnnnnnnnnnnnnnnnnnnnnnnnnnnnnnnnnnnnnnnnnnnnnnnnnnnnnnnnnnnnnnnnnnnnnnnnnnnnnnnnnnnnnnnnnnnnnnnnnnnnnnnnnnnnnnnnnnnnnnnnnnnnnnnnnnnnnnnnnnnnnnnnnnnnnnnnnnnnnnnnnnnnnnnnnnnnnnnnnnnnnnnnnnnnnnnnnnnnnnnnnnnnnnnnnnnnnnnnnnnnnnnnnnnnnnnnnnnnnnnnnnnnnnnnnnnnnnnnnnnnnnnnnnnnnnnnnnnnnnnnnnnnnnnnnnnnnnnnnnnnnnnnnnnnnnnnnnnnnnnnnnnnnnnnnnnnnnnnnnnnnnnnnnnnnnnnnnnnnnnnnnnnnnnnnnnnnnnnnnnnnnnnnnnnnnnnnnnnnnnnnnnnnnnnnnnnnnnnnnnnnnnnnnnnnnnnnnnnnnnnnnnnnnnnnnnnnnnnnnnnnnnnnnnnnnnnnnnnnnnnnnnnnnnnnnnnnnnnnnnnnnnnnnnnnnnnnnnnnnnnnnnnnnnnnnnnnnnnnnnnnnnnnnnnnnnnnnnnnnnnnnnnnnnnnnnnnnnnnnnnnnnnnnnnnnnnnnnnnnnnnnnnnnnnnnnnnnnnnnnnnnnnnnnnnnnnnnnnnnnnnnnnnnnnnnnnnnnnnnnnnnnnnnnnnnnnnnnnnnnnnnnnnnnnnnnnnnnnnnnnnnnnnnnnnnnnnnnnnnnnnnnnnnnnnnnnnnnnnnnnnnnnnnnnnnnnnnnnnnnnnnnnnnnnnnnnnnnnnnnnnnnnnnnnnnnnnnnnnnnnnnnnnnnnnnnnnnnnnnnnnnnnnnnnnnnnnnnnnnnnnnnnnnnnnnnnnnnnnnnnnnnnnnnnnnnnnnnnnnnnnnnnnnnnnnnnnnnnnnnnnnnnnnnnnnnnnnnnnnnnnnnnnnnnnnnnnnnnnnnnnnnnnnnnnnnnnnnnnnnnnnnnnnnnnnnnnnnnnnnnnnnnnnnnnnnnnnnnnnnnnnnnnnnnnnnnnnnnnnnnnnnnnnnnnnnnnnnnnnnnnnnnnnnnnnnnnnnnnnnnnnnnnnnnnnnnnnnnnnnnnnnnnnnnnnnnnnnnnnnnnnnnnnnnnnnnnnnnnnnnnnnnnnnnnnnnnnnnnnnnnnnnnnnnnnnnnnnnnnnnnnnnnnnnnnnnnnnnnnnnnnnnnnnnnnnnnnnnnnnnnnnnnnnnnnnnnnnnnnnnnnnnnnnnnnnnnnnnnnnnnnnnnnnnnnnnnnnnnnnnnnnnnnnnnnnnnnnnnnnnnnnnnnnnnnnnnnnnnnnnnnnnnnnnnnnnnnnnnnnnnnnnnnnnnnnnnnnnnnnnnnnnnnnnnnnnnnnnnnnnnnnnnnnnnnnnnnnnnnnnnnnnnnnnnnnnnnnnnnnnnnnnnnnnnnnnnnnnnnnnnnnnnnnnnnnnnnnnnnnnnnnnnnnnnnnnnnnnnnnnnnnnnnnnnnnnnnnnnnnnnnnnnnnnnnnnnnnnnnnnnnnnnnnnnnnnnnnnnnnnnnnnnnnnnnnnnnnnnnnnnnnnnnnnnnnnnnnnnnnnnnnnnnnnnnnnnnnnnnnnnnnnnnnnnnnnnnnnnnnnnnnnnnnnnnnnnnnnnnnnnnnnnnnnnnnnnnnnnnnnnnnnnnnnnnnnnnnnnnnnnnnnnnnnnnnnnnnnnnnnnnnnnnnnnnnnnnnnnnnnnnnnnnnnnnnnnnnnnnnnnnnnnnnnnnnnnnnnnnnnnnnnnnnnnnnnnnnnnnnnnnnnnnnnnnnnnnnnnnnnnnnnnnnnnnnnnnnnnnnnnnnnnnnnnnnnnnnnnnnnnnnnnnnnnnnnnnnnnnnnnnnnnnnnnnnnnnnnnnnnnnnnnnnnnnnnnnnnnnnnnnnnnnnnnnnnnnnnnnnnnnnnnnnnnnnnnnnnnnnnnnnnnnnnnnnnnnnnnnnnnnnnnnnnnnnnnnnnnnnnnnnnnnnnnnnnnnnnnnnnnnnnnnnnnnnnnnnnnnnnnnnnnnnnnnnnnnnnnnnnnnnnnnnnnnnnnnnnnnnnnnnnnnnnnnnnnnnnnnnnnnnnnnnnnnnnnnnnnnnnnnnnnnnnnnnnnnnnnnnnnnnnnnnnnnnnnnnnnnnnnnnnnnnnnnnnnnnnnnnnnnnnnnnnnnnnnnnnnnnnnnnnnnnnnnnnnnnnnnnnnnnnnnnnnnnnnnnnnnnnnnnnnnnnnnnnnnnnnnnnnnnnnnnnnnnnnnnnnnnnnnnnnnnnnnnnnnnnnnnnnnnnnnnnnnnnnnnnnnnnnnnnnnnnnnnnnnnnnnnnnnnnnnnnnnnnnnnnnnnnnnnnnnnnnnnnnnnnnnnnnnnnnnnnnnnnnnnnnnnnnnnnnnnnnnnnnnnnnnnnnnnnnnnnnnnnnnnnnnnnnnnnnnnnnnnnnnnnnnnnnnnnnnnnnnnnnnnnnnnnnnnnnnnnnnnnnnnnnnnnnnnnnnnnnnnnnnnnnnnnnnnnnnnnnnnnnnnnnnnnnnnnnnnnnnnnnnnnnnnnnnnnnnnnnnnnnnnnnnnnnnnnnnnnnnnnnnnnnnnnnnnnnnnnnnnnnnnnnnnnnnnnnnnnnnnnnnnnnnnnnnnnnnnnnnnnnnnnnnnnnnnnnnnnnnnnnnnnnnnnnnnnnnnnnnnnnnnnnnnnnnnnnnnnnnnnnnnnnnnnnnnnnnnnnnnnnnnnnnnnnnnnnnnnnnnnnnnnnnnnnnnnnnnnnnnnnnnnnnnnnnnnnnnnnnnnnnnnnnnnnnnnnnnnnnnnnnnnnnnnnnnnnnnnnnnnnnnnnnnnnnnnnnnnnnnnnnnnnnnnnnnnnnnnnnnnnnnnnnnnnnnnnnnnnnnnnnnnnnnnnnnnnnnnnnnnnnnnnnnnnnnnnnnnnnnnnnnnnnnnnnnnnnnnnnnnnnnnnnnnnnnnnnnnnnnnnnnnnnnnnnnnnnnnnnnnnnnnnnnnnnnnnnnnnnnnnnnnnnnnnnnnnnnnnnnnnnnnnnnnnnnnnnnnnnnnnnnnnnnnnnnnnnnnnnnnnnnnnnnnnnnnnnnnnnnnnnnnnnnnnnnnnnnnnnnnnnnnnnnnnnnnnnnnnnnnnnnnnnnnnnnnnnnnnnnnnnnnnnnnnnnnnnnnnnnnnnnnnnnnnnnnnnnnnnnnnnnnnnnnnnnnnnnnnnnnnnnnnnnnnnnnnnnnnnnnnnnnnnnnnnnnnnnnnnnnnnnnnnnnnnnnnnnnnnnnnnnnnnnnnnnnnnnnnnnnnnnnnnnnnnnnnnnnnnnnnnnnnnnnnnnnnnnnnnnnnnnnnnnnnnnnnnnnnnnnnnnnnnnnnnnnnnnnnnnnnnnnnnnnnnnnnnnnnnnnnnnnnnnnnnnnnnnnnnnnnnnnnnnnnnnnnnnnnnnnnnnnnnnnnnnnnnnnnnnnnnnnnnnnnnnnnnnnnnnnnnnnnnnnnnnnnnnnnnnnnnnnnnnnnnnnnnnnnnnnnnnnnnnnnnnnnnnnnnnnnnnnnnnnnnnnnnnnnnnnnnnnnnnnnnnnnnnnnnnnnnnnnnnnnnnnnnnnnnnnnnnnnnnnnnnnnnnnnnnnnnnnnnnnnnnnnnnnnnnnnnnnnnnnnnnnnnnnnnnnnnnnnnnnnnnnnnnnnnnnnnnnnnnnnnnnnnnnnnnnnnnnnnnnnnnnnnnnnnnnnnnnnnnnnnnnnnnnnnnnnnnnnnnnnnnnnnnnnnnnnnnnnnnnnnnnnnnnnnnnnnnnnnnnnnnnnnnnnnnnnnnnnnnnnnnnnnnnnnnnnnnnnnnnnnnnnnnnnnnnnnnnnnnnnnnnnnnnnnnnnnnnnnnnnnnnnnnnnnnnnnnnnnnnnnnnnnnnnnnnnnnnnnnnnnnnnnnnnnnnnnnnnnnnnnnnnnnnnnnnnnnnnnnnnnnnnnnnnnnnnnnnnnnnnnnnnnnnnnnnnnnnnnnnnnnnnnnnnnnnnnnnnnnnnnnnnnnnnnnnnnnnnnnnnnnnnnnnnnnnnnnnnnnnnnnnnnnnnnnnnnnnnnnnnnnnnnnnnnnnnnnnnnnnnnnnnnnnnnnnnnnnnnnnnnnnnnnnnnnnnnnnnnnnnnnnnnnnnnnnnnnnnnnnnnnnnnnnnnnnnnnnnnnnnnnnnnnnnnnnnnnnnnnnnnnnnnnnnnnnnnnnnnnnnnnnnnnnnnnnnnnnnnnnnnnnnnnnnnnnnnnnnnnnnnnnnnnnnnnnnnnnnnnnnnnnnnnnnnnnnnnnnnnnnnnnnnnnnnnnnnnnnnnnnnnnnnnnnnnnnnnnnnnnnnnnnnnnnnnnnnnnnnnnnnnnnnnnnnnnnnnnnnnnnnnnnnnnnnnnnnnnnnnnnnnnnnnnnnnnnnnnnnnnnnnnnnnnnnnnnnnnnnnnnnnnnnnnnnnnnnnnnnnnnnnnnnnnnnnnnnnnnnnnnnnnnnnnnnnnnnnnnnnnnnnnnnnnnnnnnnnnnnnnnnnnnnnnnnnnnnnnnnnnnnnnnnnnnnnnnnnnnnnnnnnnnnnnnnnnnnnnnnnnnnnnnnnnnnnnnnnnnnnnnnnnnnnnnnnnnnnnnnnnnnnnnnnnnnnnnnnnnnnnnnnnnnnnnnnnnnnnnnnnnnnnnnnnnnnnnnnnnnnnnnnnnnnnnnnnnnnnnnnnnnnnnnnnnnnnnnnnnnnnnnnnnnnnnnnnnnnnnnnnnnnnnnnnnnnnnnnnnnnnnnnnnnnnnnnnnnnnnnnnnnnnnnnnnnnnnnnnnnnnnnnnnnnnnnnnnnnnnnnnnnnnnnnnnnnnnnnnnnnnnnnnnnnnnnnnnnnnnnnnnnnnnnnnnnnnnnnnnnnnnnnnnnnnnnnnnnnnnnnnnnnnnnnnnnnnnnnnnnnnnnnnnnnnnnnnnnnnnnnnnnnnnnnnnnnnnnnnnnnnnnnnnnnnnnnnnnnnnnnnnnnnnnnnnnnnnnnnnnnnnnnnnnnnnnnnnnnnnnnnnnnnnnnnnnnnnnnnnnnnnnnnnnnnnnnnnnnnnnnnnnnnnnnnnnnnnnnnnnnnnnnnnnnnnnnnnnnnnnnnnnnnnnnnnnnnnnnnnnnnnnnnnnnnnnnnnnnnnnnnnnnnnnnnnnnnnnnnnnnnnnnnnnnnnnnnnnnnnnnnnnnnnnnnnnnnnnnnnnnnnnnnnnnnnnnnnnnnnnnnnnnnnnnnnnnnnnnnnnnnnnnnnnnnnnnnnnnnnnnnnnnnnnnnnnnnnnnnnnnnnnnnnnnnnnnnnnnnnnnnnnnnnnnnnnnnnnnnnnnnnnnnnnnnnnnnnnnnnnnnnnnnnnnnnnnnnnnnnnnnnnnnnnnnnnnnnnnnnnnnnnnnnnnnnnnnnnnnnnnnnnnnnnnnnnnnnnnnnnnnnnnnnnnnnnnnnnnnnnnnnnnnnnnnnnnnnnnnnnnnnnnnnnnnnnnnnnnnnnnnnnnnnnnnnnnnnnnnnnnnnnnnnnnnnnnnnnnnnnnnnnnnnnnnnnnnnnnnnnnnnnnnnnnnnnnnnnnnnnnnnnnnnnnnnnnnnnnnnnnnnnnnnnnnnnnnnnnnnnnnnnnnnnnnnnnnnnnnnnnnnnnnnnnnnnnnnnnnnnnnnnnnnnnnnnnnnnnnnnnnnnnnnnnnnnnnnnnnnnnnnnnnnnnnnnnnnnnnnnnnnnnnnnnnnnnnnnnnnnnnnnnnnnnnnnnnnnnnnnnnnnnnnnnnnnnnnnnnnnnnnnnnnnnnnnnnnnnnnnnnnnnnnnnnnnnnnnnnnnnnnnnnnnnnnnnnnnnnnnnnnnnnnnnnnnnnnnnnnnnnnnnnnnnnnnnnnnnnnnnnnnnnnnnnnnnnnnnnnnnnnnnnnnnnnnnnnnnnnnnnnnnnnnnnnnnnnnnnnnnnnnnnnnnnnnnnnnnnnnnnnnnnnnnnnnnnnnnnnnnnnnnnnnnnnnnnnnnnnnnnnnnnnnnnnnnnnnnnnnnnnnnnnnnnnnnnnnnnnnnnnnnnnnnnnnnnnnnnnnnnnnnnnnnnnnnnnnnnnnnnnnnnnnnnnnnnnnnnnnnnnnnnnnnnnnnnnnnnnnnnnnnnnnnnnnnnnnnnnnnnnnnnnnnnnnnnnnnnnnnnnnnnnnnnnnnnnnnnnnnnnnnnnnnnnnnnnnnnnnnnnnnnnnnnnnnnnnnnnnnnnnnnnnnnnnnnnnnnnnnnnnnnnnnnnnnnnnnnnnnnnnnnnnnnnnnnnnnnnnnnnnnnnnnnnnnnnnnnnnnnnnnnnnnnnnnnnnnnnnnnnnnnnnnnnnnnnnnnnnnnnnnnnnnnnnnnnnnnnnnnnnnnnnnnnnnnnnnnnnnnnnnnnnnnnnnnnnnnnnnnnnnnnnnnnnnnnnnnnnnnnnnnnnnnnnnnnnnnnnnnnnnnnnnnnnnnnnnnnnnnnnnnnnnnnnnnnnnnnnnnnnnnnnnnnnnnnnnnnnnnnnnnnnnnnnnnnnnnnnnnnnnnnnnnnnnnnnnnnnnnnnnnnnnnnnnnnnnnnnnnnnnnnnnnnnnnnnnnnnnnnnnnnnnnnnnnnnnnnnnnnnnnnnnnnnnnnnnnnnnnnnnnnnnnnnnnnnnnnnnnnnnnnnnnnnnnnnnnnnnnnnnnnnnnnnnnnnnnnnnnnnnnnnnnnnnnnnnnnnnnnnnnnnnnnnnnnnnnnnnnnnnnnnnnnnnnnnnnnnnnnnnnnnnnnnnnnnnnnnnnnnnnnnnnnnnnnnnnnnnnnnnnnnnnnnnnnnnnnnnnnnnnnnnnnnnnnnnnnnnnnnnnnnnnnnnnnnnnnnnnnnnnnnnnnnnnnnnnnnnnnnnnnnnnnnnnnnnnnnnnnnnnnnnnnnnnnnnnnnnnnnnnnnnnnnnnnnnnnnnnnnnnnnnnnnnnnnnnnnnnnnnnnnnnnnnnnnnnnnnnnnnnnnnnnnnnnnnnnnnnnnnnnnnnnnnnnnnnnnnnnnnnnnnnnnnnnnnnnnnnnnnnnnnnnnnnnnnnnnnnnnnnnnnnnnnnnnnnnnnnnnnnnnnnnnnnnnnnnnnnnnnnnnnnnnnnnnnnnnnnnnnnnnnnnnnnnnnnnnnnnnnnnnnnnnnnnnnnnnnnnnnnnnnnnnnnnnnnnnnnnnnnnnnnnnnnnnnnnnnnnnnnnnnnnnnnnnnnnnnnnnnnnnnnnnnnnnnnnnnnnnnnnnnnnnnnnnnnnnnnnnnnnnnnnnnnnnnnnnnnnnnnnnnnnnnnnnnnnnnnnnnnnnnnnnnnnnnnnnnnnnnnnnnnnnnnnnnnnnnnnnnnnnnnnnnnnnnnnnnnnnnnnnnnnnnnnnnnnnnnnnnnnnnnnnnnnnnnnnnnnnnnnnnnnnnnnnnnnnnnnnnnnnnnnnnnnnnnnnnnnnnnnnnnnnnnnnnnnnnnnnnnnnnnnnnnnnnnnnnnnnnnnnnnnnnnnnnnnnnnnnnnnnnnnnnnnnnnnnnnnnnnnnnnnnnnnnnnnnnnnnnnnnnnnnnnnnnnnnnnnnnnnnnnnnnnnnnnnnnnnnnnnnnnnnnnnnnnnnnnnnnnnnnnnnnnnnnnnnnnnnnnnnnnnnnnnnnnnnnnnnnnnnnnnnnnnnnnnnnnnnnnnnnnnnnnnnnnnnnnnnnnnnnnnnnnnnnnnnnnnnnnnnnnnnnnnnnnnnnnnnnnnnnnnnnnnnnnnnnnnnnnnnnnnnnnnnnnnnnnnnnnnnnnnnnnnnnnnnnnnnnnnnnnnnnnnnnnnnnnnnnnnnnnnnnnnnnnnnnnnnnnnnnnnnnnnnnnnnnnnnnnnnnnnnnnnnnnnnnnnnnnnnnnnnnnnnnnnnnnnnnnnnnnnnnnnnnnnnnnnnnnnnnnnnnnnnnnnnnnnnnnnnnnnnnnnnnnnnnnnnnnnnnnnnnnnnnnnnnnnnnnnnnnnnnnnnnnnnnnnnnnnnnnnnnnnnnnnnnnnnnnnnnnnnnnnnnnnnnnnnnnnnnnnnnnnnnnnnnnnnnnnnnnnnnnnnnnnnnnnnnnnnnnnnnnnnnnnnnnnnnnnnnnnnnnnnnnnnnnnnnnnnnnnnnnnnnnnnnnnnnnnnnnnnnnnnnnnnnnnnnnnnnnnnnnnnnnnnnnnnnnnnnnnnnnnnnnnnnnnnnnnnnnnnnnnnnnnnnnnnnnnnnnnnnnnnnnnnnnnnnnnnnnnnnnnnnnnnnnnnnnnnnnnnnnnnnnnnnnnnnnnnnnnnnnnnnnnnnnnnnnnnnnnnnnnnnnnnnnnnnnnnnnnnnnnnnnnnnnnnnnnnnnnnnnnnnnnnnnnnnnnnnnnnnnnnnnnnnnnnnnnnnnnnnnnnnnnnnnnnnnnnnnnnnnnnnnnnnnnnnnnnnnnnnnnnnnnnnnnnnnnnnnnnnnnnnnnnnnnnnnnnnnnnnnnnnnnnnnnnnnnnnnnnnnnnnnnnnnnnnnnnnnnnnnnnnnnnnnnnnnnnnnnnnnnnnnnnnnnnnnnnnnnnnnnnnnnnnnnnnnnnnnnnnnnnnnnnnnnnnnnnnnnnnnnnnnnnnnnnnnnnnnnnnnnnnnnnnnnnnnnnnnnnnnnnnnnnnnnnnnnnnnnnnnnnnnnnnnnnnnnnnnnnnnnnnnnnnnnnnnnnnnnnnnnnnnnnnnnnnnnnnnnnnnnnnnnnnnnnnnnnnnnnnnnnnnnnnnnnnnnnnnnnnnnnnnnnnnnnnnnnnnnnnnnnnnnnnnnnnnnnnnnnnnnnnnnnnnnnnnnnnnnnnnnnnnnnnnnnnnnnnnnnnnnnnnnnnnnnnnnnnnnnnnnnnnnnnnnnnnnnnnnnnnnnnnnnnnnnnnnnnnnnnnnnnnnnnnnnnnnnnnnnnnnnnnnnnnnnnnnnnnnnnnnnnnnnnnnnnnnnnnnnnnnnnnnnnnnnnnnnnnnnnnnnnnnnnnnnnnnnnnnnnnnnnnnnnnnnnnnnnnnnnnnnnnnnnnnnnnnnnnnnnnnnnnnnnnnnnnnnnnnnnnnnnnnnnnnnnnnnnnnnnnnnnnnnnnnnnnnnnnnnnnnnnnnnnnnnnnnnnnnnnnnnnnnnnnnnnnnnnnnnnnnnnnnnnnnnnnnnnnnnnnnnnnnnnnnnnnnnnnnnnnnnnnnnnnnnnnnnnnnnnnnnnnnnnnnnnnnnnnnnnnnnnnnnnnnnnnnnnnnnnnnnnnnnnnnnnnnnnnnnnnnnnnnnnnnnnnnnnnnnnnnnnnnnnnnnnnnnnnnnnnnnnnnnnnnnnnnnnnnnnnnnnnnnnnnnnnnnnnnnnnnnnnnnnnnnnnnnnnnnnnnnnnnnnnnnnnnnnnnnnnnnnnnnnnnnnnnnnnnnnnnnnnnnnnnnnnnnnnnnnnnnnnnnnnnnnnnnnnnnnnnnnnnnnnnnnnnnnnnnnnnnnnnnnnnnnnnnnnnnnnnnnnnnnnnnnnnnnnnnnnnnnnnnnnnnnnnnnnnnnnnnnnnnnnnnnnnnnnnnnnnnnnnnnnnnnnnnnnnnnnnnnnnnnnnnnnnnnnnnnnnnnnnnnnnnnnnnnnnnnnnnnnnnnnnnnnnnnnnnnnnnnnnnnnnnnnnnnnnnnnnnnnnnnnnnnnnnnnnnnnnnnnnnnnnnnnnnnnnnnnnnnnnnnnnnnnnnnnnnnnnnnnnnnnnnnnnnnnnnnnnnnnnnnnnnnnnnnnnnnnnnnnnnnnnnnnnnnnnnnnnnnnnnnnnnnnnnnnnnnnnnnnnnnnnnnnnnnnnnnnnnnnnnnnnnnnnnnnnnnnnnnnnnnnnnnnnnnnnnnnnnnnnnnnnnnnnnnnnnnnnnnnnnnnnnnnnnnnnnnnnnnnnnnnnnnnnnnnnnnnnnnnnnnnnnnnnnnnnnnnnnnnnnnnnnnnnnnnnnnnnnnnnnnnnnnnnnnnnnnnnnnnnnnnnnnnnnnnnnnnnnnnnnnnnnnnnnnnnnnnnnnnnnnnnnnnnnnnnnnnnnnnnnnnnnnnnnnnnnnnnnnnnnnnnnnnnnnnnnnnnnnnnnnnnnnnnnnnnnnnnnnnnnnnnnnnnnnnnnnnnnnnnnnnnnnnnnnnnnnnnnnnnnnnnnnnnnnnnnnnnnnnnnnnnnnnnnnnnnnnnnnnnnnnnnnnnnnnnnnnnnnnnnnnnnnnnnnnnnnnnnnnnnnnnnnnnnnnnnnnnnnnnnnnnnnnnnnnnnnnnnnnnnnnnnnnnnnnnnnnnnnnnnnnnnnnnnnnnnnnnnnnnnnnnnnnnnnnnnnnnnnnnnnnnnnnnnnnnnnnnnnnnnnnnnnnnnnnnnnnnnnnnnnnnnnnnnnnnnnnnnnnnnnnnnnnnnnnnnnnnnnnnnnnnnnnnnnnnnnnnnnnnnnnnnnnnnnnnnnnnnnnnnnnnnnnnnnnnnnnnnnnnnnnnnnnnnnnnnnnnnnnnnnnnnnnnnnnnnnnnnnnnnnnnnnnnnnnnnnnnnnnnnnnnnnnnnnnnnnnnnnnnnnnnnnnnnnnnnnnnnnnnnnnnnnnnnnnnnnnnnnnnnnnnnnnnnnnnnnnnnnnnnnnnnnnnnnnnnnnnnnnnnnnnnnnnnnnnnnnnnnnnnnnnnnnnnnnnnnnnnnnnnnnnnnnnnnnnnnnnnnnnnnnnnnnnnnnnnnnnnnnnnnnnnnnnnnnnnnnnnnnnnnnnnnnnnnnnnnnnnnnnnnnnnnnnnnnnnnnnnnnnnnnnnnnnnnnnnnnnnnnnnnnnnnnnnnnnnnnnnnnnnnnnnnnnnnnnnnnnnnnnnnnnnnnnnnnnnnnnnnnnnnnnnnnnnnnnnnnnnnnnnnnnnnnnnnnnnnnnnnnnnnnnnnnnnnnnnnnnnnnnnnnnnnnnnnnnnnnnnnnnnnnnnnnnnnnnnnnnnnnnnnnnnnnnnnnnnnnnnnnnnnnnnnnnnnnnnnnnnnnnnnnnnnnnnnnnnnnnnnnnnnnnnnnnnnnnnnnnnnnnnnnnnnnnnnnnnnnnnnnnnnnnnnnnnnnnnnnnnnnnnnnnnnnnnnnnnnnnnnnnnnnnnnnnnnnnnnnnnnnnnnnnnnnnnnnnnnnnnnnnnnnnnnnnnnnnnnnnnnnnnnnnnnnnnnnnnnnnnnnnnnnnnnnnnnnnnnnnnnnnnnnnnnnnnnnnnnnnnnnnnnnnnnnnnnnnnnnnnnnnnnnnnnnnnnnnnnnnnnnnnnnnnnnnnnnnnnnnnnnnnnnnnnnnnnnnnnnnnnnnnnnnnnnnnnnnnnnnnnnnnnnnnnnnnnnnnnnnnnnnnnnnnnnnnnnnnnnnnnnnnnnnnnnnnnnnnnnnnnnnnnnnnnnnnnnnnnnnnnnnnnnnnnnnnnnnnnnnnnnnnnnnnnnnnnnnnnnnnnnnnnnnnnnnnnnnnnnnnnnnnnnnnnnnnnnnnnnnnnnnnnnnnnnnnnnnnnnnnnnnnnnnnnnnnnnnnnnnnnnnnnnnnnnnnnnnnnnnnnnnnnnnnnnnnnnnnnnnnnnnnnnnnnnnnnnnnnnnnnnnnnnnnnnnnnnnnnnnnnnnnnnnnnnnnnnnnnnnnnnnnnnnnnnnnnnnnnnnnnnnnnnnnnnnnnnnnnnnnnnnnnnnnnnnnnnnnnnnnnnnnnnnnnnnnnnnnnnnnnnnnnnnnnnnnnnnnnnnnnnnnnnnnnnnnnnnnnnnnnnnnnnnnnnnnnnnnnnnnnnnnnnnnnnnnnnnnnnnnnnnnnnnnnnnnnnnnnnnnnnnnnnnnnnnnnnnnnnnnnnnnnnnnnnnnnnnnnnnnnnnnnnnnnnnnnnnnnnnnnnnnnnnnnnnnnnnnnnnnnnnnnnnnnnnnnnnnnnnnnnnnnnnnnnnnnnnnnnnnnnnnnnnnnnnnnnnnnnnnnnnnnnnnnnnnnnnnnnnnnnnnnnnnnnnnnnnnnnnnnnnnnnnnnnnnnnnnnnnnnnnnnnnnnnnnnnnnnnnnnnnnnnnnnnnnnnnnnnnnnnnnnnnnnnnnnnnnnnnnnnnnnnnnnnnnnnnnnnnnnnnnnnnnnnnnnnnnnnnnnnnnnnnnnnnnnnnnnnnnnnnnnnnnnnnnnnnnnnnnnnnnnnnnnnnnnnnnnnnnnnnnnnnnnnnnnnnnnnnnnnnnnnnnnnnnnnnnnnnnnnnnnnnnnnnnnnnnnnnnnnnnnnnnnnnnnnnnnnnnnnnnnnnnnnnnnnnnnnnnnnnnnnnnnnnnnnnnnnnnnnnnnnnnnnnnnnnnnnnnnnnnnnnnnnnnnnnnnnnnnnnnnnnnnnnnnnnnnnnnnnnnnnnnnnnnnnnnnnnnnnnnnnnnnnnnnnnnnnnnnnnnnnnnnnnnnnnnnnnnnnnnnnnnnnnnnnnnnnnnnnnnnnnnnnnnnnnnnnnnnnnnnnnnnnnnnnnnnnnnnnnnnnnnnnnnnnnnnnnnnnnnnnnnnnnnnnnnnnnnnnnnnnnnnnnnnnnnnnnnnnnnnnnnnnnnnnnnnnnnnnnnnnnnnnnnnnnnnnnnnnnnnnnnnnnnnnnnnnnnnnnnnnnnnnnnnnnnnnnnnnnnnnnnnnnnnnnnnnnnnnnnnnnnnnnnnnnnnnnnnnnnnnnnnnnnnnnnnnnnnnnnnnnnnnnnnnnnnnnnnnnnnnnnnnnnnnnnnnnnnnnnnnnnnnnnnnnnnnnnnnnnnnnnnnnnnnnnnnnnnnnnnnnnnnnnnnnnnnnnnnnnnnnnnnnnnnnnnnnnnnnnnnnnnnnnnnnnnnnnnnnnnnnnnnnnnnnnnnnnnnnnnnnnnnnnnnnnnnnnnnnnnnnnnnnnnnnnnnnnnnnnnnnnnnnnnnnnnnnnnnnnnnnnnnnnnnnnnnnnnnnnnnnnnnnnnnnnnnnnnnnnnnnnnnnnnnnnnnnnnnnnnnnnnnnnnnnnnnnnnnnnnnnnnnnnnnnnnnnnnnnnnnnnnnnnnnnnnnnnnnnnnnnnnnnnnnnnnnnnnnnnnnnnnnnnnnnnnnnnnnnnnnnnnnnnnnnnnnnnnnnnnnnnnnnnnnnnnnnnnnnnnnnnnnnnnnnnnnnnnnnnnnnnnnnnnnnnnnnnnnnnnnnnnnnnnnnnnnnnnnnnnnnnnnnnnnnnnnnnnnnnnnnnnnnnnnnnnnnnnnnnnnnnnnnnnnnnnnnnnnnnnnnnnnnnnnnnnnnnnnnnnnnnnnnnnnnnnnnnnnnnnnnnnnnnnnnnnnnnnnnnnnnnnnnnnnnnnnnnnnnnnnnnnnnnnnnnnnnnnnnnnnnnnnnnnnnnnnnnnnnnnnnnnnnnnnnnnnnnnnnnnnnnnnnnnnnnnnnnnnnnnnnnnnnnnnnnnnnnnnnnnnnnnnnnnnnnnnnnnnnnnnnnnnnnnnnnnnnnnnnnnnnnnnnnnnnnnnnnnnnnnnnnnnnnnnnnnnnnnnnnnnnnnnnnnnnnnnnnnnnnnnnnnnnnnnnnnnnnnnnnnnnnnnnnnnnnnnnnnnnnnnnnnnnnnnnnnnnnnnnnnnnnnnnnnnnnnnnnnnnnnnnnnnnnnnnnnnnnnnnnnnnnnnnnnnnnnnnnnnnnnnnnnnnnnnnnnnnnnnnnnnnnnnnnnnnnnnnnnnnnnnnnnnnnnnnnnnnnnnnnnnnnnnnnnnnnnnnnnnnnnnnnnnnnnnnnnnnnnnnnnnnnnnnnnnnnnnnnnnnnnnnnnnnnnnnnnnnnnnnnnnnnnnnnnnnnnnnnnnnnnnnnnnnnnnnnnnnnnnnnnnnnnnnnnnnnnnnnnnnnnnnnnnnnnnnnnnnnnnnnnnnnnnnnnnnnnnnnnnnnnnnnnnnnnnnnnnnnnnnnnnnnnnnnnnnnnnnnnnnnnnnnnnnnnnnnnnnnnnnnnnnnnnnnnnnnnnnnnnnnnnnnnnnnnnnnnnnnnnnnnnnnnnnnnnnnnnnnnnnnnnnnnnnnnnnnnnnnnnnnnnnnnnnnnnnnnnnnnnnnnnnnnnnnnnnnnnnnnnnnnnnnnnnnnnnnnnnnnnnnnnnnnnnnnnnnnnnnnnnnnnnnnnnnnnnnnnnnnnnnnnnnnnnnnnnnnnnnnnnnnnnnnnnnnnnnnnnnnnnnnnnnnnnnnnnnnnnnnnnnnnnnnnnnnnnnnnnnnnnnnnnnnnnnnnnnnnnnnnnnnnnnnnnnnnnnnnnnnnnnnnnnnnnnnnnnnnnnnnnnnnnnnnnnnnnnnnnnnnnnnnnnnnnnnnnnnnnnnnnnnnnnnnnnnnnnnnnnnnnnnnnnnnnnnnnnnnnnnnnnnnnnnnnnnnnnnnnnnnnnnnnnnnnnnnnnnnnnnnnnnnnnnnnnnnnnnnnnnnnnnnnnnnnnnnnnnnnnnnnnnnnnnnnnnnnnnnnnnnnnnnnnnnnnnnnnnnnnnnnnnnnnnnnnnnnnnnnnnnnnnnnnnnnnnnnnnnnnnnnnnnnnnnnnnnnnnnnnnnnnnnnnnnnnnnnnnnnnnnnnnnnnnnnnnnnnnnnnnnnnnnnnnnnnnnnnnnnnnnnnnnnnnnnnnnnnnnnnnnnnnnnnnnnnnnnnnnnnnnnnnnnnnnnnnnnnnnnnnnnnnnnnnnnnnnnnnnnnnnnnnnnnnnnnnnnnnnnnnnnnnnnnnnnnnnnnnnnnnnnnnnnnnnnnnnnnnnnnnnnnnnnnnnnnnnnnnnnnnnnnnnnnnnnnnnnnnnnnnnnnnnnnnnnnnnnnnnnnnnnnnnnnnnnnnnnnnnnnnnnnnnnnnnnnnnnnnnnnnnnnnnnnnnnnnnnnnnnnnnnnnnnnnnnnnnnnnnnnnnnnnnnnnnnnnnnnnnnnnnnnnnnnnnnnnnnnnnnnnnnnnnnnnnnnnnnnnnnnnnnnnnnnnnnnnnnnnnnnnnnnnnnnnnnnnnnnnnnnnnnnnnnnnnnnnnnnnnnnnnnnnnnnnnnnnnnnnnnnnnnnnnnnnnnnnnnnnnnnnnnnnnnnnnnnnnnnnnnnnnnnnnnnnnnnnnnnnnnnnnnnnnnnnnnnnnnnnnnnnnnnnnnnnnnnnnnnnnnnnnnnnnnnnnnnnnnnnnnnnnnnnnnnnnnnnnnnnnnnnnnnnnnnnnnnnnnnnnnnnnnnnnnnnnnnnnnnnnnnnnnnnnnnnnnnnnnnnnnnnnnnnnnnnnnnnnnnnnnnnnnnnnnnnnnnnnnnnnnnnnnnnnnnnnnnnnnnnnnnnnnnnnnnnnnnnnnnnnnnnnnnnnnnnnnnnnnnnnnnnnnnnnnnnnnnnnnnnnnnnnnnnnnnnnnnnnnnnnnnnnnnnnnnnnnnnnnnnnnnnnnnnnnnnnnnnnnnnnnnnnnnnnnnnnnnnnnnnnnnnnnnnnnnnnnnnnnnnnnnnnnnnnnnnnnnnnnnnnnnnnnnnnnnnnnnnnnnnnnnnnnnnnnnnnnnnnnnnnnnnnnnnnnnnnnnnnnnnnnnnnnnnnnnnnnnnnnnnnnnnnnnnnnnnnnnnnnnnnnnnnnnnnnnnnnnnnnnnnnnnnnnnnnnnnnnnnnnnnnnnnnnnnnnnnnnnnnnnnnnnnnnnnnnnnnnnnnnnnnnnnnnnnnnnnnnnnnnnnnnnnnnnnnnnnnnnnnnnnnnnnnnnnnnnnnnnnnnnnnnnnnnnnnnnnnnnnnnnnnnnnnnnnnnnnnnnnnnnnnnnnnnnnnnnnnnnnnnnnnnnnnnnnnnnnnnnnnnnnnnnnnnnnnnnnnnnnnnnnnnnnnnnnnnnnnnnnnnnnnnnnnnnnnnnnnnnnnnnnnnnnnnnnnnnnnnnnnnnnnnnnnnnnnnnnnnnnnnnnnnnnnnnnnnnnnnnnnnnnnnnnnnnnnnnnnnnnnnnnnnnnnnnnnnnnnnnnnnnnnnnnnnnnnnnnnnnnnnnnnnnnnnnnnnnnnnnnnnnnnnnnnnnnnnnnnnnnnnnnnnnnnnnnnnnnnnnnnnnnnnnnnnnnnnnnnnnnnnnnnnnnnnnnnnnnnnnnnnnnnnnnnnnnnnnnnnnnnnnnnnnnnnnnnnnnnnnnnnnnnnnnnnnnnnnnnnnnnnnnnnnnnnnnnnnnnnnnnnnnnnnnnnnnnnnnnnnnnnnnnnnnnnnnnnnnnnnnnnnnnnnnnnnnnnnnnnnnnnnnnnnnnnnnnnnnnnnnnnnnnnnnnnnnnnnnnnnnnnnnnnnnnnnnnnnnnnnnnnnnnnnnnnnnnnnnnnnnnnnnnnnnnnnnnnnnnnnnnnnnnnnnnnnnnnnnnnnnnnnnnnnnnnnnnnnnnnnnnnnnnnnnnnnnnnnnnnnnnnnnnnnnnnnnnnnnnnnnnnnnnnnnnnnnnnnnnnnnnnnnnnnnnnnnnnnnnnnnnnnnnnnnnnnnnnnnnnnnnnnnnnnnnnnnnnnnnnnnnnnnnnnnnnnnnnnnnnnnnnnnnnnnnnnnnnnnnnnnnnnnnnnnnnnnnnnnnnnnnnnnnnnnnnnnnnnnnnnnnnnnnnnnnnnnnnnnnnnnnnnnnnnnnnnnnnnnnnnnnnnnnnnnnnnnnnnnnnnnnnnnnnnnnnnnnnnnnnnnnnnnnnnnnnnnnnnnnnnnnnnnnnnnnnnnnnnnnnnnnnnnnnnnnnnnnnnnnnnnnnnnnnnnnnnnnnnnnnnnnnnnnnnnnnnnnnnnnnnnnnnnnnnnnnnnnnnnnnnnnnnnnnnnnnnnnnnnnnnnnnnnnnnnnnnnnnnnnnnnnnnnnnnnnnnnnnnnnnnnnnnnnnnnnnnnnnnnnnnnnnnnnnnnnnnnnnnnnnnnnnnnnnnnnnnnnnnnnnnnnnnnnnnnnnnnnnnnnnnnnnnnnnnnnnnnnnnnnnnnnnnnnnnnnnnnnnnnnnnnnnnnnnnnnnnnnnnnnnnnnnnnnnnnnnnnnnnnnnnnnnnnnnnnnnnnnnnnnnnnnnnnnnnnnnnnnnnnnnnnnnnnnnnnnnnnnnnnnnnnnnnnnnnnnnnnnnnnnnnnnnnnnnnnnnnnnnnnnnnnnnnnnnnnnnnnnnnnnnnnnnnnnnnnnnnnnnnnnnnnnnnnnnnnnnnnnnnnnnnnnnnnnnnnnnnnnnnnnnnnnnnnnnnnnnnnnnnnnnnnnnnnnnnnnnnnnnnnnnnnnnnnnnnnnnnnnnnnnnnnnnnnnnnnnnnnnnnnnnnnnnnnnnnnnnnnnnnnnnnnnnnnnnnnnnnnnnnnnnnnnnnnnnnnnnnnnnnnnnnnnnnnnnnnnnnnnnnnnnnnnnnnnnnnnnnnnnnnnnnnnnnnnnnnnnnnnnnnnnnnnnnnnnnnnnnnnnnnnnnnnnnnnnnnnnnnnnnnnnnnnnnnnnnnnnnnnnnnnnnnnnnnnnnnnnnnnnnnnnnnnnnnnnnnnnnnnnnnnnnnnnnnnnnnnnnnnnnnnnnnnnnnnnnnnnnnnnnnnnnnnnnnnnnnnnnnnnnnnnnnnnnnnnnnnnnnnnnnnnnnnnnnnnnnnnnnnnnnnnnnnnnnnnnnnnnnnnnnnnnnnnnnnnnnnnnnnnnnnnnnnnnnnnnnnnnnnnnnnnnnnnnnnnnnnnnnnnnnnnnnnnnnnnnnnnnnnnnnnnnnnnnnnnnnnnnnnnnnnnnnnnnnnnnnnnnnnnnnnnnnnnnnnnnnnnnnnnnnnnnnnnnnnnnnnnnnnnnnnnnnnnnnnnnnnnnnnnnnnnnnnnnnnnnnnnnnnnnnnnnnnnnnnnnnnnnnnnnnnnnnnnnnnnnnnnnnnnnnnnnnnnnnnnnnnnnnnnnnnnnnnnnnnnnnnnnnnnnnnnnnnnnnnnnnnnnnnnnnnnnnnnnnnnnnnnnnnnnnnnnnnnnnnnnnnnnnnnnnnnnnnnnnnnnnnnnnnnnnnnnnnnnnnnnnnnnnnnnnnnnnnnnnnnnnnnnnnnnnnnnnnnnnnnnnnnnnnnnnnnnnnnnnnnnnnnnnnnnnnnnnnnnnnnnnnnnnnnnnnnnnnnnnnnnnnnnnnnnnnnnnnnnnnnnnnnnnnnnnnnnnnnnnnnnnnnnnnnnnnnnnnnnnnnnnnnnnnnnnnnnnnnnnnnnnnnnnnnnnnnnnnnnnnnnnnnnnnnnnnnnnnnnnnnnnnnnnnnnnnnnnnnnnnnnnnnnnnnnnnnnnnnnnnnnnnnnnnnnnnnnnnnnnnnnnnnnnnnnnnnnnnnnnnnnnnnnnnnnnnnnnnnnnnnnnnnnnnnnnnnnnnnnnnnnnnnnnnnnnnnnnnnnnnnnnnnnnnnnnnnnnnnnnnnnnnnnnnnnnnnnnnnnnnnnnnnnnnnnnnnnnnnnnnnnnnnnnnnnnnnnnnnnnnnnnnnnnnnnnnnnnnnnnnnnnnnnnnnnnnnnnnnnnnnnnnnnnnnnnnnnnnnnnnnnnnnnnnnnnnnnnnnnnnnnnnnnnnnnnnnnnnnnnnnnnnnnnnnnnnnnnnnnnnnnnnnnnnnnnnnnnnnnnnnnnnnnnnnnnnnnnnnnnnnnnnnnnnnnnnnnnnnnnnnnnnnnnnnnnnnnnnnnnnnnnnnnnnnnnnnnnnnnnnnnnnnnnnnnnnnnnnnnnnnnnnnnnnnnnnnnnnnnnnnnnnnnnnnnnnnnnnnnnnnnnnnnnnnnnnnnnnnnnnnnnnnnnnnnnnnnnnnnnnnnnnnnnnnnnnnnnnnnnnnnnnnnnnnnnnnnnnnnnnnnnnnnnnnnnnnnnnnnnnnnnnnnnnnnnnnnnnnnnnnnnnnnnnnnnnnnnnnnnnnnnnnnnnnnnnnnnnnnnnnnnnnnnnnnnnnnnnnnnnnnnnnnnnnnnnnnnnnnnnnnnnnnnnnnnnnnnnnnnnnnnnnnnnnnnnnnnnnnnnnnnnnnnnnnnnnnnnnnnnnnnnnnnnnnnnnnnnnnnnnnnnnnnnnnnnnnnnnnnnnnnnnnnnnnnnnnnnnnnnnnnnnnnnnnnnnnnnnnnnnnnnnnnnnnnnnnnnnnnnnnnnnnnnnnnnnnnnnnnnnnnnnnnnnnnnnnnnnnnnnnnnnnnnnnnnnnnnnnnnnnnnnnnnnnnnnnnnnnnnnnnnnnnnnnnnnnnnnnnnnnnnnnnnnnnnnnnnnnnnnnnnnnnnnnnnnnnnnnnnnnnnnnnnnnnnnnnnnnnnnnnnnnnnnnnnnnnnnnnnnnnnnnnnnnnnnnnnnnnnnnnnnnnnnnnnnnnnnnnnnnnnnnnnnnnnnnnnnnnnnnnnnnnnnnnnnnnnnnnnnnnnnnnnnnnnnnnnnnnnnnnnnnnnnnnnnnnnnnnnnnnnnnnnnnnnnnnnnnnnnnnnnnnnnnnnnnnnnnnnnnnnnnnnnnnnnnnnnnnnnnnnnnnnnnnnnnnnnnnnnnnnnnnnnnnnnnnnnnnnnnnnnnnnnnnnnnnnnnnnnnnnnnnnnnnnnnnnnnnnnnnnnnnnnnnnnnnnnnnnnnnnnnnnnnnnnnnnnnnnnnnnnnnnnnnnnnnnnnnnnnnnnnnnnnnnnnnnnnnnnnnnnnnnnnnnnnnnnnnnnnnnnnnnnnnnnnnnnnnnnnnnnnnnnnnnnnnnnnnnnnnnnnnnnnnnnnnnnnnnnnnnnnnnnnnnnnnnnnnnnnnnnnnnnnnnnnnnnnnnnnnnnnnnnnnnnnnnnnnnnnnnnnnnnnnnnnnnnnnnnnnnnnnnnnnnnnnnnnnnnnnnnnnnnnnnnnnnnnnnnnnnnnnnnnnnnnnnnnnnnnnnnnnnnnnnnnnnnnnnnnnnnnnnnnnnnnnnnnnnnnnnnnnnnnnnnnnnnnnnnnnnnnnnnnnnnnnnnnnnnnnnnnnnnnnnnnnnnnnnnnnnnnnnnnnnnnnnnnnnnnnnnnnnnnnnnnnnnnnnnnnnnnnnnnnnnnnnnnnnnnnnnnnnnnnnnnnnnnnnnnnnnnnnnnnnnnnnnnnnnnnnnnnnnnnnnnnnnnnnnnnnnnnnnnnnnnnnnnnnnnnnnnnnnnnnnnnnnnnnnnnnnnnnnnnnnnnnnnnnnnnnnnnnnnnnnnnnnnnnnnnnnnnnnnnnnnnnnnnnnnnnnnnnnnnnnnnnnnnnnnnnnnnnnnnnnnnnnnnnnnnnnnnnnnnnnnnnnnnnnnnnnnnnnnnnnnnnnnnnnnnnnnnnnnnnnnnnnnnnnnnnnnnnnnnnnnnnnnnnnnnnnnnnnnnnnnnnnnnnnnnnnnnnnnnnnnnnnnnnnnnnnnnnnnnnnnnnnnnnnnnnnnnnnnnnnnnnnnnnnnnnnnnnnnnnnnnnnnnnnnnnnnnnnnnnnnnnnnnnnnnnnnnnnnnnnnnnnnnnnnnnnnnnnnnnnnnnnnnnnnnnnnnnnnnnnnnnnnnnnnnnnnnnnnnnnnnnnnnnnnnnnnnnnnnnnnnnnnnnnnnnnnnnnnnnnnnnnnnnnnnnnnnnnnnnnnnnnnnnnnnnnnnnnnnnnnnnnnnnnnnnnnnnnnnnnnnnnnnnnnnnnnnnnnnnnnnnnnnnnnnnnnnnnnnnnnnnnnnnnnnnnnnnnnnnnnnnnnnnnnnnnnnnnnnnnnnnnnnnnnnnnnnnnnnnnnnnnnnnnnnnnnnnnnnnnnnnnnnnnnnnnnnnnnnnnnnnnnnnnnnnnnnnnnnnnnnnnnnnnnnnnnnnnnnnnnnnnnnnnnnnnnnnnnnnnnnnnnnnnnnnnnnnnnnnnnnnnnnnnnnnnnnnnnnnnnnnnnnnnnnnnnnnnnnnnnnnnnnnnnnnnnnnnnnnnnnnnnnnnnnnnnnnnnnnnnnnnnnnnnnnnnnnnnnnnnnnnnnnnnnnnnnnnnnnnnnnnnnnnnnnnnnnnnnnnnnnnnnnnnnnnnnnnnnnnnnnnnnnnnnnnnnnnnnnnnnnnnnnnnnnnnnnnnnnnnnnnnnnnnnnnnnnnnnnnnnnnnnnnnnnnnnnnnnnnnnnnnnnnnnnnnnnnnnnnnnnnnnnnnnnnnnnnnnnnnnnnnnnnnnnnnnnnnnnnnnnnnnnnnnnnnnnnnnnnnnnnnnnnnnnnnnnnnnnnnnnnnnnnnnnnnnnnnnnnnnnnnnnnnnnnnnnnnnnnnnnnnnnnnnnnnnnnnnnnnnnnnnnnnnnnnnnnnnnnnnnnnnnnnnnnnnnnnnnnnnnnnnnnnnnnnnnnnnnnnnnnnnnnnnnnnnnnnnnnnnnnnnnnnnnnnnnnnnnnnnnnnnnnnnnnnnnnnnnnnnnnnnnnnnnnnnnnnnnnnnnnnnnnnnnnnnnnnnnnnnnnnnnnnnnnnnnnnnnnnnnnnnnnnnnnnnnnnnnnnnnnnnnnnnnnnnnnnnnnnnnnnnnnnnnnnnnnnnnnnnnnnnnnnnnnnnnnnnnnnnnnnnnnnnnnnnnnnnnnnnnnnnnnnnnnnnnnnnnnnnnnnnnnnnnnnnnnnnnnnnnnnnnnnnnnnnnnnnnnnnnnnnnnnnnnnnnnnnnnnnnnnnnnnnnnnnnnnnnnnnnnnnnnnnnnnnnnnnnnnnnnnnnnnnnnnnnnnnnnnnnnnnnnnnnnnnnnnnnnnnnnnnnnnnnnnnnnnnnnnnnnnnnnnnnnnnnnnnnnnnnnnnnnnnnnnnnnnnnnnnnnnnnnnnnnnnnnnnnnnnnnnnnnnnnnnnnnnnnnnnnnnnnnnnnnnnnnnnnnnnnnnnnnnnnnnnnnnnnnnnnnnnnnnnnnnnnnnnnnnnnnnnnnnnnnnnnnnnnnnnnnnnnnnnnnnnnnnnnnnnnnnnnnnnnnnnnnnnnnnnnnnnnnnnnnnnnnnnnnnnnnnnnnnnnnnnnnnnnnnnnnnnnnnnnnnnnnnnnnnnnnnnnnnnnnnnnnnnnnnnnnnnnnnnnnnnnnnnnnnnnnnnnnnnnnnnnnnnnnnnnnnnnnnnnnnnnnnnnnnnnnnnnnnnnnnnnnnnnnnnnnnnnnnnnnnnnnnnnnnnnnnnnnnnnnnnnnnnnnnnnnnnnnnnnnnnnnnnnnnnnnnnnnnnnnnnnnnnnnnnnnnnnnnnnnnnnnnnnnnnnnnnnnnnnnnnnnnnnnnnnnnnnnnnnnnnnnnnnnnnnnnnnnnnnnnnnnnnnnnnnnnnnnnnnnnnnnnnnnnnnnnnnnnnnnnnnnnnnnnnnnnnnnnnnnnnnnnnnnnnnnnnnnnnnnnnnnnnnnnnnnnnnnnnnnnnnnnnnnnnnnnnnnnnnnnnnnnnnnnnnnnnnnnnnnnnnnnnnnnnnnnnnnnnnnnnnnnnnnnnnnnnnnnnnnnnnnnnnnnnnnnnnnnnnnnnnnnnnnnnnnnnnnnnnnnnnnnnnnnnnnnnnnnnnnnnnnnnnnnnnnnnnnnnnnnnnnnnnnnnnnnnnnnnnnnnnnnnnnnnnnnnnnnnnnnnnnnnnnnnnnnnnnnnnnnnnnnnnnnnnnnnnnnnnnnnnnnnnnnnnnnnnnnnnnnnnnnnnnnnnnnnnnnnnnnnnnnnnnnnnnnnnnnnnnnnnnnnnnnnnnnnnnnnnnnnnnnnnnnnnnnnnnnnnnnnnnnnnnnnnnnnnnnnnnnnnnnnnnnnnnnnnnnnnnnnnnnnnnnnnnnnnnnnnnnnnnnnnnnnnnnnnnnnnnnnnnnnnnnnnnnnnnnnnnnnnnnnnnnnnnnnnnnnnnnnnnnnnnnnnnnnnnnnnnnnnnnnnnnnnnnnnnnnnnnnnnnnnnnnnnnnnnnnnnnnnnnnnnnnnnnnnnnnnnnnnnnnnnnnnnnnnnnnnnnnnnnnnnnnnnnnnnnnnnnnnnnnnnnnnnnnnnnnnnnnnnnnnnnnnnnnnnnnnnnnnnnnnnnnnnnnnnnnnnnnnnnnnnnnnnnnnnnnnnnnnnnnnnnnnnnnnnnnnnnnnnnnnnnnnnnnnnnnnnnnnnnnnnnnnnnnnnnnnnnnnnnnnnnnnnnnnnnnnnnnnnnnnnnnnnnnnnnnnnnnnnnnnnnnnnnnnnnnnnnnnnnnnnnnnnnnnnnnnnnnnnnnnnnnnnnnnnnnnnnnnnnnnnnnnnnnnnnnnnnnnnnnnnnnnnnnnnnnnnnnnnnnnnnnnnnnnnnnnnnnnnnnnnnnnnnnnnnnnnnnnnnnnnnnnnnnnnnnnnnnnnnnnnnnnnnnnnnnnnnnnnnnnnnnnnnnnnnnnnnnnnnnnnnnnnnnnnnnnnnnnnnnnnnnnnnnnnnnnnnnnnnnnnnnnnnnnnnnnnnnnnnnnnnnnnnnnnnnnnnnnnnnnnnnnnnnnnnnnnnnnnnnnnnnnnnnnnnnnnnnnnnnnnnnnnnnnnnnnnnnnnnnnnnnnnnnnnnnnnnnnnnnnnnnnnnnnnnnnnnnnnnnnnnnnnnnnnnnnnnnnnnnnnnnnnnnnnnnnnnnnnnnnnnnnnnnnnnnnnnnnnnnnnnnnnnnnnnnnnnnnnnnnnnnnnnnnnnnnnnnnnnnnnnnnnnnnnnnnnnnnnnnnnnnnnnnnnnnnnnnnnnnnnnnnnnnnnnnnnnnnnnnnnnnnnnnnnnnnnnnnnnnnnnnnnnnnnnnnnnnnnnnnnnnnnnnnnnnnnnnnnnnnnnnnnnnnnnnnnnnnnnnnnnnnnnnnnnnnnnnnnnnnnnnnnnnnnnnnnnnnnnnnnnnnnnnnnnnnnnnnnnnnnnnnnnnnnnnnnnnnnnnnnnnnnnnnnnnnnnnnnnnnnnnnnnnnnnnnnnnnnnnnnnnnnnnnnnnnnnnnnnnnnnnnnnnnnnnnnnnnnnnnnnnnnnnnnnnnnnnnnnnnnnnnnnnnnnnnnnnnnnnnnnnnnnnnnnnnnnnnnnnnnnnnnnnnnnnnnnnnnnnnnnnnnnnnnnnnnnnnnnnnnnnnnnnnnnnnnnnnnnnnnnnnnnnnnnnnnnnnnnnnnnnnnnnnnnnnnnnnnnnnnnnnnnnnnnnnnnnnnnnnnnnnnnnnnnnnnnnnnnnnnnnnnnnnnnnnnnnnnnnnnnnnnnnnnnnnnnnnnnnnnnnnnnnnnnnnnnnnnnnnnnnnnnnnnnnnnnnnnnnnnnnnnnnnnnnnnnnnnnnnnnnnnnnnnnnnnnnnnnnnnnnnnnnnnnnnnnnnnnnnnnnnnnnnnnnnnnnnnnnnnnnnnnnnnnnnnnnnnnnnnnnnnnnnnnnnnnnnnnnnnnnnnnnnnnnnnnnnnnnnnnnnnnnnnnnnnnnnnnnnnnnnnnnnnnnnnnnnnnnnnnnnnnnnnnnnnnnnnnnnnnnnnnnnnnnnnnnnnnnnnnnnnnnnnnnnnnnnnnnnnnnnnnnnnnnnnnnnnnnnnnnnnnnnnnnnnnnnnnnnnnnnnnnnnnnnnnnnnnnnnnnnnnnnnnnnnnnnnnnnnnnnnnnnnnnnnnnnnnnnnnnnnnnnnnnnnnnnnnnnnnnnnnnnnnnnnnnnnnnnnnnnnnnnnnnnnnnnnnnnnnnnnnnnnnnnnnnnnnnnnnnnnnnnnnnnnnnnnnnnnnnnnnnnnnnnnnnnnnnnnnnnnnnnnnnnnnnnnnnnnnnnnnnnnnnnnnnnnnnnnnnnnnnnnnnnnnnnnnnnnnnnnnnnnnnnnnnnnnnnnnnnnnnnnnnnnnnnnnnnnnnnnnnnnnnnnnnnnnnnnnnnnnnnnnnnnnnnnnnnnnnnnnnnnnnnnnnnnnnnnnnnnnnnnnnnnnnnnnnnnnnnnnnnnnnnnnnnnnnnnnnnnnnnnnnnnnnnnnnnnnnnnnnnnnnnnnnnnnnnnnnnnnnnnnnnnnnnnnnnnnnnnnnnnnnnnnnnnnnnnnnnnnnnnnnnnnnnnnnnnnnnnnnnnnnnnnnnnnnnnnnnnnnnnnnnnnnnnnnnnnnnnnnnnnnnnnnnnnnnnnnnnnnnnnnnnnnnnnnnnnnnnnnnnnnnnnnnnnnnnnnnnnnnnnnnnnnnnnnnnnnnnnnnnnnnnnnnnnnnnnnnnnnnnnnnnnnnnnnnnnnnnnnnnnnnnnnnnnnnnnnnnnnnnnnnnnnnnnnnnnnnnnnnnnnnnnnnnnnnnnnnnnnnnnnnnnnnnnnnnnnnnnnnnnnnnnnnnnnnnnnnnnnnnnnnnnnnnnnnnnnnnnnnnnnnnnnnnnnnnnnnnnnnnnnnnnnnnnnnnnnnnnnnnnnnnnnnnnnnnnnnnnnnnnnnnnnnnnnnnnnnnnnnnnnnnnnnnnnnnnnnnnnnnnnnnnnnnnnnnnnnnnnnnnnnnnnnnnnnnnnnnnnnnnnnnnnnnnnnnnnnnnnnnnnnnnnnnnnnnnnnnnnnnnnnnnnnnnnnnnnnnnnnnnnnnnnnnnnnnnnnnnnnnnnnnnnnnnnnnnnnnnnnnnnnnnnnnnnnnnnnnnnnnnnnnnnnnnnnnnnnnnnnnnnnnnnnnnnnnnnnnnnnnnnnnnnnnnnnnnnnnnnnnnnnnnnnnnnnnnnnnnnnnnnnnnnnnnnnnnnnnnnnnnnnnnnnnnnnnnnnnnnnnnnnnnnnnnnnnnnnnnnnnnnnnnnnnnnnnnnnnnnnnnnnnnnnnnnnnnnnnnnnnnnnnnnnnnnnnnnnnnnnnnnnnnnnnnnnnnnnnnnnnnnnnnnnnnnnnnnnnnnnnnnnnnnnnnnnnnnnnnnnnnnnnnnnnnnnnnnnnnnnnnnnnnnnnnnnnnnnnnnnnnnnnnnnnnnnnnnnnnnnnnnnnnnnnnnnnnnnnnnnnnnnnnnnnnnnnnnnnnnnnnnnnnnnnnnnnnnnnnnnnnnnnnnnnnnnnnnnnnnnnnnnnnnnnnnnnnnnnnnnnnnnnnnnnnnnnnnnnnnnnnnnnnnnnnnnnnnnnnnnnnnnnnnnnnnnnnnnnnnnnnnnnnnnnnnnnnnnnnnnnnnnnnnnnnnnnnnnnnnnnnnnnnnnnnnnnnnnnnnnnnnnnnnnnnnnnnnnnnnnnnnnnnnnnnnnnnnnnnnnnnnnnnnnnnnnnnnnnnnnnnnnnnnnnnnnnnnnnnnnnnnnnnnnnnnnnnnnnnnnnnnnnnnnnnnnnnnnnnnnnnnnnnnnnnnnnnnnnnnnnnnnnnnnnnnnnnnnnnnnnnnnnnnnnnnnnnnnnnnnnnnnnnnnnnnnnnnnnnnnnnnnnnnnnnnnnnnnnnnnnnnnnnnnnnnnnnnnnnnnnnnnnnnnnnnnnnnnnnnnnnnnnnnnnnnnnnnnnnnnnnnnnnnnnnnnnnnnnnnnnnnnnnnnnnnnnnnnnnnnnnnnnnnnnnnnnnnnnnnnnnnnnnnnnnnnnnnnnnnnnnnnnnnnnnnnnnnnnnnnnnnnnnnnnnnnnnnnnnnnnnnnnnnnnnnnnnnnnnnnnnnnnnnnnnnnnnnnnnnnnnnnnnnnnnnnnnnnnnnnnnnnnnnnnnnnnnnnnnnnnnnnnnnnnnnnnnnnnnnnnnnnnnnnnnnnnnnnnnnnnnnnnnnnnnnnnnnnnnnnnnnnnnnnnnnnnnnnnnnnnnnnnnnnnnnnnnnnnnnnnnnnnnnnnnnnnnnnnnnnnnnnnnnnnnnnnnnnnnnnnnnnnnnnnnnnnnnnnnnnnnnnnnnnnnnnnnnnnnnnnnnnnnnnnnnnnnnnnnnnnnnnnnnnnnnnnnnnnnnnnnnnnnnnnnnnnnnnnnnnnnnnnnnnnnnnnnnnnnnnnnnnnnnnnnnnnnnnnnnnnnnnnnnnnnnnnnnnnnnnnnnnnnnnnnnnnnnnnnnnnnnnnnnnnnnnnnnnnnnnnnnnnnnnnnnnnnnnnnnnnnnnnnnnnnnnnnnnnnnnnnnnnnnnnnnnnnnnnnnnnnnnnnnnnnnnnnnnnnnnnnnnnnnnnnnnnnnnnnnnnnnnnnnnnnnnnnnnnnnnnnnnnnnnnnnnnnnnnnnnnnnnnnnnnnnnnnnnnnnnnnnnnnnnnnnnnnnnnnnnnnnnnnnnnnnnnnnnnnnnnnnnnnnnnnnnnnnnnnnnnnnnnnnnnnnnnnnnnnnnnnnnnnnnnnnnnnnnnnnnnnnnnnnnnnnnnnnnnnnnnnnnnnnnnnnnnnnnnnnnnnnnnnnnnnnnnnnnnnnnnnnnnnnnnnnnnnnnnnnnnnnnnnnnnnnnnnnnnnnnnnnnnnnnnnnnnnnnnnnnnnnnnnnnnnnnnnnnnnnnnnnnnnnnnnnnnnnnnnnnnnnnnnnnnnnnnnnnnnnnnnnnnnnnnnnnnnnnnnnnnnnnnnnnnnnnnnnnnnnnnnnnnnnnnnnnnnnnnnnnnnnnnnnnnnnnnnnnnnnnnnnnnnnnnnnnnnnnnnnnnnnnnnnnnnnnnnnnnnnnnnnnnnnnnnnnnnnnnnnnnnnnnnnnnnnnnnnnnnnnnnnnnnnnnnnnnnnnnnnnnnnnnnnnnnnnnnnnnnnnnnnnnnnnnnnnnnnnnnnnnnnnnnnnnnnnnnnnnnnnnnnnnnnnnnnnnnnnnnnnnnnnnnnnnnnnnnnnnnnnnnnnnnnnnnnnnnnnnnnnnnnnnnnnnnnnnnnnnnnnnnnnnnnnnnnnnnnnnnnnnnnnnnnnnnnnnnnnnnnnnnnnnnnnnnnnnnnnnnnnnnnnnnnnnnnnnnnnnnnnnnnnnnnnnnnnnnnnnnnnnnnnnnnnnnnnnnnnnnnnnnnnnnnnnnnnnnnnnnnnnnnnnnnnnnnnnnnnnnnnnnnnnnnnnnnnnnnnnnnnnnnnnnnnnnnnnnnnnnnnnnnnnnnnnnnnnnnnnnnnnnnnnnnnnnnnnnnnnnnnnnnnnnnnnnnnnnnnnnnnnnnnnnnnnnnnnnnnnnnnnnnnnnnnnnnnnnnnnnnnnnnnnnnnnnnnnnnnnnnnnnnnnnnnnnnnnnnnnnnnnnnnnnnnnnnnnnnnnnnnnnnnnnnnnnnnnnnnnnnnnnnnnnnnnnnnnnnnnnnnnnnnnnnnnnnnnnnnnnnnnnnnnnnnnnnnnnnnnnnnnnnnnnnnnnnnnnnnnnnnnnnnnnnnnnnnnnnnnnnnnnnnnnnnnnnnnnnnnnnnnnnnnnnnnnnnnnnnnnnnnnnnnnnnnnnnnnnnnnnnnnnnnnnnnnnnnnnnnnnnnnnnnnnnnnnnnnnnnnnnnnnnnnnnnnnnnnnnnnnnnnnnnnnnnnnnnnnnnnnnnnnnnnnnnnnnnnnnnnnnnnnnnnnnnnnnnnnnnnnnnnnnnnnnnnnnnnnnnnnnnnnnnnnnnnnnnnnnnnnnnnnnnnnnnnnnnnnnnnnnnnnnnnnnnnnnnnnnnnnnnnnnnnnnnnnnnnnnnnnnnnnnnnnnnnnnnnnnnnnnnnnnnnnnnnnnnnnnnnnnnnnnnnnnnnnnnnnnnnnnnnnnnnnnnnnnnnnnnnnnnnnnnnnnnnnnnnnnnnnnnnnnnnnnnnnnnnnnnnnnnnnnnnnnnnnnnnnnnnnnnnnnnnnnnnnnnnnnnnnnnnnnnnnnnnnnnnnnnnnnnnnnnnnnnnnnnnnnnnnnnnnnnnnnnnnnnnnnnnnnnnnnnnnnnnnnnnnnnnnnnnnnnnnnnnnnnnnnnnnnnnnnnnnnnnnnnnnnnnnnnnnnnnnnnnnnnnnnnnnnnnnnnnnnnnnnnnnnnnnnnnnnnnnnnnnnnnnnnnnnnnnnnnnnnnnnnnnnnnnnnnnnnnnnnnnnnnnnnnnnnnnnnnnnnnnnnnnnnnnnnnnnnnnnnnnnnnnnnnnnnnnnnnnnnnnnnnnnnnnnnnnnnnnnnnnnnnnnnnnnnnnnnnnnnnnnnnnnnnnnnnnnnnnnnnnnnnnnnnnnnnnnnnnnnnnnnnnnnnnnnnnnnnnnnnnnnnnnnnnnnnnnnnnnnnnnnnnnnnnnnnnnnnnnnnnnnnnnnnnnnnnnnnnnnnnnnnnnnnnnnnnnnnnnnnnnnnnnnnnnnnnnnnnnnnnnnnnnnnnnnnnnnnnnnnnnnnnnnnnnnnnnnnnnnnnnnnnnnnnnnnnnnnnnnnnnnnnnnnnnnnnnnnnnnnnnnnnnnnnnnnnnnnnnnnnnnnnnnnnnnnnnnnnnnnnnnnnnnnnnnnnnnnnnnnnnnnnnnnnnnnnnnnnnnnnnnnnnnnnnnnnnnnnnnnnnnnnnnnnnnnnnnnnnnnnnnnnnnnnnnnnnnnnnnnnnnnnnnnnnnnnnnnnnnnnnnnnnnnnnnnnnnnnnnnnnnnnnnnnnnnnnnnnnnnnnnnnnnnnnnnnnnnnnnnnnnnnnnnnnnnnnnnnnnnnnnnnnnnnnnnnnnnnnnnnnnnnnnnnnnnnnnnnnnnnnnnnnnnnnnnnnnnnnnnnnnnnnnnnnnnnnnnnnnnnnnnnnnnnnnnnnnnnnnnnnnnnnnnnnnnnnnnnnnnnnnnnnnnnnnnnnnnnnnnnnnnnnnnnnnnnnnnnnnnnnnnnnnnnnnnnnnnnnnnnnnnnnnnnnnnnnnnnnnnnnnnnnnnnnnnnnnnnnnnnnnnnnnnnnnnnnnnnnnnnnnnnnnnnnnnnnnnnnnnnnnnnnnnnnnnnnnnnnnnnnnnnnnnnnnnnnnnnnnnnnnnnnnnnnnnnnnnnnnnnnnnnnnnnnnnnnnnnnnnnnnnnnnnnnnnnnnnnnnnnnnnnnnnnnnnnnnnnnnnnnnnnnnnnnnnnnnnnnnnnnnnnnnnnnnnnnnnnnnnnnnnnnnnnnnnnnnnnnnnnnnnnnnnnnnnnnnnnnnnnnnnnnnnnnnnnnnnnnnnnnnnnnnnnnnnnnnnnnnnnnnnnnnnnnnnnnnnnnnnnnnnnnnnnnnnnnnnnnnnnnnnnnnnnnnnnnnnnnnnnnnnnnnnnnnnnnnnnnnnnnnnnnnnnnnnnnnnnnnnnnnnnnnnnnnnnnnnnnnnnnnnnnnnnnnnnnnnnnnnnnnnnnnnnnnnnnnnnnnnnnnnnnnnnnnnnnnnnnnnnnnnnnnnnnnnnnnnnnnnnnnnnnnnnnnnnnnnnnnnnnnnnnnnnnnnnnnnnnnnnnnnnnnnnnnnnnnnnnnnnnnnnnnnnnnnnnnnnnnnnnnnnnnnnnnnnnnnnnnnnnnnnnnnnnnnnnnnnnnnnnnnnnnnnnnnnnnnnnnnnnnnnnnnnnnnnnnnnnnnnnnnnnnnnnnnnnnnnnnnnnnnnnnnnnnnnnnnnnnnnnnnnnnnnnnnnnnnnnnnnnnnnnnnnnnnnnnnnnnnnnnnnnnnnnnnnnnnnnnnnnnnnnnnnnnnnnnnnnnnnnnnnnnnnnnnnnnnnnnnnnnnnnnnnnnnnnnnnnnnnnnnnnnnnnnnnnnnnnnnnnnnnnnnnnnnnnnnnnnnnnnnnnnnnnnnnnnnnnnnnnnnnnnnnnnnnnnnnnnnnnnnnnnnnnnnnnnnnnnnnnnnnnnnnnnnnnnnnnnnnnnnnnnnnnnnnnnnnnnnnnnnnnnnnnnnnnnnnnnnnnnnnnnnnnnnnnnnnnnnnnnnnnnnnnnnnnnnnnnnnnnnnnnnnnnnnnnnnnnnnnnnnnnnnnnnnnnnnnnnnnnnnnnnnnnnnnnnnnnnnnnnnnnnnnnnnnnnnnnnnnnnnnnnnnnnnnnnnnnnnnnnnnnnnnnnnnnnnnnnnnnnnnnnnnnnnnnnnnnnnnnnnnnnnnnnnnnnnnnnnnnnnnnnnnnnnnnnnnnnnnnnnnnnnnnnnnnnnnnnnnnnnnnnnnnnnnnnnnnnnnnnnnnnnnnnnnnnnnnnnnnnnnnnnnnnnnnnnnnnnnnnnnnnnnnnnnnnnnnnnnnnnnnnnnnnnnnnnnnnnnnnnnnnnnnnnnnnnnnnnnnnnnnnnnnnnnnnnnnnnnnnnnnnnnnnnnnnnnnnnnnnnnnnnnnnnnnnnnnnnnnnnnnnnnnnnnnnnnnnnnnnnnnnnnnnnnnnnnnnnnnnnnnnnnnnnnnnnnnnnnnnnnnnnnnnnnnnnnnnnnnnnnnnnnnnnnnnnnnnnnnnnnnnnnnnnnnnnnnnnnnnnnnnnnnnnnnnnnnnnnnnnnnnnnnnnnnnnnnnnnnnnnnnnnnnnnnnnnnnnnnnnnnnnnnnnnnnnnnnnnnnnnnnnnnnnnnnnnnnnnnnnnnnnnnnnnnnnnnnnnnnnnnnnnnnnnnnnnnnnnnnnnnnnnnnnnnnnnnnnnnnnnnnnnnnnnnnnnnnnnnnnnnnnnnnnnnnnnnnnnnnnnnnnnnnnnnnnnnnnnnnnnnnnnnnnnnnnnnnnnnnnnnnnnnnnnnnnnnnnnnnnnnnnnnnnnnnnnnnnnnnnnnnnnnnnnnnnnnnnnnnnnnnnnnnnnnnnnnnnnnnnnnnnnnnnnnnnnnnnnnnnnnnnnnnnnnnnnnnnnnnnnnnnnnnnnnnnnnnnnnnnnnnnnnnnnnnnnnnnnnnnnnnnnnnnnnnnnnnnnnnnnnnnnnnnnnnnnnnnnnnnnnnnnnnnnnnnnnnnnnnnnnnnnnnnnnnnnnnnnnnnnnnnnnnnnnnnnnnnnnnnnnnnnnnnnnnnnnnnnnnnnnnnnnnnnnnnnnnnnnnnnnnnnnnnnnnnnnnnnnnnnnnnnnnnnnnnnnnnnnnnnnnnnnnnnnnnnnnnnnnnnnnnnnnnnnnnnnnnnnnnnnnnnnnnnnnnnnnnnnnnnnnnnnnnnnnnnnnnnnnnnnnnnnnnnnnnnnnnnnnnnnnnnnnnnnnnnnnnnnnnnnnnnnnnnnnnnnnnnnnnnnnnnnnnnnnnnnnnnnnnnnnnnnnnnnnnnnnnnnnnnnnnnnnnnnnnnnnnnnnnnnnnnnnnnnnnnnnnnnnnnnnnnnnnnnnnnnnnnnnnnnnnnnnnnnnnnnnnnnnnnnnnnnnnnnnnnnnnnnnnnnnnnnnnnnnnnnnnnnnnnnnnnnnnnnnnnnnnnnnnnnnnnnnnnnnnnnnnnnnnnnnnnnnnnnnnnnnnnnnnnnnnnnnnnnnnnnnnnnnnnnnnnnnnnnnnnnnnnnnnnnnnnnnnnnnnnnnnnnnnnnnnnnnnnnnnnnnnnnnnnnnnnnnnnnnnnnnnnnnnnnnnnnnnnnnnnnnnnnnnnnnnnnnnnnnnnnnnnnnnnnnnnnnnnnnnnnnnnnnnnnnnnnnnnnnnnnnnnnnnnnnnnnnnnnnnnnnnnnnnnnnnnnnnnnnnnnnnnnnnnnnnnnnnnnnnnnnnnnnnnnnnnnnnnnnnnnnnnnnnnnnnnnnnnnnnnnnnnnnnnnnnnnnnnnnnnnnnnnnnnnnnnnnnnnnnnnnnnnnnnnnnnnnnnnnnnnnnnnnnnnnnnnnnnnnnnnnnnnnnnnnnnnnnnnnnnnnnnnnnnnnnnnnnnnnnnnnnnnnnnnnnnnnnnnnnnnnnnnnnnnnnnnnnnnnnnnnnnnnnnnnnnnnnnnnnnnnnnnnnnnnnnnnnnnnnnnnnnnnnnnnnnnnnnnnnnnnnnnnnnnnnnnnnnnnnnnnnnnnnnnnnnnnnnnnnnnnnnnnnnnnnnnnnnnnnnnnnnnnnnnnnnnnnnnnnnnnnnnnnnnnnnnnnnnnnnnnnnnnnnnnnnnnnnnnnnnnnnnnnnnnnnnnnnnnnnnnnnnnnnnnnnnnnnnnnnnnnnnnnnnnnnnnnnnnnnnnnnnnnnnnnnnnnnnnnnnnnnnnnnnnnnnnnnnnnnnnnnnnnnnnnnnnnnnnnnnnnnnnnnnnnnnnnnnnnnnnnnnnnnnnnnnnnnnnnnnnnnnnnnnnnnnnnnnnnnnnnnnnnnnnnnnnnnnnnnnnnnnnnnnnnnnnnnnnnnnnnnnnnnnnnnnnnnnnnnnnnnnnnnnnnnnnnnnnnnnnnnnnnnnnnnnnnnnnnnnnnnnnnnnnnnnnnnnnnnnnnnnnnnnnnnnnnnnnnnnnnnnnnnnnnnnnnnnnnnnnnnnnnnnnnnnnnnnnnnnnnnnnnnnnnnnnnnnnnnnnnnnnnnnnnnnnnnnnnnnnnnnnnnnnnnnnnnnnnnnnnnnnnnnnnnnnnnnnnnnnnnnnnnnnnnnnnnnnnnnnnnnnnnnnnnnnnnnnnnnnnnnnnnnnnnnnnnnnnnnnnnnnnnnnnnnnnnnnnnnnnnnnnnnnnnnnnnnnnnnnnnnnnnnnnnnnnnnnnnnnnnnnnnnnnnnnnnnnnnnnnnnnnnnnnnnnnnnnnnnnnnnnnnnnnnnnnnnnnnnnnnnnnnnnnnnnnnnnnnnnnnnnnnnnnnnnnnnnnnnnnnnnnnnnnnnnnnnnnnnnnnnnnnnnnnnnnnnnnnnnnnnnnnnnnnnnnnnnnnnnnnnnnnnnnnnnnnnnnnnnnnnnnnnnnnnnnnnnnnnnnnnnnnnnnnnnnnnnnnnnnnnnnnnnnnnnnnnnnnnnnnnnnnnnnnnnnnnnnnnnnnnnnnnnnnnnnnnnnnnnnnnnnnnnnnnnnnnnnnnnnnnnnnnnnnnnnnnnnnnnnnnnnnnnnnnnnnnnnnnnnnnnnnnnnnnnnnnnnnnnnnnnnnnnnnnnnnnnnnnnnnnnnnnnnnnnnnnnnnnnnnnnnnnnnnnnnnnnnnnnnnnnnnnnnnnnnnnnnnnnnnnnnnnnnnnnnnnnnnnnnnnnnnnnnnnnnnnnnnnnnnnnnnnnnnnnnnnnnnnnnnnnnnnnnnnnnnnnnnnnnnnnnnnnnnnnnnnnnnnnnnnnnnnnnnnnnnnnnnnnnnnnnnnnnnnnnnnnnnnnnnnnnnnnnnnnnnnnnnnnnnnnnnnnnnnnnnnnnnnnnnnnnnnnnnnnnnnnnnnnnnnnnnnnnnnnnnnnnnnnnnnnnnnnnnnnnnnnnnnnnnnnnnnnnnnnnnnnnnnnnnnnnnnnnnnnnnnnnnnnnnnnnnnnnnnnnnnnnnnnnnnnnnnnnnnnnnnnnnnnnnnnnnnnnnnnnnnnnnnnnnnnnnnnnnnnnnnnnnnnnnnnnnnnnnnnnnnnnnnnnnnnnnnnnnnnnnnnnnnnnnnnnnnnnnnnnnnnnnnnnnnnnnnnnnnnnnnnnnnnnnnnnnnnnnnnnnnnnnnnnnnnnnnnnnnnnnnnnnnnnnnnnnnnnnnnnnnnnnnnnnnnnnnnnnnnnnnnnnnnnnnnnnnnnnnnnnnnnnnnnnnnnnnnnnnnnnnnnnnnnnnnnnnnnnnnnnnnnnnnnnnnnnnnnnnnnnnnnnnnnnnnnnnnnnnnnnnnnnnnnnnnnnnnnnnnnnnnnnnnnnnnnnnnnnnnnnnnnnnnnnnnnnnnnnnnnnnnnnnnnnnnnnnnnnnnnnnnnnnnnnnnnnnnnnnnnnnnnnnnnnnnnnnnnnnnnnnnnnnnnnnnnnnnnnnnnnnnnnnnnnnnnnnnnnnnnnnnnnnnnnnnnnnnnnnnnnnnnnnnnnnnnnnnnnnnnnnnnnnnnnnnnnnnnnnnnnnnnnnnnnnnnnnnnnnnnnnnnnnnnnnnnnnnnnnnnnnnnnnnnnnnnnnnnnnnnnnnnnnnnnnnnnnnnnnnnnnnnnnnnnnnnnnnnnnnnnnnnnnnnnnnnnnnnnnnnnnnnnnnnnnnnnnnnnnnnnnnnnnnnnnnnnnnnnnnnnnnnnnnnnnnnnnnnnnnnnnnnnnnnnnnnnnnnnnnnnnnnnnnnnnnnnnnnnnnnnnnnnnnnnnnnnnnnnnnnnnnnnnnnnnnnnnnnnnnnnnnnnnnnnnnnnnnnnnnnnnnnnnnnnnnnnnnnnnnnnnnnnnnnnnnnnnnnnnnnnnnnnnnnnnnnnnnnnnnnnnnnnnnnnnnnnnnnnnnnnnnnnnnnnnnnnnnnnnnnnnnnnnnnnnnnnnnnnnnnnnnnnnnnnnnnnnnnnnnnnnnnnnnnnnnnnnnnnnnnnnnnnnnnnnnnnnnnnnnnnnnnnnnnnnnnnnnnnnnnnnnnnnnnnnnnnnnnnnnnnnnnnnnnnnnnnnnnnnnnnnnnnnnnnnnnnnnnnnnnnnnnnnnnnnnnnnnnnnnnnnnnnnnnnnnnnnnnnnnnnnnnnnnnnnnnnnnnnnnnnnnnnnnnnnnnnnnnnnnnnnnnnnnnnnnnnnnnnnnnnnnnnnnnnnnnnnnnnnnnnnnnnnnnnnnnnnnnnnnnnnnnnnnnnnnnnnnnnnnnnnnnnnnnnnnnnnnnnnnnnnnnnnnnnnnnnnnnnnnnnnnnnnnnnnnnnnnnnnnnnnnnnnnnnnnnnnnnnnnnnnnnnnnnnnnnnnnnnnnnnnnnnnnnnnnnnnnnnnnnnnnnnnnnnnnnnnnnnnnnnnnnnnnnnnnnnnnnnnnnnnnnnnnnnnnnnnnnnnnnnnnnnnnnnnnnnnnnnnnnnnnnnnnnnnnnnnnnnnnnnnnnnnnnnnnnnnnnnnnnnnnnnnnnnnnnnnnnnnnnnnnnnnnnnnnnnnnnnnnnnnnnnnnnnnnnnnnnnnnnnnnnnnnnnnnnnnnnnnnnnnnnnnnnnnnnnnnnnnnnnnnnnnnnnnnnnnnnnnnnnnnnnnnnnnnnnnnnnnnnnnnnnnnnnnnnnnnnnnnnnnnnnnnnnnnnnnnnnnnnnnnnnnnnnnnnnnnnnnnnnnnnnnnnnnnnnnnnnnnnnnnnnnnnnnnnnnnnnnnnnnnnnnnnnnnnnnnnnnnnnnnnnnnnnnnnnnnnnnnnnnnnnnnnnnnnnnnnnnnnnnnnnnnnnnnnnnnnnnnnnnnnnnnnnnnnnnnnnnnnnnnnnnnnnnnnnnnnnnnnnnnnnnnnnnnnnnnnnnnnnnnnnnnnnnnnnnnnnnnnnnnnnnnnnnnnnnnnnnnnnnncctttccgaaaccctgcgcctctcatggcggaagacgtcggagatgaacctgggcacgcccacatgggaaaatccggacataagcctccctcaacacggcaatgttccattattgataggattaacgtgggtaccgcggcgcgtctggttagacactccggagacaccagagtccaactgcatcgcctgcgggcgcagggaggctctgatacgtcaatgtgtctttgcgggtattgggagcacaaagacaggcgaaggcagtctggcacgaatctggaacgacccgcacaccatcagcgaaggcgacgagattgtgaagcctttcagcgcgcttggcccggccgacgctgcggctgggaagtggacgaaggtcgtggcgggaatcctgtgcggggaaaagccgaaggggaacagtaagttgtgggtcgtcagctttgcgacagtgcagaacgacaaatacctggaagcagccgagcgggagattcaattcttggccgcgctcgacgacgtgaaggttcaggcgagtttgcaagaaatccaggcgtggcagaaggaaggctggaagctcgttggcagagccaaaccgcgagagacttcacgaaacagaggacaccttgaaattctctccgcagtcgccgctgttcgtccccaagccgaggcaacggtttccggaaaaatcgacgagatgatcgcagaaggcggtaaggcatgggaagaggcggcccaggaatatcgtccgttgatggccgccgtcgccaaatcgctttccccgggctacacaaccgcttccctccggaggcgacaagaaattgccgctgtaaagccggacatgcggccaaagagaaacaacaaagacgaagggggggacaagtgactccaacggagcagtacgtcgaagttctgactcgactgaaacccggtgagctcgggctcttgcgcaaccatgccgggcaagggctcgacgaatcggtagagggctttgaccttttcgcaggcctttggtggccgctgcgggcgcaaacccaacgggcgcctcgccgtgaggtggcctggcttgtcgccaaactctacgccctccggcccctcgagcattcaccccgcgagaccctcgctcgccagctcgggcgatcccggccgggcgagaaaacagcgcggcagcgtttcgagcaacgcttcgacaggatgctcacgctgccgcttgctgaaatcgaacccgccctacagtgggcaatcgacctcatagcttccaagcacctcgaactcgactgggtgcggctgacgaacgatctttccatctgggaacgcgaatccacccggctcaaatgggccgaggaatttttgaactgtccaagaggaggagagtcatgttgatccagattcacgccattcagaatcacagcccggccaacctgaaccgggatgacctgggcgcgcccaagacttgcttttttggcggagtcttgcgctcccgtatttccagccagtgccttaagcgcagcatccgcatgagtgaggagttcagacaattgctgggcggagttcgcacccgccagttggcgaaagagattgcggaaaaggtgacgggcaaagacgtcaggaagcgagcggagaacattctcaaagcctgcgggctggagcctaagaaagcaaaaaaacaggaaggagaagacgaacaggaaagtgctgagaggagcaagatgctggtttacaccacccaagaggcgattacacgcatggccgaactcctccagcagggcgacggaaaaacggacgaggccttggcagcggagttcggcaagctcatcagtgaatccgtcgccgtgccggacatggcgctgagcggcaggatgcttgaaacgggagtcctcaaagacacgacggttgaggcatcgcttcaagtcgcccatgccatttccacccatgaggcccggcccgaggtggactactatgtcgccgccgatgatgtccccggcgaggacgcgggcgcaggttacgtggatgaagccatgttcggttcggcatgtttctacaagtatttctccattcattgggaaacgctggtcaaaaacctgaagcccttcgggacgaatcacgaaaaactggcggcccataccgtcggcgccttcattcgcgccgcggccttggccaaccccacgggaaaacaaaatagttttgccgcgcacaaccctcctgacgggatgttggtggaagtcagaaacactcccatcagctacgccaacgccttcgccaaaccggcggctcctcagggcgaacgggacatcatctcgcagagcgtggcgcagcttgcccattatgtgaacgacatagatacgggatacggcaagccgacgaagcggttctggttctctccaaatctccgctatccgttgacggctaccaccacggagagcgaagacggaaaacagaaacagcgtgaggtcccgcttgccgacaaagatgttaagtctcttgacgaactgatagcggctgtactcaaggaaatcggttacgactggcaggaggccaagaaagtggtcctgaatccggaggtgccccatgagcgcaaagacgctgctacttcggcttgaaggtcctcttcaggcatggggcgatcagcaatccaagttcgtcattcggcgcacggccgaggcgccgaccaagtccggcgtcatcgggatgctttgcgcggcattgggcgtttcccggccagaggcccgcgaaggctggcttccaaggctggcccggctgcgcatgggcgtacgcgtcgatgcgccaggggtccgctggtgggattatcacacggtgggtgcggggatgccgatgcgtaccgccgaggggggaaccaagtccggagccatgctcacccgccgcgaatacctttgcgacgcctcgtttctcgtcgctcttcagggcgaaccggacctcattgaggaactggaggcggcaatcaaagcgcccaagtggacactctacctcggcagaaagtgctgccccccttgccgccctctgctggagcatccgggaggtgaattccccgacttgctttctgccctcgaatcggtcccctggcgtcggcggctgaaggacgatccccagccgcgacccgtcgattgcctgcttgattgggaacccaccaacgagcagcccgaggcgcccgatgatgcgctcgtctggtacgacgtgccgttgacattcgagccgccgtcgcaccaaccccgattcgtcatccgcaggcagttgcgcgtcggagcggacggcgacgtaacacttgcggtgcagccaccgcagagcgacacgccaccgcctccgcgcccaagagcggattacacgaacacagagtacaaaaaccgacgcaaggagcggctcgacgacgactatcacttgtgcgttttttgcaagtctcccgccagcaccgtgcagcacatcacgtaccgccgcgcgggcggcggcgaactccgggacgatttgcgctccctctgccgcctctgccacgacgccgtgaccatgatcgagtacgggctcggaatgggcttggaccgcatcaaccccgaagagccccgttggcgcgacaagatcatcgagaagcgggaagagattatcaggttccgctctctggagactcgccgcagacgccttgccgctgaggaggtggaatagccatgtacctctcctgcctcttgattgacgtcggcaccaaccccgaccgccccaggcccgggcggctctggctgcgaaacctccatcacgtccaccagcgcctttgcatggcgtttccatccaaagaccgaatatcccacgatccccacttcctcaagcctttcaaacccgcggactttgccaacaaccaggtccatgtaagacgtgacggcgactccggctttctcttccgcatcgacccgcaaccgggcgggcgggtcgtgatcctcgtccagtctaactctgccgtaaagcctgactggggctacgccttccacaacgcccgttttcttctgaatcctctagccgctccccctcaggtgcaggaattcgacccccgctttgagaagggtcagcggcttcgcttccgtatccgcgccaatctgagtaagaagataaaaaccagcacagagggcgttgatcttacgaggacgcgagaggggacagataagcggggccgcccgaaggcccaaggcaaacgcgtggcgctgacctgggacaaggaccagaaccgcgacgatgtgatacgaaaatggttcgccggcaagggcggccaaggtggattccaagtggaaactttccgggtcttgcagatcgggtggggcgcaggagaccgatccgacccgaggccgacgggcggccgcatgaaatttcgctcggcgttattggaggggacgcttacggttgaggacgcggacagcttcagagaaaccatcgtgggcggcgttgggcacggcaaagccttcggcttcggcctgctttccgtggcgccgctctcgctgtagcggcggtctccgaccgccggtacgtcgatcggagatcgacgctacaatcccttgtcgatcggggatccgtgcaacatttcttgagcggagatcgagccaatatgaaattcaaaccccgcttgcggcgactggactggctctatacgggcagcccaatctactatctcacgctgtgtacgcaggaccgcaaacgctcgttggcaaatcctgcgattcaccgggaattcacgagattctccgaacgggcgagcgattttcttgtttgggtcgggttcttcatgatcatgcctgatcacatccatcttttcgccggcttttgtcgtgagtccccacctttagggaaatggatcaaggcgctgcgcggggatttatccaaagtcctccgggaagatgagggcgagggcacacattgggagaaagactttttcgatcacgtcctgagatcgcaagaatcctatcgggagaaatatgaatatgtccggcagaatccggtccgggccggtttagtcaagcgcccggaagattggccgtaccagggtgagatccatcgcctggttttgtagcggcggtctccgaccgccgtaacgtcgatcggagatcgactacaaccccggtcgatcggagatcgacgctacaaccgccgtcgatcggagatcgacgctacagcacgggctggaggctctgtgagaattcaagatctccacgttctacccaagttcagtgacgggtggagttatctgtacgtcgagcattgccacgtcgatcaggaagagcgggccattgccgtccacgatcaagccgggaaggtgccggtcccctgtgccaatctggctctcctgatgttgggtccgggcgtctcgattactcacgccgccatctccgtgttggcggaccatgggtgcctggtggcttggtgcggggaggagggagtccgcttctacgccgtgggcatgggcgagacgcgcaacgcggccaacttcctgcatcaggcgaggctgtgggcggaccagggtttccatatgcaggtggtgcgccgcctctatcagttgcgattttcggagaagttcgaccctgccctgaccctccagcaaatccgcggcatggagggcgtgcgggtgcgcgatgcctacgccaaggccgcccaggaagccggcatcacgtggtcgggccgcagctataaacgcgatgagtggagcaaggcggaccctgccaaccgagccttgtccgccgctaactcctgcctatatggaatctgccatgctgccatcgtgtcagcaggtttttcgcccgcactcgggtttatccacaccggcaagatgctgtccttcgtctacgatctcgccgacctgtacaaggctgaaattaccgttccagtggcatttcgcgccgccgccgaggggacgggacagttggaacgccgggtgcgcatcacctgccgcgatcagttcgtatccacgcggcttctggagagaatcatcccggatgtccaaagggcgttgatgctggcaaaagcgacggcctgggacactaccttcgacctggatgccgccgcccccggcttcctctgggacaatctggaaggagaggtcgaaggcggccgcctgctagcccccgaaatcggtgaaacggagcccggcgatggtggtcctgattcttgagcgcgtccccccagggttgcgaggcgagctgactcgctggtttttggaacctcaggcgggagtgttcgtgggacgcgtctccgccatggtccgtgatcggctctgggaaaaagcctgcagccaggccaagggaggcgggtgcttgattatctattcaagcgacaatgaacagggctttcgagtccgaacctggggccaaacagctcgggtcatcgatgacttcgagggcctttttctcgttcgcatgccgcagaatcaataatttagtaagtgttgtccccacgcgcgtgggggtgaaccgccggggctgaaggtttcatgggctggaaagaagttgtccccacgcgcgtgggggtgaaccgatatgctgcatgtgccggggctggcgcttgatgttgtccccacgcgcgtgggggtgaaccggtatcggcgagtggcaaggcgaatccacttaggttgtccccacgcgcgtgggggtgaaccgacctccgagggcgcggggcgcgtgctggcgatgttgtccccacgcgcgtgggggtgaaccggctggggccgacgcgcgcttgtgagactgcgggttgtccccacgcgcgtgggggtgaaccgcgggagaactttgaaggcacggtcctcgatcacgttgtccccacgcgcgtgggggtgaaccggcgcaggttaaggctgaggccaaggccgatgcgttgtccccacgcgcgtgggggtgaaccgtaatggtggcttgcaccttctgctcgaccgatgttgtccccacgcgcgtgggggtgaaccgcagcgggccgtgttggaggagaaggtcgcggagttgtccccacgcgcgtgggggtgaaccgttcccagccgcaggcaggatcaccgtaccccagttgtccccacgcgcgtgggggtgaaccgcaaaacaatatcaagaccaagcacttggatgtgttgtccccacgcgcgtgggggtgaaccgcatcgggcagcacagcggccttataccccaaagttgtccccacgcgcgtgggggtgaaccggcagctcgcggcgattcgcattgccgctgaaagttgtccccacgcgcgtgggggtgaaccggggagtcgtgagtgtagttacaggcagggttcgttgtccccacgcgcgtggg

SEQ ID NO: 1110 - DNA, 103799 bp, Artificial Sequence
  Synthetic Oligonucleotide
  misc_feature (1)..(96545): n is a, c, g, or t
nnnnnnnnnnnnnnnnnnnnnnnnnnnnnnnnnnnnnnnnnnnnnnnnnnnnnnnnnnnnnnnnnnnnnnnnnnnnnnnnnnnnnnnnnnnnnnnnnnnnnnnnnnnnnnnnnnnnnnnnnnnnnnnnnnnnnnnnnnnnnnnnnnnnnnnnnnnnnnnnnnnnnnnnnnnnnnnnnnnnnnnnnnnnnnnnnnnnnnnnnnnnnnnnnnnnnnnnnnnnnnnnnnnnnnnnnnnnnnnnnnnnnnnnnnnnnnnnnnnnnnnnnnnnnnnnnnnnnnnnnnnnnnnnnnnnnnnnnnnnnnnnnnnnnnnnnnnnnnnnnnnnnnnnnnnnnnnnnnnnnnnnnnnnnnnnnnnnnnnnnnnnnnnnnnnnnnnnnnnnnnnnnnnnnnnnnnnnnnnnnnnnnnnnnnnnnnnnnnnnnnnnnnnnnnnnnnnnnnnnnnnnnnnnnnnnnnnnnnnnnnnnnnnnnnnnnnnnnnnnnnnnnnnnnnnnnnnnnnnnnnnnnnnnnnnnnnnnnnnnnnnnnnnnnnnnnnnnnnnnnnnnnnnnnnnnnnnnnnnnnnnnnnnnnnnnnnnnnnnnnnnnnnnnnnnnnnnnnnnnnnnnnnnnnnnnnnnnnnnnnnnnnnnnnnnnnnnnnnnnnnnnnnnnnnnnnnnnnnnnnnnnnnnnnnnnnnnnnnnnnnnnnnnnnnnnnnnnnnnnnnnnnnnnnnnnnnnnnnnnnnnnnnnnnnnnnnnnnnnnnnnnnnnnnnnnnnnnnnnnnnnnnnnnnnnnnnnnnnnnnnnnnnnnnnnnnnnnnnnnnnnnnnnnnnnnnnnnnnnnnnnnnnnnnnnnnnnnnnnnnnnnnnnnnnnnnnnnnnnnnnnnnnnnnnnnnnnnnnnnnnnnnnnnnnnnnnnnnnnnnnnnnnnnnnnnnnnnnnnnnnnnnnnnnnnnnnnnnnnnnnnnnnnnnnnnnnnnnnnnnnnnnnnnnnnnnnnnnnnnnnnnnnnnnnnnnnnnnnnnnnnnnnnnnnnnnnnnnnnnnnnnnnnnnnnnnnnnnnnnnnnnnnnnnnnnnnnnnnnnnnnnnnnnnnnnnnnnnnnnnnnnnnnnnnnnnnnnnnnnnnnnnnnnnnnnnnnnnnnnnnnnnnnnnnnnnnnnnnnnnnnnnnnnnnnnnnnnnnnnnnnnnnnnnnnnnnnnnnnnnnnnnnnnnnnnnnnnnnnnnnnnnnnnnnnnnnnnnnnnnnnnnnnnnnnnnnnnnnnnnnnnnnnnnnnnnnnnnnnnnnnnnnnnnnnnnnnnnnnnnnnnnnnnnnnnnnnnnnnnnnnnnnnnnnnnnnnnnnnnnnnnnnnnnnnnnnnnnnnnnnnnnnnnnnnnnnnnnnnnnnnnnnnnnnnnnnnnnnnnnnnnnnnnnnnnnnnnnnnnnnnnnnnnnnnnnnnnnnnnnnnnnnnnnnnnnnnnnnnnnnnnnnnnnnnnnnnnnnnnnnnnnnnnnnnnnnnnnnnnnnnnnnnnnnnnnnnnnnnnnnnnnnnnnnnnnnnnnnnnnnnnnnnnnnnnnnnnnnnnnnnnnnnnnnnnnnnnnnnnnnnnnnnnnnnnnnnnnnnnnnnnnnnnnnnnnnnnnnnnnnnnnnnnnnnnnnnnnnnnnnnnnnnnnnnnnnnnnnnnnnnnnnnnnnnnnnnnnnnnnnnnnnnnnnnnnnnnnnnnnnnnnnnnnnnnnnnnnnnnnnnnnnnnnnnnnnnnnnnnnnnnnnnnnnnnnnnnnnnnnnnnnnnnnnnnnnnnnnnnnnnnnnnnnnnnnnnnnnnnnnnnnnnnnnnnnnnnnnnnnnnnnnnnnnnnnnnnnnnnnnnnnnnnnnnnnnnnnnnnnnnnnnnnnnnnnnnnnnnnnnnnnnnnnnnnnnnnnnnnnnnnnnnnnnnnnnnnnnnnnnnnnnnnnnnnnnnnnnnnnnnnnnnnnnnnnnnnnnnnnnnnnnnnnnnnnnnnnnnnnnnnnnnnnnnnnnnnnnnnnnnnnnnnnnnnnnnnnnnnnnnnnnnnnnnnnnnnnnnnnnnnnnnnnnnnnnnnnnnnnnnnnnnnnnnnnnnnnnnnnnnnnnnnnnnnnnnnnnnnnnnnnnnnnnnnnnnnnnnnnnnnnnnnnnnnnnnnnnnnnnnnnnnnnnnnnnnnnnnnnnnnnnnnnnnnnnnnnnnnnnnnnnnnnnnnnnnnnnnnnnnnnnnnnnnnnnnnnnnnnnnnnnnnnnnnnnnnnnnnnnnnnnnnnnnnnnnnnnnnnnnnnnnnnnnnnnnnnnnnnnnnnnnnnnnnnnnnnnnnnnnnnnnnnnnnnnnnnnnnnnnnnnnnnnnnnnnnnnnnnnnnnnnnnnnnnnnnnnnnnnnnnnnnnnnnnnnnnnnnnnnnnnnnnnnnnnnnnnnnnnnnnnnnnnnnnnnnnnnnnnnnnnnnnnnnnnnnnnnnnnnnnnnnnnnnnnnnnnnnnnnnnnnnnnnnnnnnnnnnnnnnnnnnnnnnnnnnnnnnnnnnnnnnnnnnnnnnnnnnnnnnnnnnnnnnnnnnnnnnnnnnnnnnnnnnnnnnnnnnnnnnnnnnnnnnnnnnnnnnnnnnnnnnnnnnnnnnnnnnnnnnnnnnnnnnnnnnnnnnnnnnnnnnnnnnnnnnnnnnnnnnnnnnnnnnnnnnnnnnnnnnnnnnnnnnnnnnnnnnnnnnnnnnnnnnnnnnnnnnnnnnnnnnnnnnnnnnnnnnnnnnnnnnnnnnnnnnnnnnnnnnnnnnnnnnnnnnnnnnnnnnnnnnnnnnnnnnnnnnnnnnnnnnnnnnnnnnnnnnnnnnnnnnnnnnnnnnnnnnnnnnnnnnnnnnnnnnnnnnnnnnnnnnnnnnnnnnnnnnnnnnnnnnnnnnnnnnnnnnnnnnnnnnnnnnnnnnnnnnnnnnnnnnnnnnnnnnnnnnnnnnnnnnnnnnnnnnnnnnnnnnnnnnnnnnnnnnnnnnnnnnnnnnnnnnnnnnnnnnnnnnnnnnnnnnnnnnnnnnnnnnnnnnnnnnnnnnnnnnnnnnnnnnnnnnnnnnnnnnnnnnnnnnnnnnnnnnnnnnnnnnnnnnnnnnnnnnnnnnnnnnnnnnnnnnnnnnnnnnnnnnnnnnnnnnnnnnnnnnnnnnnnnnnnnnnnnnnnnnnnnnnnnnnnnnnnnnnnnnnnnnnnnnnnnnnnnnnnnnnnnnnnnnnnnnnnnnnnnnnnnnnnnnnnnnnnnnnnnnnnnnnnnnnnnnnnnnnnnnnnnnnnnnnnnnnnnnnnnnnnnnnnnnnnnnnnnnnnnnnnnnnnnnnnnnnnnnnnnnnnnnnnnnnnnnnnnnnnnnnnnnnnnnnnnnnnnnnnnnnnnnnnnnnnnnnnnnnnnnnnnnnnnnnnnnnnnnnnnnnnnnnnnnnnnnnnnnnnnnnnnnnnnnnnnnnnnnnnnnnnnnnnnnnnnnnnnnnnnnnnnnnnnnnnnnnnnnnnnnnnnnnnnnnnnnnnnnnnnnnnnnnnnnnnnnnnnnnnnnnnnnnnnnnnnnnnnnnnnnnnnnnnnnnnnnnnnnnnnnnnnnnnnnnnnnnnnnnnnnnnnnnnnnnnnnnnnnnnnnnnnnnnnnnnnnnnnnnnnnnnnnnnnnnnnnnnnnnnnnnnnnnnnnnnnnnnnnnnnnnnnnnnnnnnnnnnnnnnnnnnnnnnnnnnnnnnnnnnnnnnnnnnnnnnnnnnnnnnnnnnnnnnnnnnnnnnnnnnnnnnnnnnnnnnnnnnnnnnnnnnnnnnnnnnnnnnnnnnnnnnnnnnnnnnnnnnnnnnnnnnnnnnnnnnnnnnnnnnnnnnnnnnnnnnnnnnnnnnnnnnnnnnnnnnnnnnnnnnnnnnnnnnnnnnnnnnnnnnnnnnnnnnnnnnnnnnnnnnnnnnnnnnnnnnnnnnnnnnnnnnnnnnnnnnnnnnnnnnnnnnnnnnnnnnnnnnnnnnnnnnnnnnnnnnnnnnnnnnnnnnnnnnnnnnnnnnnnnnnnnnnnnnnnnnnnnnnnnnnnnnnnnnnnnnnnnnnnnnnnnnnnnnnnnnnnnnnnnnnnnnnnnnnnnnnnnnnnnnnnnnnnnnnnnnnnnnnnnnnnnnnnnnnnnnnnnnnnnnnnnnnnnnnnnnnnnnnnnnnnnnnnnnnnnnnnnnnnnnnnnnnnnnnnnnnnnnnnnnnnnnnnnnnnnnnnnnnnnnnnnnnnnnnnnnnnnnnnnnnnnnnnnnnnnnnnnnnnnnnnnnnnnnnnnnnnnnnnnnnnnnnnnnnnnnnnnnnnnnnnnnnnnnnnnnnnnnnnnnnnnnnnnnnnnnnnnnnnnnnnnnnnnnnnnnnnnnnnnnnnnnnnnnnnnnnnnnnnnnnnnnnnnnnnnnnnnnnnnnnnnnnnnnnnnnnnnnnnnnnnnnnnnnnnnnnnnnnnnnnnnnnnnnnnnnnnnnnnnnnnnnnnnnnnnnnnnnnnnnnnnnnnnnnnnnnnnnnnnnnnnnnnnnnnnnnnnnnnnnnnnnnnnnnnnnnnnnnnnnnnnnnnnnnnnnnnnnnnnnnnnnnnnnnnnnnnnnnnnnnnnnnnnnnnnnnnnnnnnnnnnnnnnnnnnnnnnnnnnnnnnnnnnnnnnnnnnnnnnnnnnnnnnnnnnnnnnnnnnnnnnnnnnnnnnnnnnnnnnnnnnnnnnnnnnnnnnnnnnnnnnnnnnnnnnnnnnnnnnnnnnnnnnnnnnnnnnnnnnnnnnnnnnnnnnnnnnnnnnnnnnnnnnnnnnnnnnnnnnnnnnnnnnnnnnnnnnnnnnnnnnnnnnnnnnnnnnnnnnnnnnnnnnnnnnnnnnnnnnnnnnnnnnnnnnnnnnnnnnnnnnnnnnnnnnnnnnnnnnnnnnnnnnnnnnnnnnnnnnnnnnnnnnnnnnnnnnnnnnnnnnnnnnnnnnnnnnnnnnnnnnnnnnnnnnnnnnnnnnnnnnnnnnnnnnnnnnnnnnnnnnnnnnnnnnnnnnnnnnnnnnnnnnnnnnnnnnnnnnnnnnnnnnnnnnnnnnnnnnnnnnnnnnnnnnnnnnnnnnnnnnnnnnnnnnnnnnnnnnnnnnnnnnnnnnnnnnnnnnnnnnnnnnnnnnnnnnnnnnnnnnnnnnnnnnnnnnnnnnnnnnnnnnnnnnnnnnnnnnnnnnnnnnnnnnnnnnnnnnnnnnnnnnnnnnnnnnnnnnnnnnnnnnnnnnnnnnnnnnnnnnnnnnnnnnnnnnnnnnnnnnnnnnnnnnnnnnnnnnnnnnnnnnnnnnnnnnnnnnnnnnnnnnnnnnnnnnnnnnnnnnnnnnnnnnnnnnnnnnnnnnnnnnnnnnnnnnnnnnnnnnnnnnnnnnnnnnnnnnnnnnnnnnnnnnnnnnnnnnnnnnnnnnnnnnnnnnnnnnnnnnnnnnnnnnnnnnnnnnnnnnnnnnnnnnnnnnnnnnnnnnnnnnnnnnnnnnnnnnnnnnnnnnnnnnnnnnnnnnnnnnnnnnnnnnnnnnnnnnnnnnnnnnnnnnnnnnnnnnnnnnnnnnnnnnnnnnnnnnnnnnnnnnnnnnnnnnnnnnnnnnnnnnnnnnnnnnnnnnnnnnnnnnnnnnnnnnnnnnnnnnnnnnnnnnnnnnnnnnnnnnnnnnnnnnnnnnnnnnnnnnnnnnnnnnnnnnnnnnnnnnnnnnnnnnnnnnnnnnnnnnnnnnnnnnnnnnnnnnnnnnnnnnnnnnnnnnnnnnnnnnnnnnnnnnnnnnnnnnnnnnnnnnnnnnnnnnnnnnnnnnnnnnnnnnnnnnnnnnnnnnnnnnnnnnnnnnnnnnnnnnnnnnnnnnnnnnnnnnnnnnnnnnnnnnnnnnnnnnnnnnnnnnnnnnnnnnnnnnnnnnnnnnnnnnnnnnnnnnnnnnnnnnnnnnnnnnnnnnnnnnnnnnnnnnnnnnnnnnnnnnnnnnnnnnnnnnnnnnnnnnnnnnnnnnnnnnnnnnnnnnnnnnnnnnnnnnnnnnnnnnnnnnnnnnnnnnnnnnnnnnnnnnnnnnnnnnnnnnnnnnnnnnnnnnnnnnnnnnnnnnnnnnnnnnnnnnnnnnnnnnnnnnnnnnnnnnnnnnnnnnnnnnnnnnnnnnnnnnnnnnnnnnnnnnnnnnnnnnnnnnnnnnnnnnnnnnnnnnnnnnnnnnnnnnnnnnnnnnnnnnnnnnnnnnnnnnnnnnnnnnnnnnnnnnnnnnnnnnnnnnnnnnnnnnnnnnnnnnnnnnnnnnnnnnnnnnnnnnnnnnnnnnnnnnnnnnnnnnnnnnnnnnnnnnnnnnnnnnnnnnnnnnnnnnnnnnnnnnnnnnnnnnnnnnnnnnnnnnnnnnnnnnnnnnnnnnnnnnnnnnnnnnnnnnnnnnnnnnnnnnnnnnnnnnnnnnnnnnnnnnnnnnnnnnnnnnnnnnnnnnnnnnnnnnnnnnnnnnnnnnnnnnnnnnnnnnnnnnnnnnnnnnnnnnnnnnnnnnnnnnnnnnnnnnnnnnnnnnnnnnnnnnnnnnnnnnnnnnnnnnnnnnnnnnnnnnnnnnnnnnnnnnnnnnnnnnnnnnnnnnnnnnnnnnnnnnnnnnnnnnnnnnnnnnnnnnnnnnnnnnnnnnnnnnnnnnnnnnnnnnnnnnnnnnnnnnnnnnnnnnnnnnnnnnnnnnnnnnnnnnnnnnnnnnnnnnnnnnnnnnnnnnnnnnnnnnnnnnnnnnnnnnnnnnnnnnnnnnnnnnnnnnnnnnnnnnnnnnnnnnnnnnnnnnnnnnnnnnnnnnnnnnnnnnnnnnnnnnnnnnnnnnnnnnnnnnnnnnnnnnnnnnnnnnnnnnnnnnnnnnnnnnnnnnnnnnnnnnnnnnnnnnnnnnnnnnnnnnnnnnnnnnnnnnnnnnnnnnnnnnnnnnnnnnnnnnnnnnnnnnnnnnnnnnnnnnnnnnnnnnnnnnnnnnnnnnnnnnnnnnnnnnnnnnnnnnnnnnnnnnnnnnnnnnnnnnnnnnnnnnnnnnnnnnnnnnnnnnnnnnnnnnnnnnnnnnnnnnnnnnnnnnnnnnnnnnnnnnnnnnnnnnnnnnnnnnnnnnnnnnnnnnnnnnnnnnnnnnnnnnnnnnnnnnnnnnnnnnnnnnnnnnnnnnnnnnnnnnnnnnnnnnnnnnnnnnnnnnnnnnnnnnnnnnnnnnnnnnnnnnnnnnnnnnnnnnnnnnnnnnnnnnnnnnnnnnnnnnnnnnnnnnnnnnnnnnnnnnnnnnnnnnnnnnnnnnnnnnnnnnnnnnnnnnnnnnnnnnnnnnnnnnnnnnnnnnnnnnnnnnnnnnnnnnnnnnnnnnnnnnnnnnnnnnnnnnnnnnnnnnnnnnnnnnnnnnnnnnnnnnnnnnnnnnnnnnnnnnnnnnnnnnnnnnnnnnnnnnnnnnnnnnnnnnnnnnnnnnnnnnnnnnnnnnnnnnnnnnnnnnnnnnnnnnnnnnnnnnnnnnnnnnnnnnnnnnnnnnnnnnnnnnnnnnnnnnnnnnnnnnnnnnnnnnnnnnnnnnnnnnnnnnnnnnnnnnnnnnnnnnnnnnnnnnnnnnnnnnnnnnnnnnnnnnnnnnnnnnnnnnnnnnnnnnnnnnnnnnnnnnnnnnnnnnnnnnnnnnnnnnnnnnnnnnnnnnnnnnnnnnnnnnnnnnnnnnnnnnnnnnnnnnnnnnnnnnnnnnnnnnnnnnnnnnnnnnnnnnnnnnnnnnnnnnnnnnnnnnnnnnnnnnnnnnnnnnnnnnnnnnnnnnnnnnnnnnnnnnnnnnnnnnnnnnnnnnnnnnnnnnnnnnnnnnnnnnnnnnnnnnnnnnnnnnnnnnnnnnnnnnnnnnnnnnnnnnnnnnnnnnnnnnnnnnnnnnnnnnnnnnnnnnnnnnnnnnnnnnnnnnnnnnnnnnnnnnnnnnnnnnnnnnnnnnnnnnnnnnnnnnnnnnnnnnnnnnnnnnnnnnnnnnnnnnnnnnnnnnnnnnnnnnnnnnnnnnnnnnnnnnnnnnnnnnnnnnnnnnnnnnnnnnnnnnnnnnnnnnnnnnnnnnnnnnnnnnnnnnnnnnnnnnnnnnnnnnnnnnnnnnnnnnnnnnnnnnnnnnnnnnnnnnnnnnnnnnnnnnnnnnnnnnnnnnnnnnnnnnnnnnnnnnnnnnnnnnnnnnnnnnnnnnnnnnnnnnnnnnnnnnnnnnnnnnnnnnnnnnnnnnnnnnnnnnnnnnnnnnnnnnnnnnnnnnnnnnnnnnnnnnnnnnnnnnnnnnnnnnnnnnnnnnnnnnnnnnnnnnnnnnnnnnnnnnnnnnnnnnnnnnnnnnnnnnnnnnnnnnnnnnnnnnnnnnnnnnnnnnnnnnnnnnnnnnnnnnnnnnnnnnnnnnnnnnnnnnnnnnnnnnnnnnnnnnnnnnnnnnnnnnnnnnnnnnnnnnnnnnnnnnnnnnnnnnnnnnnnnnnnnnnnnnnnnnnnnnnnnnnnnnnnnnnnnnnnnnnnnnnnnnnnnnnnnnnnnnnnnnnnnnnnnnnnnnnnnnnnnnnnnnnnnnnnnnnnnnnnnnnnnnnnnnnnnnnnnnnnnnnnnnnnnnnnnnnnnnnnnnnnnnnnnnnnnnnnnnnnnnnnnnnnnnnnnnnnnnnnnnnnnnnnnnnnnnnnnnnnnnnnnnnnnnnnnnnnnnnnnnnnnnnnnnnnnnnnnnnnnnnnnnnnnnnnnnnnnnnnnnnnnnnnnnnnnnnnnnnnnnnnnnnnnnnnnnnnnnnnnnnnnnnnnnnnnnnnnnnnnnnnnnnnnnnnnnnnnnnnnnnnnnnnnnnnnnnnnnnnnnnnnnnnnnnnnnnnnnnnnnnnnnnnnnnnnnnnnnnnnnnnnnnnnnnnnnnnnnnnnnnnnnnnnnnnnnnnnnnnnnnnnnnnnnnnnnnnnnnnnnnnnnnnnnnnnnnnnnnnnnnnnnnnnnnnnnnnnnnnnnnnnnnnnnnnnnnnnnnnnnnnnnnnnnnnnnnnnnnnnnnnnnnnnnnnnnnnnnnnnnnnnnnnnnnnnnnnnnnnnnnnnnnnnnnnnnnnnnnnnnnnnnnnnnnnnnnnnnnnnnnnnnnnnnnnnnnnnnnnnnnnnnnnnnnnnnnnnnnnnnnnnnnnnnnnnnnnnnnnnnnnnnnnnnnnnnnnnnnnnnnnnnnnnnnnnnnnnnnnnnnnnnnnnnnnnnnnnnnnnnnnnnnnnnnnnnnnnnnnnnnnnnnnnnnnnnnnnnnnnnnnnnnnnnnnnnnnnnnnnnnnnnnnnnnnnnnnnnnnnnnnnnnnnnnnnnnnnnnnnnnnnnnnnnnnnnnnnnnnnnnnnnnnnnnnnnnnnnnnnnnnnnnnnnnnnnnnnnnnnnnnnnnnnnnnnnnnnnnnnnnnnnnnnnnnnnnnnnnnnnnnnnnnnnnnnnnnnnnnnnnnnnnnnnnnnnnnnnnnnnnnnnnnnnnnnnnnnnnnnnnnnnnnnnnnnnnnnnnnnnnnnnnnnnnnnnnnnnnnnnnnnnnnnnnnnnnnnnnnnnnnnnnnnnnnnnnnnnnnnnnnnnnnnnnnnnnnnnnnnnnnnnnnnnnnnnnnnnnnnnnnnnnnnnnnnnnnnnnnnnnnnnnnnnnnnnnnnnnnnnnnnnnnnnnnnnnnnnnnnnnnnnnnnnnnnnnnnnnnnnnnnnnnnnnnnnnnnnnnnnnnnnnnnnnnnnnnnnnnnnnnnnnnnnnnnnnnnnnnnnnnnnnnnnnnnnnnnnnnnnnnnnnnnnnnnnnnnnnnnnnnnnnnnnnnnnnnnnnnnnnnnnnnnnnnnnnnnnnnnnnnnnnnnnnnnnnnnnnnnnnnnnnnnnnnnnnnnnnnnnnnnnnnnnnnnnnnnnnnnnnnnnnnnnnnnnnnnnnnnnnnnnnnnnnnnnnnnnnnnnnnnnnnnnnnnnnnnnnnnnnnnnnnnnnnnnnnnnnnnnnnnnnnnnnnnnnnnnnnnnnnnnnnnnnnnnnnnnnnnnnnnnnnnnnnnnnnnnnnnnnnnnnnnnnnnnnnnnnnnnnnnnnnnnnnnnnnnnnnnnnnnnnnnnnnnnnnnnnnnnnnnnnnnnnnnnnnnnnnnnnnnnnnnnnnnnnnnnnnnnnnnnnnnnnnnnnnnnnnnnnnnnnnnnnnnnnnnnnnnnnnnnnnnnnnnnnnnnnnnnnnnnnnnnnnnnnnnnnnnnnnnnnnnnnnnnnnnnnnnnnnnnnnnnnnnnnnnnnnnnnnnnnnnnnnnnnnnnnnnnnnnnnnnnnnnnnnnnnnnnnnnnnnnnnnnnnnnnnnnnnnnnnnnnnnnnnnnnnnnnnnnnnnnnnnnnnnnnnnnnnnnnnnnnnnnnnnnnnnnnnnnnnnnnnnnnnnnnnnnnnnnnnnnnnnnnnnnnnnnnnnnnnnnnnnnnnnnnnnnnnnnnnnnnnnnnnnnnnnnnnnnnnnnnnnnnnnnnnnnnnnnnnnnnnnnnnnnnnnnnnnnnnnnnnnnnnnnnnnnnnnnnnnnnnnnnnnnnnnnnnnnnnnnnnnnnnnnnnnnnnnnnnnnnnnnnnnnnnnnnnnnnnnnnnnnnnnnnnnnnnnnnnnnnnnnnnnnnnnnnnnnnnnnnnnnnnnnnnnnnnnnnnnnnnnnnnnnnnnnnnnnnnnnnnnnnnnnnnnnnnnnnnnnnnnnnnnnnnnnnnnnnnnnnnnnnnnnnnnnnnnnnnnnnnnnnnnnnnnnnnnnnnnnnnnnnnnnnnnnnnnnnnnnnnnnnnnnnnnnnnnnnnnnnnnnnnnnnnnnnnnnnnnnnnnnnnnnnnnnnnnnnnnnnnnnnnnnnnnnnnnnnnnnnnnnnnnnnnnnnnnnnnnnnnnnnnnnnnnnnnnnnnnnnnnnnnnnnnnnnnnnnnnnnnnnnnnnnnnnnnnnnnnnnnnnnnnnnnnnnnnnnnnnnnnnnnnnnnnnnnnnnnnnnnnnnnnnnnnnnnnnnnnnnnnnnnnnnnnnnnnnnnnnnnnnnnnnnnnnnnnnnnnnnnnnnnnnnnnnnnnnnnnnnnnnnnnnnnnnnnnnnnnnnnnnnnnnnnnnnnnnnnnnnnnnnnnnnnnnnnnnnnnnnnnnnnnnnnnnnnnnnnnnnnnnnnnnnnnnnnnnnnnnnnnnnnnnnnnnnnnnnnnnnnnnnnnnnnnnnnnnnnnnnnnnnnnnnnnnnnnnnnnnnnnnnnnnnnnnnnnnnnnnnnnnnnnnnnnnnnnnnnnnnnnnnnnnnnnnnnnnnnnnnnnnnnnnnnnnnnnnnnnnnnnnnnnnnnnnnnnnnnnnnnnnnnnnnnnnnnnnnnnnnnnnnnnnnnnnnnnnnnnnnnnnnnnnnnnnnnnnnnnnnnnnnnnnnnnnnnnnnnnnnnnnnnnnnnnnnnnnnnnnnnnnnnnnnnnnnnnnnnnnnnnnnnnnnnnnnnnnnnnnnnnnnnnnnnnnnnnnnnnnnnnnnnnnnnnnnnnnnnnnnnnnnnnnnnnnnnnnnnnnnnnnnnnnnnnnnnnnnnnnnnnnnnnnnnnnnnnnnnnnnnnnnnnnnnnnnnnnnnnnnnnnnnnnnnnnnnnnnnnnnnnnnnnnnnnnnnnnnnnnnnnnnnnnnnnnnnnnnnnnnnnnnnnnnnnnnnnnnnnnnnnnnnnnnnnnnnnnnnnnnnnnnnnnnnnnnnnnnnnnnnnnnnnnnnnnnnnnnnnnnnnnnnnnnnnnnnnnnnnnnnnnnnnnnnnnnnnnnnnnnnnnnnnnnnnnnnnnnnnnnnnnnnnnnnnnnnnnnnnnnnnnnnnnnnnnnnnnnnnnnnnnnnnnnnnnnnnnnnnnnnnnnnnnnnnnnnnnnnnnnnnnnnnnnnnnnnnnnnnnnnnnnnnnnnnnnnnnnnnnnnnnnnnnnnnnnnnnnnnnnnnnnnnnnnnnnnnnnnnnnnnnnnnnnnnnnnnnnnnnnnnnnnnnnnnnnnnnnnnnnnnnnnnnnnnnnnnnnnnnnnnnnnnnnnnnnnnnnnnnnnnnnnnnnnnnnnnnnnnnnnnnnnnnnnnnnnnnnnnnnnnnnnnnnnnnnnnnnnnnnnnnnnnnnnnnnnnnnnnnnnnnnnnnnnnnnnnnnnnnnnnnnnnnnnnnnnnnnnnnnnnnnnnnnnnnnnnnnnnnnnnnnnnnnnnnnnnnnnnnnnnnnnnnnnnnnnnnnnnnnnnnnnnnnnnnnnnnnnnnnnnnnnnnnnnnnnnnnnnnnnnnnnnnnnnnnnnnnnnnnnnnnnnnnnnnnnnnnnnnnnnnnnnnnnnnnnnnnnnnnnnnnnnnnnnnnnnnnnnnnnnnnnnnnnnnnnnnnnnnnnnnnnnnnnnnnnnnnnnnnnnnnnnnnnnnnnnnnnnnnnnnnnnnnnnnnnnnnnnnnnnnnnnnnnnnnnnnnnnnnnnnnnnnnnnnnnnnnnnnnnnnnnnnnnnnnnnnnnnnnnnnnnnnnnnnnnnnnnnnnnnnnnnnnnnnnnnnnnnnnnnnnnnnnnnnnnnnnnnnnnnnnnnnnnnnnnnnnnnnnnnnnnnnnnnnnnnnnnnnnnnnnnnnnnnnnnnnnnnnnnnnnnnnnnnnnnnnnnnnnnnnnnnnnnnnnnnnnnnnnnnnnnnnnnnnnnnnnnnnnnnnnnnnnnnnnnnnnnnnnnnnnnnnnnnnnnnnnnnnnnnnnnnnnnnnnnnnnnnnnnnnnnnnnnnnnnnnnnnnnnnnnnnnnnnnnnnnnnnnnnnnnnnnnnnnnnnnnnnnnnnnnnnnnnnnnnnnnnnnnnnnnnnnnnnnnnnnnnnnnnnnnnnnnnnnnnnnnnnnnnnnnnnnnnnnnnnnnnnnnnnnnnnnnnnnnnnnnnnnnnnnnnnnnnnnnnnnnnnnnnnnnnnnnnnnnnnnnnnnnnnnnnnnnnnnnnnnnnnnnnnnnnnnnnnnnnnnnnnnnnnnnnnnnnnnnnnnnnnnnnnnnnnnnnnnnnnnnnnnnnnnnnnnnnnnnnnnnnnnnnnnnnnnnnnnnnnnnnnnnnnnnnnnnnnnnnnnnnnnnnnnnnnnnnnnnnnnnnnnnnnnnnnnnnnnnnnnnnnnnnnnnnnnnnnnnnnnnnnnnnnnnnnnnnnnnnnnnnnnnnnnnnnnnnnnnnnnnnnnnnnnnnnnnnnnnnnnnnnnnnnnnnnnnnnnnnnnnnnnnnnnnnnnnnnnnnnnnnnnnnnnnnnnnnnnnnnnnnnnnnnnnnnnnnnnnnnnnnnnnnnnnnnnnnnnnnnnnnnnnnnnnnnnnnnnnnnnnnnnnnnnnnnnnnnnnnnnnnnnnnnnnnnnnnnnnnnnnnnnnnnnnnnnnnnnnnnnnnnnnnnnnnnnnnnnnnnnnnnnnnnnnnnnnnnnnnnnnnnnnnnnnnnnnnnnnnnnnnnnnnnnnnnnnnnnnnnnnnnnnnnnnnnnnnnnnnnnnnnnnnnnnnnnnnnnnnnnnnnnnnnnnnnnnnnnnnnnnnnnnnnnnnnnnnnnnnnnnnnnnnnnnnnnnnnnnnnnnnnnnnnnnnnnnnnnnnnnnnnnnnnnnnnnnnnnnnnnnnnnnnnnnnnnnnnnnnnnnnnnnnnnnnnnnnnnnnnnnnnnnnnnnnnnnnnnnnnnnnnnnnnnnnnnnnnnnnnnnnnnnnnnnnnnnnnnnnnnnnnnnnnnnnnnnnnnnnnnnnnnnnnnnnnnnnnnnnnnnnnnnnnnnnnnnnnnnnnnnnnnnnnnnnnnnnnnnnnnnnnnnnnnnnnnnnnnnnnnnnnnnnnnnnnnnnnnnnnnnnnnnnnnnnnnnnnnnnnnnnnnnnnnnnnnnnnnnnnnnnnnnnnnnnnnnnnnnnnnnnnnnnnnnnnnnnnnnnnnnnnnnnnnnnnnnnnnnnnnnnnnnnnnnnnnnnnnnnnnnnnnnnnnnnnnnnnnnnnnnnnnnnnnnnnnnnnnnnnnnnnnnnnnnnnnnnnnnnnnnnnnnnnnnnnnnnnnnnnnnnnnnnnnnnnnnnnnnnnnnnnnnnnnnnnnnnnnnnnnnnnnnnnnnnnnnnnnnnnnnnnnnnnnnnnnnnnnnnnnnnnnnnnnnnnnnnnnnnnnnnnnnnnnnnnnnnnnnnnnnnnnnnnnnnnnnnnnnnnnnnnnnnnnnnnnnnnnnnnnnnnnnnnnnnnnnnnnnnnnnnnnnnnnnnnnnnnnnnnnnnnnnnnnnnnnnnnnnnnnnnnnnnnnnnnnnnnnnnnnnnnnnnnnnnnnnnnnnnnnnnnnnnnnnnnnnnnnnnnnnnnnnnnnnnnnnnnnnnnnnnnnnnnnnnnnnnnnnnnnnnnnnnnnnnnnnnnnnnnnnnnnnnnnnnnnnnnnnnnnnnnnnnnnnnnnnnnnnnnnnnnnnnnnnnnnnnnnnnnnnnnnnnnnnnnnnnnnnnnnnnnnnnnnnnnnnnnnnnnnnnnnnnnnnnnnnnnnnnnnnnnnnnnnnnnnnnnnnnnnnnnnnnnnnnnnnnnnnnnnnnnnnnnnnnnnnnnnnnnnnnnnnnnnnnnnnnnnnnnnnnnnnnnnnnnnnnnnnnnnnnnnnnnnnnnnnnnnnnnnnnnnnnnnnnnnnnnnnnnnnnnnnnnnnnnnnnnnnnnnnnnnnnnnnnnnnnnnnnnnnnnnnnnnnnnnnnnnnnnnnnnnnnnnnnnnnnnnnnnnnnnnnnnnnnnnnnnnnnnnnnnnnnnnnnnnnnnnnnnnnnnnnnnnnnnnnnnnnnnnnnnnnnnnnnnnnnnnnnnnnnnnnnnnnnnnnnnnnnnnnnnnnnnnnnnnnnnnnnnnnnnnnnnnnnnnnnnnnnnnnnnnnnnnnnnnnnnnnnnnnnnnnnnnnnnnnnnnnnnnnnnnnnnnnnnnnnnnnnnnnnnnnnnnnnnnnnnnnnnnnnnnnnnnnnnnnnnnnnnnnnnnnnnnnnnnnnnnnnnnnnnnnnnnnnnnnnnnnnnnnnnnnnnnnnnnnnnnnnnnnnnnnnnnnnnnnnnnnnnnnnnnnnnnnnnnnnnnnnnnnnnnnnnnnnnnnnnnnnnnnnnnnnnnnnnnnnnnnnnnnnnnnnnnnnnnnnnnnnnnnnnnnnnnnnnnnnnnnnnnnnnnnnnnnnnnnnnnnnnnnnnnnnnnnnnnnnnnnnnnnnnnnnnnnnnnnnnnnnnnnnnnnnnnnnnnnnnnnnnnnnnnnnnnnnnnnnnnnnnnnnnnnnnnnnnnnnnnnnnnnnnnnnnnnnnnnnnnnnnnnnnnnnnnnnnnnnnnnnnnnnnnnnnnnnnnnnnnnnnnnnnnnnnnnnnnnnnnnnnnnnnnnnnnnnnnnnnnnnnnnnnnnnnnnnnnnnnnnnnnnnnnnnnnnnnnnnnnnnnnnnnnnnnnnnnnnnnnnnnnnnnnnnnnnnnnnnnnnnnnnnnnnnnnnnnnnnnnnnnnnnnnnnnnnnnnnnnnnnnnnnnnnnnnnnnnnnnnnnnnnnnnnnnnnnnnnnnnnnnnnnnnnnnnnnnnnnnnnnnnnnnnnnnnnnnnnnnnnnnnnnnnnnnnnnnnnnnnnnnnnnnnnnnnnnnnnnnnnnnnnnnnnnnnnnnnnnnnnnnnnnnnnnnnnnnnnnnnnnnnnnnnnnnnnnnnnnnnnnnnnnnnnnnnnnnnnnnnnnnnnnnnnnnnnnnnnnnnnnnnnnnnnnnnnnnnnnnnnnnnnnnnnnnnnnnnnnnnnnnnnnnnnnnnnnnnnnnnnnnnnnnnnnnnnnnnnnnnnnnnnnnnnnnnnnnnnnnnnnnnnnnnnnnnnnnnnnnnnnnnnnnnnnnnnnnnnnnnnnnnnnnnnnnnnnnnnnnnnnnnnnnnnnnnnnnnnnnnnnnnnnnnnnnnnnnnnnnnnnnnnnnnnnnnnnnnnnnnnnnnnnnnnnnnnnnnnnnnnnnnnnnnnnnnnnnnnnnnnnnnnnnnnnnnnnnnnnnnnnnnnnnnnnnnnnnnnnnnnnnnnnnnnnnnnnnnnnnnnnnnnnnnnnnnnnnnnnnnnnnnnnnnnnnnnnnnnnnnnnnnnnnnnnnnnnnnnnnnnnnnnnnnnnnnnnnnnnnnnnnnnnnnnnnnnnnnnnnnnnnnnnnnnnnnnnnnnnnnnnnnnnnnnnnnnnnnnnnnnnnnnnnnnnnnnnnnnnnnnnnnnnnnnnnnnnnnnnnnnnnnnnnnnnnnnnnnnnnnnnnnnnnnnnnnnnnnnnnnnnnnnnnnnnnnnnnnnnnnnnnnnnnnnnnnnnnnnnnnnnnnnnnnnnnnnnnnnnnnnnnnnnnnnnnnnnnnnnnnnnnnnnnnnnnnnnnnnnnnnnnnnnnnnnnnnnnnnnnnnnnnnnnnnnnnnnnnnnnnnnnnnnnnnnnnnnnnnnnnnnnnnnnnnnnnnnnnnnnnnnnnnnnnnnnnnnnnnnnnnnnnnnnnnnnnnnnnnnnnnnnnnnnnnnnnnnnnnnnnnnnnnnnnnnnnnnnnnnnnnnnnnnnnnnnnnnnnnnnnnnnnnnnnnnnnnnnnnnnnnnnnnnnnnnnnnnnnnnnnnnnnnnnnnnnnnnnnnnnnnnnnnnnnnnnnnnnnnnnnnnnnnnnnnnnnnnnnnnnnnnnnnnnnnnnnnnnnnnnnnnnnnnnnnnnnnnnnnnnnnnnnnnnnnnnnnnnnnnnnnnnnnnnnnnnnnnnnnnnnnnnnnnnnnnnnnnnnnnnnnnnnnnnnnnnnnnnnnnnnnnnnnnnnnnnnnnnnnnnnnnnnnnnnnnnnnnnnnnnnnnnnnnnnnnnnnnnnnnnnnnnnnnnnnnnnnnnnnnnnnnnnnnnnnnnnnnnnnnnnnnnnnnnnnnnnnnnnnnnnnnnnnnnnnnnnnnnnnnnnnnnnnnnnnnnnnnnnnnnnnnnnnnnnnnnnnnnnnnnnnnnnnnnnnnnnnnnnnnnnnnnnnnnnnnnnnnnnnnnnnnnnnnnnnnnnnnnnnnnnnnnnnnnnnnnnnnnnnnnnnnnnnnnnnnnnnnnnnnnnnnnnnnnnnnnnnnnnnnnnnnnnnnnnnnnnnnnnnnnnnnnnnnnnnnnnnnnnnnnnnnnnnnnnnnnnnnnnnnnnnnnnnnnnnnnnnnnnnnnnnnnnnnnnnnnnnnnnnnnnnnnnnnnnnnnnnnnnnnnnnnnnnnnnnnnnnnnnnnnnnnnnnnnnnnnnnnnnnnnnnnnnnnnnnnnnnnnnnnnnnnnnnnnnnnnnnnnnnnnnnnnnnnnnnnnnnnnnnnnnnnnnnnnnnnnnnnnnnnnnnnnnnnnnnnnnnnnnnnnnnnnnnnnnnnnnnnnnnnnnnnnnnnnnnnnnnnnnnnnnnnnnnnnnnnnnnnnnnnnnnnnnnnnnnnnnnnnnnnnnnnnnnnnnnnnnnnnnnnnnnnnnnnnnnnnnnnnnnnnnnnnnnnnnnnnnnnnnnnnnnnnnnnnnnnnnnnnnnnnnnnnnnnnnnnnnnnnnnnnnnnnnnnnnnnnnnnnnnnnnnnnnnnnnnnnnnnnnnnnnnnnnnnnnnnnnnnnnnnnnnnnnnnnnnnnnnnnnnnnnnnnnnnnnnnnnnnnnnnnnnnnnnnnnnnnnnnnnnnnnnnnnnnnnnnnnnnnnnnnnnnnnnnnnnnnnnnnnnnnnnnnnnnnnnnnnnnnnnnnnnnnnnnnnnnnnnnnnnnnnnnnnnnnnnnnnnnnnnnnnnnnnnnnnnnnnnnnnnnnnnnnnnnnnnnnnnnnnnnnnnnnnnnnnnnnnnnnnnnnnnnnnnnnnnnnnnnnnnnnnnnnnnnnnnnnnnnnnnnnnnnnnnnnnnnnnnnnnnnnnnnnnnnnnnnnnnnnnnnnnnnnnnnnnnnnnnnnnnnnnnnnnnnnnnnnnnnnnnnnnnnnnnnnnnnnnnnnnnnnnnnnnnnnnnnnnnnnnnnnnnnnnnnnnnnnnnnnnnnnnnnnnnnnnnnnnnnnnnnnnnnnnnnnnnnnnnnnnnnnnnnnnnnnnnnnnnnnnnnnnnnnnnnnnnnnnnnnnnnnnnnnnnnnnnnnnnnnnnnnnnnnnnnnnnnnnnnnnnnnnnnnnnnnnnnnnnnnnnnnnnnnnnnnnnnnnnnnnnnnnnnnnnnnnnnnnnnnnnnnnnnnnnnnnnnnnnnnnnnnnnnnnnnnnnnnnnnnnnnnnnnnnnnnnnnnnnnnnnnnnnnnnnnnnnnnnnnnnnnnnnnnnnnnnnnnnnnnnnnnnnnnnnnnnnnnnnnnnnnnnnnnnnnnnnnnnnnnnnnnnnnnnnnnnnnnnnnnnnnnnnnnnnnnnnnnnnnnnnnnnnnnnnnnnnnnnnnnnnnnnnnnnnnnnnnnnnnnnnnnnnnnnnnnnnnnnnnnnnnnnnnnnnnnnnnnnnnnnnnnnnnnnnnnnnnnnnnnnnnnnnnnnnnnnnnnnnnnnnnnnnnnnnnnnnnnnnnnnnnnnnnnnnnnnnnnnnnnnnnnnnnnnnnnnnnnnnnnnnnnnnnnnnnnnnnnnnnnnnnnnnnnnnnnnnnnnnnnnnnnnnnnnnnnnnnnnnnnnnnnnnnnnnnnnnnnnnnnnnnnnnnnnnnnnnnnnnnnnnnnnnnnnnnnnnnnnnnnnnnnnnnnnnnnnnnnnnnnnnnnnnnnnnnnnnnnnnnnnnnnnnnnnnnnnnnnnnnnnnnnnnnnnnnnnnnnnnnnnnnnnnnnnnnnnnnnnnnnnnnnnnnnnnnnnnnnnnnnnnnnnnnnnnnnnnnnnnnnnnnnnnnnnnnnnnnnnnnnnnnnnnnnnnnnnnnnnnnnnnnnnnnnnnnnnnnnnnnnnnnnnnnnnnnnnnnnnnnnnnnnnnnnnnnnnnnnnnnnnnnnnnnnnnnnnnnnnnnnnnnnnnnnnnnnnnnnnnnnnnnnnnnnnnnnnnnnnnnnnnnnnnnnnnnnnnnnnnnnnnnnnnnnnnnnnnnnnnnnnnnnnnnnnnnnnnnnnnnnnnnnnnnnnnnnnnnnnnnnnnnnnnnnnnnnnnnnnnnnnnnnnnnnnnnnnnnnnnnnnnnnnnnnnnnnnnnnnnnnnnnnnnnnnnnnnnnnnnnnnnnnnnnnnnnnnnnnnnnnnnnnnnnnnnnnnnnnnnnnnnnnnnnnnnnnnnnnnnnnnnnnnnnnnnnnnnnnnnnnnnnnnnnnnnnnnnnnnnnnnnnnnnnnnnnnnnnnnnnnnnnnnnnnnnnnnnnnnnnnnnnnnnnnnnnnnnnnnnnnnnnnnnnnnnnnnnnnnnnnnnnnnnnnnnnnnnnnnnnnnnnnnnnnnnnnnnnnnnnnnnnnnnnnnnnnnnnnnnnnnnnnnnnnnnnnnnnnnnnnnnnnnnnnnnnnnnnnnnnnnnnnnnnnnnnnnnnnnnnnnnnnnnnnnnnnnnnnnnnnnnnnnnnnnnnnnnnnnnnnnnnnnnnnnnnnnnnnnnnnnnnnnnnnnnnnnnnnnnnnnnnnnnnnnnnnnnnnnnnnnnnnnnnnnnnnnnnnnnnnnnnnnnnnnnnnnnnnnnnnnnnnnnnnnnnnnnnnnnnnnnnnnnnnnnnnnnnnnnnnnnnnnnnnnnnnnnnnnnnnnnnnnnnnnnnnnnnnnnnnnnnnnnnnnnnnnnnnnnnnnnnnnnnnnnnnnnnnnnnnnnnnnnnnnnnnnnnnnnnnnnnnnnnnnnnnnnnnnnnnnnnnnnnnnnnnnnnnnnnnnnnnnnnnnnnnnnnnnnnnnnnnnnnnnnnnnnnnnnnnnnnnnnnnnnnnnnnnnnnnnnnnnnnnnnnnnnnnnnnnnnnnnnnnnnnnnnnnnnnnnnnnnnnnnnnnnnnnnnnnnnnnnnnnnnnnnnnnnnnnnnnnnnnnnnnnnnnnnnnnnnnnnnnnnnnnnnnnnnnnnnnnnnnnnnnnnnnnnnnnnnnnnnnnnnnnnnnnnnnnnnnnnnnnnnnnnnnnnnnnnnnnnnnnnnnnnnnnnnnnnnnnnnnnnnnnnnnnnnnnnnnnnnnnnnnnnnnnnnnnnnnnnnnnnnnnnnnnnnnnnnnnnnnnnnnnnnnnnnnnnnnnnnnnnnnnnnnnnnnnnnnnnnnnnnnnnnnnnnnnnnnnnnnnnnnnnnnnnnnnnnnnnnnnnnnnnnnnnnnnnnnnnnnnnnnnnnnnnnnnnnnnnnnnnnnnnnnnnnnnnnnnnnnnnnnnnnnnnnnnnnnnnnnnnnnnnnnnnnnnnnnnnnnnnnnnnnnnnnnnnnnnnnnnnnnnnnnnnnnnnnnnnnnnnnnnnnnnnnnnnnnnnnnnnnnnnnnnnnnnnnnnnnnnnnnnnnnnnnnnnnnnnnnnnnnnnnnnnnnnnnnnnnnnnnnnnnnnnnnnnnnnnnnnnnnnnnnnnnnnnnnnnnnnnnnnnnnnnnnnnnnnnnnnnnnnnnnnnnnnnnnnnnnnnnnnnnnnnnnnnnnnnnnnnnnnnnnnnnnnnnnnnnnnnnnnnnnnnnnnnnnnnnnnnnnnnnnnnnnnnnnnnnnnnnnnnnnnnnnnnnnnnnnnnnnnnnnnnnnnnnnnnnnnnnnnnnnnnnnnnnnnnnnnnnnnnnnnnnnnnnnnnnnnnnnnnnnnnnnnnnnnnnnnnnnnnnnnnnnnnnnnnnnnnnnnnnnnnnnnnnnnnnnnnnnnnnnnnnnnnnnnnnnnnnnnnnnnnnnnnnnnnnnnnnnnnnnnnnnnnnnnnnnnnnnnnnnnnnnnnnnnnnnnnnnnnnnnnnnnnnnnnnnnnnnnnnnnnnnnnnnnnnnnnnnnnnnnnnnnnnnnnnnnnnnnnnnnnnnnnnnnnnnnnnnnnnnnnnnnnnnnnnnnnnnnnnnnnnnnnnnnnnnnnnnnnnnnnnnnnnnnnnnnnnnnnnnnnnnnnnnnnnnnnnnnnnnnnnnnnnnnnnnnnnnnnnnnnnnnnnnnnnnnnnnnnnnnnnnnnnnnnnnnnnnnnnnnnnnnnnnnnnnnnnnnnnnnnnnnnnnnnnnnnnnnnnnnnnnnnnnnnnnnnnnnnnnnnnnnnnnnnnnnnnnnnnnnnnnnnnnnnnnnnnnnnnnnnnnnnnnnnnnnnnnnnnnnnnnnnnnnnnnnnnnnnnnnnnnnnnnnnnnnnnnnnnnnnnnnnnnnnnnnnnnnnnnnnnnnnnnnnnnnnnnnnnnnnnnnnnnnnnnnnnnnnnnnnnnnnnnnnnnnnnnnnnnnnnnnnnnnnnnnnnnnnnnnnnnnnnnnnnnnnnnnnnnnnnnnnnnnnnnnnnnnnnnnnnnnnnnnnnnnnnnnnnnnnnnnnnnnnnnnnnnnnnnnnnnnnnnnnnnnnnnnnnnnnnnnnnnnnnnnnnnnnnnnnnnnnnnnnnnnnnnnnnnnnnnnnnnnnnnnnnnnnnnnnnnnnnnnnnnnnnnnnnnnnnnnnnnnnnnnnnnnnnnnnnnnnnnnnnnnnnnnnnnnnnnnnnnnnnnnnnnnnnnnnnnnnnnnnnnnnnnnnnnnnnnnnnnnnnnnnnnnnnnnnnnnnnnnnnnnnnnnnnnnnnnnnnnnnnnnnnnnnnnnnnnnnnnnnnnnnnnnnnnnnnnnnnnnnnnnnnnnnnnnnnnnnnnnnnnnnnnnnnnnnnnnnnnnnnnnnnnnnnnnnnnnnnnnnnnnnnnnnnnnnnnnnnnnnnnnnnnnnnnnnnnnnnnnnnnnnnnnnnnnnnnnnnnnnnnnnnnnnnnnnnnnnnnnnnnnnnnnnnnnnnnnnnnnnnnnnnnnnnnnnnnnnnnnnnnnnnnnnnnnnnnnnnnnnnnnnnnnnnnnnnnnnnnnnnnnnnnnnnnnnnnnnnnnnnnnnnnnnnnnnnnnnnnnnnnnnnnnnnnnnnnnnnnnnnnnnnnnnnnnnnnnnnnnnnnnnnnnnnnnnnnnnnnnnnnnnnnnnnnnnnnnnnnnnnnnnnnnnnnnnnnnnnnnnnnnnnnnnnnnnnnnnnnnnnnnnnnnnnnnnnnnnnnnnnnnnnnnnnnnnnnnnnnnnnnnnnnnnnnnnnnnnnnnnnnnnnnnnnnnnnnnnnnnnnnnnnnnnnnnnnnnnnnnnnnnnnnnnnnnnnnnnnnnnnnnnnnnnnnnnnnnnnnnnnnnnnnnnnnnnnnnnnnnnnnnnnnnnnnnnnnnnnnnnnnnnnnnnnnnnnnnnnnnnnnnnnnnnnnnnnnnnnnnnnnnnnnnnnnnnnnnnnnnnnnnnnnnnnnnnnnnnnnnnnnnnnnnnnnnnnnnnnnnnnnnnnnnnnnnnnnnnnnnnnnnnnnnnnnnnnnnnnnnnnnnnnnnnnnnnnnnnnnnnnnnnnnnnnnnnnnnnnnnnnnnnnnnnnnnnnnnnnnnnnnnnnnnnnnnnnnnnnnnnnnnnnnnnnnnnnnnnnnnnnnnnnnnnnnnnnnnnnnnnnnnnnnnnnnnnnnnnnnnnnnnnnnnnnnnnnnnnnnnnnnnnnnnnnnnnnnnnnnnnnnnnnnnnnnnnnnnnnnnnnnnnnnnnnnnnnnnnnnnnnnnnnnnnnnnnnnnnnnnnnnnnnnnnnnnnnnnnnnnnnnnnnnnnnnnnnnnnnnnnnnnnnnnnnnnnnnnnnnnnnnnnnnnnnnnnnnnnnnnnnnnnnnnnnnnnnnnnnnnnnnnnnnnnnnnnnnnnnnnnnnnnnnnnnnnnnnnnnnnnnnnnnnnnnnnnnnnnnnnnnnnnnnnnnnnnnnnnnnnnnnnnnnnnnnnnnnnnnnnnnnnnnnnnnnnnnnnnnnnnnnnnnnnnnnnnnnnnnnnnnnnnnnnnnnnnnnnnnnnnnnnnnnnnnnnnnnnnnnnnnnnnnnnnnnnnnnnnnnnnnnnnnnnnnnnnnnnnnnnnnnnnnnnnnnnnnnnnnnnnnnnnnnnnnnnnnnnnnnnnnnnnnnnnnnnnnnnnnnnnnnnnnnnnnnnnnnnnnnnnnnnnnnnnnnnnnnnnnnnnnnnnnnnnnnnnnnnnnnnnnnnnnnnnnnnnnnnnnnnnnnnnnnnnnnnnnnnnnnnnnnnnnnnnnnnnnnnnnnnnnnnnnnnnnnnnnnnnnnnnnnnnnnnnnnnnnnnnnnnnnnnnnnnnnnnnnnnnnnnnnnnnnnnnnnnnnnnnnnnnnnnnnnnnnnnnnnnnnnnnnnnnnnnnnnnnnnnnnnnnnnnnnnnnnnnnnnnnnnnnnnnnnnnnnnnnnnnnnnnnnnnnnnnnnnnnnnnnnnnnnnnnnnnnnnnnnnnnnnnnnnnnnnnnnnnnnnnnnnnnnnnnnnnnnnnnnnnnnnnnnnnnnnnnnnnnnnnnnnnnnnnnnnnnnnnnnnnnnnnnnnnnnnnnnnnnnnnnnnnnnnnnnnnnnnnnnnnnnnnnnnnnnnnnnnnnnnnnnnnnnnnnnnnnnnnnnnnnnnnnnnnnnnnnnnnnnnnnnnnnnnnnnnnnnnnnnnnnnnnnnnnnnnnnnnnnnnnnnnnnnnnnnnnnnnnnnnnnnnnnnnnnnnnnnnnnnnnnnnnnnnnnnnnnnnnnnnnnnnnnnnnnnnnnnnnnnnnnnnnnnnnnnnnnnnnnnnnnnnnnnnnnnnnnnnnnnnnnnnnnnnnnnnnnnnnnnnnnnnnnnnnnnnnnnnnnnnnnnnnnnnnnnnnnnnnnnnnnnnnnnnnnnnnnnnnnnnnnnnnnnnnnnnnnnnnnnnnnnnnnnnnnnnnnnnnnnnnnnnnnnnnnnnnnnnnnnnnnnnnnnnnnnnnnnnnnnnnnnnnnnnnnnnnnnnnnnnnnnnnnnnnnnnnnnnnnnnnnnnnnnnnnnnnnnnnnnnnnnnnnnnnnnnnnnnnnnnnnnnnnnnnnnnnnnnnnnnnnnnnnnnnnnnnnnnnnnnnnnnnnnnnnnnnnnnnnnnnnnnnnnnnnnnnnnnnnnnnnnnnnnnnnnnnnnnnnnnnnnnnnnnnnnnnnnnnnnnnnnnnnnnnnnnnnnnnnnnnnnnnnnnnnnnnnnnnnnnnnnnnnnnnnnnnnnnnnnnnnnnnnnnnnnnnnnnnnnnnnnnnnnnnnnnnnnnnnnnnnnnnnnnnnnnnnnnnnnnnnnnnnnnnnnnnnnnnnnnnnnnnnnnnnnnnnnnnnnnnnnnnnnnnnnnnnnnnnnnnnnnnnnnnnnnnnnnnnnnnnnnnnnnnnnnnnnnnnnnnnnnnnnnnnnnnnnnnnnnnnnnnnnnnnnnnnnnnnnnnnnnnnnnnnnnnnnnnnnnnnnnnnnnnnnnnnnnnnnnnnnnnnnnnnnnnnnnnnnnnnnnnnnnnnnnnnnnnnnnnnnnnnnnnnnnnnnnnnnnnnnnnnnnnnnnnnnnnnnnnnnnnnnnnnnnnnnnnnnnnnnnnnnnnnnnnnnnnnnnnnnnnnnnnnnnnnnnnnnnnnnnnnnnnnnnnnnnnnnnnnnnnnnnnnnnnnnnnnnnnnnnnnnnnnnnnnnnnnnnnnnnnnnnnnnnnnnnnnnnnnnnnnnnnnnnnnnnnnnnnnnnnnnnnnnnnnnnnnnnnnnnnnnnnnnnnnnnnnnnnnnnnnnnnnnnnnnnnnnnnnnnnnnnnnnnnnnnnnnnnnnnnnnnnnnnnnnnnnnnnnnnnnnnnnnnnnnnnnnnnnnnnnnnnnnnnnnnnnnnnnnnnnnnnnnnnnnnnnnnnnnnnnnnnnnnnnnnnnnnnnnnnnnnnnnnnnnnnnnnnnnnnnnnnnnnnnnnnnnnnnnnnnnnnnnnnnnnnnnnnnnnnnnnnnnnnnnnnnnnnnnnnnnnnnnnnnnnnnnnnnnnnnnnnnnnnnnnnnnnnnnnnnnnnnnnnnnnnnnnnnnnnnnnnnnnnnnnnnnnnnnnnnnnnnnnnnnnnnnnnnnnnnnnnnnnnnnnnnnnnnnnnnnnnnnnnnnnnnnnnnnnnnnnnnnnnnnnnnnnnnnnnnnnnnnnnnnnnnnnnnnnnnnnnnnnnnnnnnnnnnnnnnnnnnnnnnnnnnnnnnnnnnnnnnnnnnnnnnnnnnnnnnnnnnnnnnnnnnnnnnnnnnnnnnnnnnnnnnnnnnnnnnnnnnnnnnnnnnnnnnnnnnnnnnnnnnnnnnnnnnnnnnnnnnnnnnnnnnnnnnnnnnnnnnnnnnnnnnnnnnnnnnnnnnnnnnnnnnnnnnnnnnnnnnnnnnnnnnnnnnnnnnnnnnnnnnnnnnnnnnnnnnnnnnnnnnnnnnnnnnnnnnnnnnnnnnnnnnnnnnnnnnnnnnnnnnnnnnnnnnnnnnnnnnnnnnnnnnnnnnnnnnnnnnnnnnnnnnnnnnnnnnnnnnnnnnnnnnnnnnnnnnnnnnnnnnnnnnnnnnnnnnnnnnnnnnnnnnnnnnnnnnnnnnnnnnnnnnnnnnnnnnnnnnnnnnnnnnnnnnnnnnnnnnnnnnnnnnnnnnnnnnnnnnnnnnnnnnnnnnnnnnnnnnnnnnnnnnnnnnnnnnnnnnnnnnnnnnnnnnnnnnnnnnnnnnnnnnnnnnnnnnnnnnnnnnnnnnnnnnnnnnnnnnnnnnnnnnnnnnnnnnnnnnnnnnnnnnnnnnnnnnnnnnnnnnnnnnnnnnnnnnnnnnnnnnnnnnnnnnnnnnnnnnnnnnnnnnnnnnnnnnnnnnnnnnnnnnnnnnnnnnnnnnnnnnnnnnnnnnnnnnnnnnnnnnnnnnnnnnnnnnnnnnnnnnnnnnnnnnnnnnnnnnnnnnnnnnnnnnnnnnnnnnnnnnnnnnnnnnnnnnnnnnnnnnnnnnnnnnnnnnnnnnnnnnnnnnnnnnnnnnnnnnnnnnnnnnnnnnnnnnnnnnnnnnnnnnnnnnnnnnnnnnnnnnnnnnnnnnnnnnnnnnnnnnnnnnnnnnnnnnnnnnnnnnnnnnnnnnnnnnnnnnnnnnnnnnnnnnnnnnnnnnnnnnnnnnnnnnnnnnnnnnnnnnnnnnnnnnnnnnnnnnnnnnnnnnnnnnnnnnnnnnnnnnnnnnnnnnnnnnnnnnnnnnnnnnnnnnnnnnnnnnnnnnnnnnnnnnnnnnnnnnnnnnnnnnnnnnnnnnnnnnnnnnnnnnnnnnnnnnnnnnnnnnnnnnnnnnnnnnnnnnnnnnnnnnnnnnnnnnnnnnnnnnnnnnnnnnnnnnnnnnnnnnnnnnnnnnnnnnnnnnnnnnnnnnnnnnnnnnnnnnnnnnnnnnnnnnnnnnnnnnnnnnnnnnnnnnnnnnnnnnnnnnnnnnnnnnnnnnnnnnnnnnnnnnnnnnnnnnnnnnnnnnnnnnnnnnnnnnnnnnnnnnnnnnnnnnnnnnnnnnnnnnnnnnnnnnnnnnnnnnnnnnnnnnnnnnnnnnnnnnnnnnnnnnnnnnnnnnnnnnnnnnnnnnnnnnnnnnnnnnnnnnnnnnnnnnnnnnnnnnnnnnnnnnnnnnnnnnnnnnnnnnnnnnnnnnnnnnnnnnnnnnnnnnnnnnnnnnnnnnnnnnnnnnnnnnnnnnnnnnnnnnnnnnnnnnnnnnnnnnnnnnnnnnnnnnnnnnnnnnnnnnnnnnnnnnnnnnnnnnnnnnnnnnnnnnnnnnnnnnnnnnnnnnnnnnnnnnnnnnnnnnnnnnnnnnnnnnnnnnnnnnnnnnnnnnnnnnnnnnnnnnnnnnnnnnnnnnnnnnnnnnnnnnnnnnnnnnnnnnnnnnnnnnnnnnnnnnnnnnnnnnnnnnnnnnnnnnnnnnnnnnnnnnnnnnnnnnnnnnnnnnnnnnnnnnnnnnnnnnnnnnnnnnnnnnnnnnnnnnnnnnnnnnnnnnnnnnnnnnnnnnnnnnnnnnnnnnnnnnnnnnnnnnnnnnnnnnnnnnnnnnnnnnnnnnnnnnnnnnnnnnnnnnnnnnnnnnnnnnnnnnnnnnnnnnnnnnnnnnnnnnnnnnnnnnnnnnnnnnnnnnnnnnnnnnnnnnnnnnnnnnnnnnnnnnnnnnnnnnnnnnnnnnnnnnnnnnnnnnnnnnnnnnnnnnnnnnnnnnnnnnnnnnnnnnnnnnnnnnnnnnnnnnnnnnnnnnnnnnnnnnnnnnnnnnnnnnnnnnnnnnnnnnnnnnnnnnnnnnnnnnnnnnnnnnnnnnnnnnnnnnnnnnnnnnnnnnnnnnnnnnnnnnnnnnnnnnnnnnnnnnnnnnnnnnnnnnnnnnnnnnnnnnnnnnnnnnnnnnnnnnnnnnnnnnnnnnnnnnnnnnnnnnnnnnnnnnnnnnnnnnnnnnnnnnnnnnnnnnnnnnnnnnnnnnnnnnnnnnnnnnnnnnnnnnnnnnnnnnnnnnnnnnnnnnnnnnnnnnnnnnnnnnnnnnnnnnnnnnnnnnnnnnnnnnnnnnnnnnnnnnnnnnnnnnnnnnnnnnnnnnnnnnnnnnnnnnnnnnnnnnnnnnnnnnnnnnnnnnnnnnnnnnnnnnnnnnnnnnnnnnnnnnnnnnnnnnnnnnnnnnnnnnnnnnnnnnnnnnnnnnnnnnnnnnnnnnnnnnnnnnnnnnnnnnnnnnnnnnnnnnnnnnnnnnnnnnnnnnnnnnnnnnnnnnnnnnnnnnnnnnnnnnnnnnnnnnnnnnnnnnnnnnnnnnnnnnnnnnnnnnnnnnnnnnnnnnnnnnnnnnnnnnnnnnnnnnnnnnnnnnnnnnnnnnnnnnnnnnnnnnnnnnnnnnnnnnnnnnnnnnnnnnnnnnnnnnnnnnnnnnnnnnnnnnnnnnnnnnnnnnnnnnnnnnnnnnnnnnnnnnnnnnnnnnnnnnnnnnnnnnnnnnnnnnnnnnnnnnnnnnnnnnnnnnnnnnnnnnnnnnnnnnnnnnnnnnnnnnnnnnnnnnnnnnnnnnnnnnnnnnnnnnnnnnnnnnnnnnnnnnnnnnnnnnnnnnnnnnnnnnnnnnnnnnnnnnnnnnnnnnnnnnnnnnnnnnnnnnnnnnnnnnnnnnnnnnnnnnnnnnnnnnnnnnnnnnnnnnnnnnnnnnnnnnnnnnnnnnnnnnnnnnnnnnnnnnnnnnnnnnnnnnnnnnnnnnnnnnnnnnnnnnnnnnnnnnnnnnnnnnnnnnnnnnnnnnnnnnnnnnnnnnnnnnnnnnnnnnnnnnnnnnnnnnnnnnnnnnnnnnnnnnnnnnnnnnnnnnnnnnnnnnnnnnnnnnnnnnnnnnnnnnnnnnnnnnnnnnnnnnnnnnnnnnnnnnnnnnnnnnnnnnnnnnnnnnnnnnnnnnnnnnnnnnnnnnnnnnnnnnnnnnnnnnnnnnnnnnnnnnnnnnnnnnnnnnnnnnnnnnnnnnnnnnnnnnnnnnnnnnnnnnnnnnnnnnnnnnnnnnnnnnnnnnnnnnnnnnnnnnnnnnnnnnnnnnnnnnnnnnnnnnnnnnnnnnnnnnnnnnnnnnnnnnnnnnnnnnnnnnnnnnnnnnnnnnnnnnnnnnnnnnnnnnnnnnnnnnnnnnnnnnnnnnnnnnnnnnnnnnnnnnnnnnnnnnnnnnnnnnnnnnnnnnnnnnnnnnnnnnnnnnnnnnnnnnnnnnnnnnnnnnnnnnnnnnnnnnnnnnnnnnnnnnnnnnnnnnnnnnnnnnnnnnnnnnnnnnnnnnnnnnnnnnnnnnnnnnnnnnnnnnnnnnnnnnnnnnnnnnnnnnnnnnnnnnnnnnnnnnnnnnnnnnnnnnnnnnnnnnnnnnnnnnnnnnnnnnnnnnnnnnnnnnnnnnnnnnnnnnnnnnnnnnnnnnnnnnnnnnnnnnnnnnnnnnnnnnnnnnnnnnnnnnnnnnnnnnnnnnnnnnnnnnnnnnnnnnnnnnnnnnnnnnnnnnnnnnnnnnnnnnnnnnnnnnnnnnnnnnnnnnnnnnnnnnnnnnnnnnnnnnnnnnnnnnnnnnnnnnnnnnnnnnnnnnnnnnnnnnnnnnnnnnnnnnnnnnnnnnnnnnnnnnnnnnnnnnnnnnnnnnnnnnnnnnnnnnnnnnnnnnnnnnnnnnnnnnnnnnnnnnnnnnnnnnnnnnnnnnnnnnnnnnnnnnnnnnnnnnnnnnnnnnnnnnnnnnnnnnnnnnnnnnnnnnnnnnnnnnnnnnnnnnnnnnnnnnnnnnnnnnnnnnnnnnnnnnnnnnnnnnnnnnnnnnnnnnnnnnnnnnnnnnnnnnnnnnnnnnnnnnnnnnnnnnnnnnnnnnnnnnnnnnnnnnnnnnnnnnnnnnnnnnnnnnnnnnnnnnnnnnnnnnnnnnnnnnnnnnnnnnnnnnnnnnnnnnnnnnnnnnnnnnnnnnnnnnnnnnnnnnnnnnnnnnnnnnnnnnnnnnnnnnnnnnnnnnnnnnnnnnnnnnnnnnnnnnnnnnnnnnnnnnnnnnnnnnnnnnnnnnnnnnnnnnnnnnnnnnnnnnnnnnnnnnnnnnnnnnnnnnnnnnnnnnnnnnnnnnnnnnnnnnnnnnnnnnnnnnnnnnnnnnnnnnnnnnnnnnnnnnnnnnnnnnnnnnnnnnnnnnnnnnnnnnnnnnnnnnnnnnnnnnnnnnnnnnnnnnnnnnnnnnnnnnnnnnnnnnnnnnnnnnnnnnnnnnnnnnnnnnnnnnnnnnnnnnnnnnnnnnnnnnnnnnnnnnnnnnnnnnnnnnnnnnnnnnnnnnnnnnnnnnnnnnnnnnnnnnnnnnnnnnnnnnnnnnnnnnnnnnnnnnnnnnnnnnnnnnnnnnnnnnnnnnnnnnnnnnnnnnnnnnnnnnnnnnnnnnnnnnnnnnnnnnnnnnnnnnnnnnnnnnnnnnnnnnnnnnnnnnnnnnnnnnnnnnnnnnnnnnnnnnnnnnnnnnnnnnnnnnnnnnnnnnnnnnnnnnnnnnnnnnnnnnnnnnnnnnnnnnnnnnnnnnnnnnnnnnnnnnnnnnnnnnnnnnnnnnnnnnnnnnnnnnnnnnnnnnnnnnnnnnnnnnnnnnnnnnnnnnnnnnnnnnnnnnnnnnnnnnnnnnnnnnnnnnnnnnnnnnnnnnnnnnnnnnnnnnnnnnnnnnnnnnnnnnnnnnnnnnnnnnnnnnnnnnnnnnnnnnnnnnnnnnnnnnnnnnnnnnnnnnnnnnnnnnnnnnnnnnnnnnnnnnnnnnnnnnnnnnnnnnnnnnnnnnnnnnnnnnnnnnnnnnnnnnnnnnnnnnnnnnnnnnnnnnnnnnnnnnnnnnnnnnnnnnnnnnnnnnnnnnnnnnnnnnnnnnnnnnnnnnnnnnnnnnnnnnnnnnnnnnnnnnnnnnnnnnnnnnnnnnnnnnnnnnnnnnnnnnnnnnnnnnnnnnnnnnnnnnnnnnnnnnnnnnnnnnnnnnnnnnnnnnnnnnnnnnnnnnnnnnnnnnnnnnnnnnnnnnnnnnnnnnnnnnnnnnnnnnnnnnnnnnnnnnnnnnnnnnnnnnnnnnnnnnnnnnnnnnnnnnnnnnnnnnnnnnnnnnnnnnnnnnnnnnnnnnnnnnnnnnnnnnnnnnnnnnnnnnnnnnnnnnnnnnnnnnnnnnnnnnnnnnnnnnnnnnnnnnnnnnnnnnnnnnnnnnnnnnnnnnnnnnnnnnnnnnnnnnnnnnnnnnnnnnnnnnnnnnnnnnnnnnnnnnnnnnnnnnnnnnnnnnnnnnnnnnnnnnnnnnnnnnnnnnnnnnnnnnnnnnnnnnnnnnnnnnnnnnnnnnnnnnnnnnnnnnnnnnnnnnnnnnnnnnnnnnnnnnnnnnnnnnnnnnnnnnnnnnnnnnnnnnnnnnnnnnnnnnnnnnnnnnnnnnnnnnnnnnnnnnnnnnnnnnnnnnnnnnnnnnnnnnnnnnnnnnnnnnnnnnnnnnnnnnnnnnnnnnnnnnnnnnnnnnnnnnnnnnnnnnnnnnnnnnnnnnnnnnnnnnnnnnnnnnnnnnnnnnnnnnnnnnnnnnnnnnnnnnnnnnnnnnnnnnnnnnnnnnnnnnnnnnnnnnnnnnnnnnnnnnnnnnnnnnnnnnnnnnnnnnnnnnnnnnnnnnnnnnnnnnnnnnnnnnnnnnnnnnnnnnnnnnnnnnnnnnnnnnnnnnnnnnnnnnnnnnnnnnnnnnnnnnnnnnnnnnnnnnnnnnnnnnnnnnnnnnnnnnnnnnnnnnnnnnnnnnnnnnnnnnnnnnnnnnnnnnnnnnnnnnnnnnnnnnnnnnnnnnnnnnnnnnnnnnnnnnnnnnnnnnnnnnnnnnnnnnnnnnnnnnnnnnnnnnnnnnnnnnnnnnnnnnnnnnnnnnnnnnnnnnnnnnnnnnnnnnnnnnnnnnnnnnnnnnnnnnnnnnnnnnnnnnnnnnnnnnnnnnnnnnnnnnnnnnnnnnnnnnnnnnnnnnnnnnnnnnnnnnnnnnnnnnnnnnnnnnnnnnnnnnnnnnnnnnnnnnnnnnnnnnnnnnnnnnnnnnnnnnnnnnnnnnnnnnnnnnnnnnnnnnnnnnnnnnnnnnnnnnnnnnnnnnnnnnnnnnnnnnnnnnnnnnnnnnnnnnnnnnnnnnnnnnnnnnnnnnnnnnnnnnnnnnnnnnnnnnnnnnnnnnnnnnnnnnnnnnnnnnnnnnnnnnnnnnnnnnnnnnnnnnnnnnnnnnnnnnnnnnnnnnnnnnnnnnnnnnnnnnnnnnnnnnnnnnnnnnnnnnnnnnnnnnnnnnnnnnnnnnnnnnnnnnnnnnnnnnnnnnnnnnnnnnnnnnnnnnnnnnnnnnnnnnnnnnnnnnnnnnnnnnnnnnnnnnnnnnnnnnnnnnnnnnnnnnnnnnnnnnnnnnnnnnnnnnnnnnnnnnnnnnnnnnnnnnnnnnnnnnnnnnnnnnnnnnnnnnnnnnnnnnnnnnnnnnnnnnnnnnnnnnnnnnnnnnnnnnnnnnnnnnnnnnnnnnnnnnnnnnnnnnnnnnnnnnnnnnnnnnnnnnnnnnnnnnnnnnnnnnnnnnnnnnnnnnnnnnnnnnnnnnnnnnnnnnnnnnnnnnnnnnnnnnnnnnnnnnnnnnnnnnnnnnnnnnnnnnnnnnnnnnnnnnnnnnnnnnnnnnnnnnnnnnnnnnnnnnnnnnnnnnnnnnnnnnnnnnnnnnnnnnnnnnnnnnnnnnnnnnnnnnnnnnnnnnnnnnnnnnnnnnnnnnnnnnnnnnnnnnnnnnnnnnnnnnnnnnnnnnnnnnnnnnnnnnnnnnnnnnnnnnnnnnnnnnnnnnnnnnnnnnnnnnnnnnnnnnnnnnnnnnnnnnnnnnnnnnnnnnnnnnnnnnnnnnnnnnnnnnnnnnnnnnnnnnnnnnnnnnnnnnnnnnnnnnnnnnnnnnnnnnnnnnnnnnnnnnnnnnnnnnnnnnnnnnnnnnnnnnnnnnnnnnnnnnnnnnnnnnnnnnnnnnnnnnnnnnnnnnnnnnnnnnnnnnnnnnnnnnnnnnnnnnnnnnnnnnnnnnnnnnnnnnnnnnnnnnnnnnnnnnnnnnnnnnnnnnnnnnnnnnnnnnnnnnnnnnnnnnnnnnnnnnnnnnnnnnnnnnnnnnnnnnnnnnnnnnnnnnnnnnnnnnnnnnnnnnnnnnnnnnnnnnnnnnnnnnnnnnnnnnnnnnnnnnnnnnnnnnnnnnnnnnnnnnnnnnnnnnnnnnnnnnnnnnnnnnnnnnnnnnnnnnnnnnnnnnnnnnnnnnnnnnnnnnnnnnnnnnnnnnnnnnnnnnnnnnnnnnnnnnnnnnnnnnnnnnnnnnnnnnnnnnnnnnnnnnnnnnnnnnnnnnnnnnnnnnnnnnnnnnnnnnnnnnnnnnnnnnnnnnnnnnnnnnnnnnnnnnnnnnnnnnnnnnnnnnnnnnnnnnnnnnnnnnnnnnnnnnnnnnnnnnnnnnnnnnnnnnnnnnnnnnnnnnnnnnnnnnnnnnnnnnnnnnnnnnnnnnnnnnnnnnnnnnnnnnnnnnnnnnnnnnnnnnnnnnnnnnnnnnnnnnnnnnnnnnnnnnnnnnnnnnnnnnnnnnnnnnnnnnnnnnnnnnnnnnnnnnnnnnnnnnnnnnnnnnnnnnnnnnnnnnnnnnnnnnnnnnnnnnnnnnnnnnnnnnnnnnnnnnnnnnnnnnnnnnnnnnnnnnnnnnnnnnnnnnnnnnnnnnnnnnnnnnnnnnnnnnnnnnnnnnnnnnnnnnnnnnnnnnnnnnnnnnnnnnnnnnnnnnnnnnnnnnnnnnnnnnnnnnnnnnnnnnnnnnnnnnnnnnnnnnnnnnnnnnnnnnnnnnnnnnnnnnnnnnnnnnnnnnnnnnnnnnnnnnnnnnnnnnnnnnnnnnnnnnnnnnnnnnnnnnnnnnnnnnnnnnnnnnnnnnnnnnnnnnnnnnnnnnnnnnnnnnnnnnnnnnnnnnnnnnnnnnnnnnnnnnnnnnnnnnnnnnnnnnnnnnnnnnnnnnnnnnnnnnnnnnnnnnnnnnnnnnnnnnnnnnnnnnnnnnnnnnnnnnnnnnnnnnnnnnnnnnnnnnnnnnnnnnnnnnnnnnnnnnnnnnnnnnnnnnnnnnnnnnnnnnnnnnnnnnnnnnnnnnnnnnnnnnnnnnnnnnnnnnnnnnnnnnnnnnnnnnnnnnnnnnnnnnnnnnnnnnnnnnnnnnnnnnnnnnnnnnnnnnnnnnnnnnnnnnnnnnnnnnnnnnnnnnnnnnnnnnnnnnnnnnnnnnnnnnnnnnnnnnnnnnnnnnnnnnnnnnnnnnnnnnnnnnnnnnnnnnnnnnnnnnnnnnnnnnnnnnnnnnnnnnnnnnnnnnnnnnnnnnnnnnnnnnnnnnnnnnnnnnnnnnnnnnnnnnnnnnnnnnnnnnnnnnnnnnnnnnnnnnnnnnnnnnnnnnnnnnnnnnnnnnnnnnnnnnnnnnnnnnnnnnnnnnnnnnnnnnnnnnnnnnnnnnnnnnnnnnnnnnnnnnnnnnnnnnnnnnnnnnnnnnnnnnnnnnnnnnnnnnnnnnnnnnnnnnnnnnnnnnnnnnnnnnnnnnnnnnnnnnnnnnnnnnnnnnnnnnnnnnnnnnnnnnnnnnnnnnnnnnnnnnnnnnnnnnnnnnnnnnnnnnnnnnnnnnnnnnnnnnnnnnnnnnnnnnnnnnnnnnnnnnnnnnnnnnnnnnnnnnnnnnnnnnnnnnnnnnnnnnnnnnnnnnnnnnnnnnnnnnnnnnnnnnnnnnnnnnnnnnnnnnnnnnnnnnnnnnnnnnnnnnnnnnnnnnnnnnnnnnnnnnnnnnnnnnnnnnnnnnnnnnnnnnnnnnnnnnnnnnnnnnnnnnnnnnnnnnnnnnnnnnnnnnnnnnnnnnnnnnnnnnnnnnnnnnnnnnnnnnnnnnnnnnnnnnnnnnnnnnnnnnnnnnnnnnnnnnnnnnnnnnnnnnnnnnnnnnnnnnnnnnnnnnnnnnnnnnnnnnnnnnnnnnnnnnnnnnnnnnnnnnnnnnnnnnnnnnnnnnnnnnnnnnnnnnnnnnnnnnnnnnnnnnnnnnnnnnnnnnnnnnnnnnnnnnnnnnnnnnnnnnnnnnnnnnnnnnnnnnnnnnnnnnnnnnnnnnnnnnnnnnnnnnnnnnnnnnnnnnnnnnnnnnnnnnnnnnnnnnnnnnnnnnnnnnnnnnnnnnnnnnnnnnnnnnnnnnnnnnnnnnnnnnnnnnnnnnnnnnnnnnnnnnnnnnnnnnnnnnnnnnnnnnnnnnnnnnnnnnnnnnnnnnnnnnnnnnnnnnnnnnnnnnnnnnnnnnnnnnnnnnnnnnnnnnnnnnnnnnnnnnnnnnnnnnnnnnnnnnnnnnnnnnnnnnnnnnnnnnnnnnnnnnnnnnnnnnnnnnnnnnnnnnnnnnnnnnnnnnnnnnnnnnnnnnnnnnnnnnnnnnnnnnnnnnnnnnnnnnnnnnnnnnnnnnnnnnnnnnnnnnnnnnnnnnnnnnnnnnnnnnnnnnnnnnnnnnnnnnnnnnnnnnnnnnnnnnnnnnnnnnnnnnnnnnnnnnnnnnnnnnnnnnnnnnnnnnnnnnnnnnnnnnnnnnnnnnnnnnnnnnnnnnnnnnnnnnnnnnnnnnnnnnnnnnnnnnnnnnnnnnnnnnnnnnnnnnnnnnnnnnnnnnnnnnnnnnnnnnnnnnnnnnnnnnnnnnnnnnnnnnnnnnnnnnnnnnnnnnnnnnnnnnnnnnnnnnnnnnnnnnnnnnnnnnnnnnnnnnnnnnnnnnnnnnnnnnnnnnnnnnnnnnnnnnnnnnnnnnnnnnnnnnnnnnnnnnnnnnnnnnnnnnnnnnnnnnnnnnnnnnnnnnnnnnnnnnnnnnnnnnnnnnnnnnnnnnnnnnnnnnnnnnnnnnnnnnnnnnnnnnnnnnnnnnnnnnnnnnnnnnnnnnnnnnnnnnnnnnnnnnnnnnnnnnnnnnnnnnnnnnnnnnnnnnnnnnnnnnnnnnnnnnnnnnnnnnnnnnnnnnnnnnnnnnnnnnnnnnnnnnnnnnnnnnnnnnnnnnnnnnnnnnnnnnnnnnnnnnnnnnnnnnnnnnnnnnnnnnnnnnnnnnnnnnnnnnnnnnnnnnnnnnnnnnnnnnnnnnnnnnnnnnnnnnnnnnnnnnnnnnnnnnnnnnnnnnnnnnnnnnnnnnnnnnnnnnnnnnnnnnnnnnnnnnnnnnnnnnnnnnnnnnnnnnnnnnnnnnnnnnnnnnnnnnnnnnnnnnnnnnnnnnnnnnnnnnnnnnnnnnnnnnnnnnnnnnnnnnnnnnnnnnnnnnnnnnnnnnnnnnnnnnnnnnnnnnnnnnnnnnnnnnnnnnnnnnnnnnnnnnnnnnnnnnnnnnnnnnnnnnnnnnnnnnnnnnnnnnnnnnnnnnnnnnnnnnnnnnnnnnnnnnnnnnnnnnnnnnnnnnnnnnnnnnnnnnnnnnnnnnnnnnnnnnnnnnnnnnnnnnnnnnnnnnnnnnnnnnnnnnnnnnnnnnnnnnnnnnnnnnnnnnnnnnnnnnnnnnnnnnnnnnnnnnnnnnnnnnnnnnnnnnnnnnnnnnnnnnnnnnnnnnnnnnnnnnnnnnnnnnnnnnnnnnnnnnnnnnnnnnnnnnnnnnnnnnnnnnnnnnnnnnnnnnnnnnnnnnnnnnnnnnnnnnnnnnnnnnnnnnnnnnnnnnnnnnnnnnnnnnnnnnnnnnnnnnnnnnnnnnnnnnnnnnnnnnnnnnnnnnnnnnnnnnnnnnnnnnnnnnnnnnnnnnnnnnnnnnnnnnnnnnnnnnnnnnnnnnnnnnnnnnnnnnnnnnnnnnnnnnnnnnnnnnnnnnnnnnnnnnnnnnnnnnnnnnnnnnnnnnnnnnnnnnnnnnnnnnnnnnnnnnnnnnnnnnnnnnnnnnnnnnnnnnnnnnnnnnnnnnnnnnnnnnnnnnnnnnnnnnnnnnnnnnnnnnnnnnnnnnnnnnnnnnnnnnnnnnnnnnnnnnnnnnnnnnnnnnnnnnnnnnnnnnnnnnnnnnnnnnnnnnnnnnnnnnnnnnnnnnnnnnnnnnnnnnnnnnnnnnnnnnnnnnnnnnnnnnnnnnnnnnnnnnnnnnnnnnnnnnnnnnnnnnnnnnnnnnnnnnnnnnnnnnnnnnnnnnnnnnnnnnnnnnnnnnnnnnnnnnnnnnnnnnnnnnnnnnnnnnnnnnnnnnnnnnnnnnnnnnnnnnnnnnnnnnnnnnnnnnnnnnnnnnnnnnnnnnnnnnnnnnnnnnnnnnnnnnnnnnnnnnnnnnnnnnnnnnnnnnnnnnnnnnnnnnnnnnnnnnnnnnnnnnnnnnnnnnnnnnnnnnnnnnnnnnnnnnnnnnnnnnnnnnnnnnnnnnnnnnnnnnnnnnnnnnnnnnnnnnnnnnnnnnnnnnnnnnnnnnnnnnnnnnnnnnnnnnnnnnnnnnnnnnnnnnnnnnnnnnnnnnnnnnnnnnnnnnnnnnnnnnnnnnnnnnnnnnnnnnnnnnnnnnnnnnnnnnnnnnnnnnnnnnnnnnnnnnnnnnnnnnnnnnnnnnnnnnnnnnnnnnnnnnnnnnnnnnnnnnnnnnnnnnnnnnnnnnnnnnnnnnnnnnnnnnnnnnnnnnnnnnnnnnnnnnnnnnnnnnnnnnnnnnnnnnnnnnnnnnnnnnnnnnnnnnnnnnnnnnnnnnnnnnnnnnnnnnnnnnnnnnnnnnnnnnnnnnnnnnnnnnnnnnnnnnnnnnnnnnnnnnnnnnnnnnnnnnnnnnnnnnnnnnnnnnnnnnnnnnnnnnnnnnnnnnnnnnnnnnnnnnnnnnnnnnnnnnnnnnnnnnnnnnnnnnnnnnnnnnnnnnnnnnnnnnnnnnnnnnnnnnnnnnnnnnnnnnnnnnnnnnnnnnnnnnnnnnnnnnnnnnnnnnnnnnnnnnnnnnnnnnnnnnnnnnnnnnnnnnnnnnnnnnnnnnnnnnnnnnnnnnnnnnnnnnnnnnnnnnnnnnnnnnnnnnnnnnnnnnnnnnnnnnnnnnnnnnnnnnnnnnnnnnnnnnnnnnnnnnnnnnnnnnnnnnnnnnnnnnnnnnnnnnnnnnnnnnnnnnnnnnnnnnnnnnnnnnnnnnnnnnnnnnnnnnnnnnnnnnnnnnnnnnnnnnnnnnnnnnnnnnnnnnnnnnnnnnnnnnnnnnnnnnnnnnnnnnnnnnnnnnnnnnnnnnnnnnnnnnnnnnnnnnnnnnnnnnnnnnnnnnnnnnnnnnnnnnnnnnnnnnnnnnnnnnnnnnnnnnnnnnnnnnnnnnnnnnnnnnnnnnnnnnnnnnnnnnnnnnnnnnnnnnnnnnnnnnnnnnnnnnnnnnnnnnnnnnnnnnnnnnnnnnnnnnnnnnnnnnnnnnnnnnnnnnnnnnnnnnnnnnnnnnnnnnnnnnnnnnnnnnnnnnnnnnnnnnnnnnnnnnnnnnnnnnnnnnnnnnnnnnnnnnnnnnnnnnnnnnnnnnnnnnnnnnnnnnnnnnnnnnnnnnnnnnnnnnnnnnnnnnnnnnnnnnnnnnnnnnnnnnnnnnnnnnnnnnnnnnnnnnnnnnnnnnnnnnnnnnnnnnnnnnnnnnnnnnnnnnnnnnnnnnnnnnnnnnnnnnnnnnnnnnnnnnnnnnnnnnnnnnnnnnnnnnnnnnnnnnnnnnnnnnnnnnnnnnnnnnnnnnnnnnnnnnnnnnnnnnnnnnnnnnnnnnnnnnnnnnnnnnnnnnnnnnnnnnnnnnnnnnnnnnnnnnnnnnnnnnnnnnnnnnnnnnnnnnnnnnnnnnnnnnnnnnnnnnnnnnnnnnnnnnnnnnnnnnnnnnnnnnnnnnnnnnnnnnnnnnnnnnnnnnnnnnnnnnnnnnnnnnnnnnnnnnnnnnnnnnnnnnnnnnnnnnnnnnnnnnnnnnnnnnnnnnnnnnnnnnnnnnnnnnnnnnnnnnnnnnnnnnnnnnnnnnnnnnnnnnnnnnnnnnnnnnnnnnnnnnnnnnnnnnnnnnnnnnnnnnnnnnnnnnnnnnnnnnnnnnnnnnnnnnnnnnnnnnnnnnnnnnnnnnnnnnnnnnnnnnnnnnnnnnnnnnnnnnnnnnnnnnnnnnnnnnnnnnnnnnnnnnnnnnnnnnnnnnnnnnnnnnnnnnnnnnnnnnnnnnnnnnnnnnnnnnnnnnnnnnnnnnnnnnnnnnnnnnnnnnnnnnnnnnnnnnnnnnnnnnnnnnnnnnnnnnnnnnnnnnnnnnnnnnnnnnnnnnnnnnnnnnnnnnnnnnnnnnnnnnnnnnnnnnnnnnnnnnnnnnnnnnnnnnnnnnnnnnnnnnnnnnnnnnnnnnnnnnnnnnnnnnnnnnnnnnnnnnnnnnnnnnnnnnnnnnnnnnnnnnnnnnnnnnnnnnnnnnnnnnnnnnnnnnnnnnnnnnnnnnnnnnnnnnnnnnnnnnnnnnnnnnnnnnnnnnnnnnnnnnnnnnnnnnnnnnnnnnnnnnnnnnnnnnnnnnnnnnnnnnnnnnnnnnnnnnnnnnnnnnnnnnnnnnnnnnnnnnnnnnnnnnnnnnnnnnnnnnnnnnnnnnnnnnnnnnnnnnnnnnnnnnnnnnnnnnnnnnnnnnnnnnnnnnnnnnnnnnnnnnnnnnnnnnnnnnnnnnnnnnnnnnnnnnnnnnnnnnnnnnnnnnnnnnnnnnnnnnnnnnnnnnnnnnnnnnnnnnnnnnnnnnnnnnnnnnnnnnnnnnnnnnnnnnnnnnnnnnnnnnnnnnnnnnnnnnnnnnnnnnnnnnnnnnnnnnnnnnnnnnnnnnnnnnnnnnnnnnnnnnnnnnnnnnnnnnnnnnnnnnnnnnnnnnnnnnnnnnnnnnnnnnnnnnnnnnnnnnnnnnnnnnnnnnnnnnnnnnnnnnnnnnnnnnnnnnnnnnnnnnnnnnnnnnnnnnnnnnnnnnnnnnnnnnnnnnnnnnnnnnnnnnnnnnnnnnnnnnnnnnnnnnnnnnnnnnnnnnnnnnnnnnnnnnnnnnnnnnnnnnnnnnnnnnnnnnnnnnnnnnnnnnnnnnnnnnnnnnnnnnnnnnnnnnnnnnnnnnnnnnnnnnnnnnnnnnnnnnnnnnnnnnnnnnnnnnnnnnnnnnnnnnnnnnnnnnnnnnnnnnnnnnnnnnnnnnnnnnnnnnnnnnnnnnnnnnnnnnnnnnnnnnnnnnnnnnnnnnnnnnnnnnnnnnnnnnnnnnnnnnnnnnnnnnnnnnnnnnnnnnnnnnnnnnnnnnnnnnnnnnnnnnnnnnnnnnnnnnnnnnnnnnnnnnnnnnnnnnnnnnnnnnnnnnnnnnnnnnnnnnnnnnnnnnnnnnnnnnnnnnnnnnnnnnnnnnnnnnnnnnnnnnnnnnnnnnnnnnnnnnnnnnnnnnnnnnnnnnnnnnnnnnnnnnnnnnnnnnnnnnnnnnnnnnnnnnnnnnnnnnnnnnnnnnnnnnnnnnnnnnnnnnnnnnnnnnnnnnnnnnnnnnnnnnnnnnnnnnnnnnnnnnnnnnnnnnnnnnnnnnnnnnnnnnnnnnnnnnnnnnnnnnnnnnnnnnnnnnnnnnnnnnnnnnnnnnnnnnnnnnnnnnnnnnnnnnnnnnnnnnnnnnnnnnnnnnnnnnnnnnnnnnnnnnnnnnnnnnnnnnnnnnnnnnnnnnnnnnnnnnnnnnnnnnnnnnnnnnnnnnnnnnnnnnnnnnnnnnnnnnnnnnnnnnnnnnnnnnnnnnnnnnnnnnnnnnnnnnnnnnnnnnnnnnnnnnnnnnnnnnnnnnnnnnnnnnnnnnnnnnnnnnnnnnnnnnnnnnnnnnnnnnnnnnnnnnnnnnnnnnnnnnnnnnnnnnnnnnnnnnnnnnnnnnnnnnnnnnnnnnnnnnnnnnnnnnnnnnnnnnnnnnnnnnnnnnnnnnnnnnnnnnnnnnnnnnnnnnnnnnnnnnnnnnnnnnnnnnnnnnnnnnnnnnnnnnnnnnnnnnnnnnnnnnnnnnnnnnnnnnnnnnnnnnnnnnnnnnnnnnnnnnnnnnnnnnnnnnnnnnnnnnnnnnnnnnnnnnnnnnnnnnnnnnnnnnnnnnnnnnnnnnnnnnnnnnnnnnnnnnnnnnnnnnnnnnnnnnnnnnnnnnnnnnnnnnnnnnnnnnnnnnnnnnnnnnnnnnnnnnnnnnnnnnnnnnnnnnnnnnnnnnnnnnnnnnnnnnnnnnnnnnnnnnnnnnnnnnnnnnnnnnnnnnnnnnnnnnnnnnnnnnnnnnnnnnnnnnnnnnnnnnnnnnnnnnnnnnnnnnnnnnnnnnnnnnnnnnnnnnnnnnnnnnnnnnnnnnnnnnnnnnnnnnnnnnnnnnnnnnnnnnnnnnnnnnnnnnnnnnnnnnnnnnnnnnnnnnnnnnnnnnnnnnnnnnnnnnnnnnnnnnnnnnnnnnnnnnnnnnnnnnnnnnnnnnnnnnnnnnnnnnnnnnnnnnnnnnnnnnnnnnnnnnnnnnnnnnnnnnnnnnnnnnnnnnnnnnnnnnnnnnnnnnnnnnnnnnnnnnnnnnnnnnnnnnnnnnnnnnnnnnnnnnnnnnnnnnnnnnnnnnnnnnnnnnnnnnnnnnnnnnnnnnnnnnnnnnnnnnnnnnnnnnnnnnnnnnnnnnnnnnnnnnnnnnnnnnnnnnnnnnnnnnnnnnnnnnnnnnnnnnnnnnnnnnnnnnnnnnnnnnnnnnnnnnnnnnnnnnnnnnnnnnnnnnnnnnnnnnnnnnnnnnnnnnnnnnnnnnnnnnnnnnnnnnnnnnnnnnnnnnnnnnnnnnnnnnnnnnnnnnnnnnnnnnnnnnnnnnnnnnnnnnnnnnnnnnnnnnnnnnnnnnnnnnnnnnnnnnnnnnnnnnnnnnnnnnnnnnnnnnnnnnnnnnnnnnnnnnnnnnnnnnnnnnnnnnnnnnnnnnnnnnnnnnnnnnnnnnnnnnnnnnnnnnnnnnnnnnnnnnnnnnnnnnnnnnnnnnnnnnnnnnnnnnnnnnnnnnnnnnnnnnnnnnnnnnnnnnnnnnnnnnnnnnnnnnnnnnnnnnnnnnnnnnnnnnnnnnnnnnnnnnnnnnnnnnnnnnnnnnnnnnnnnnnnnnnnnnnnnnnnnnnnnnnnnnnnnnnnnnnnnnnnnnnnnnnnnnnnnnnnnnnnnnnnnnnnnnnnnnnnnnnnnnnnnnnnnnnnnnnnnnnnnnnnnnnnnnnnnnnnnnnnnnnnnnnnnnnnnnnnnnnnnnnnnnnnnnnnnnnnnnnnnnnnnnnnnnnnnnnnnnnnnnnnnnnnnnnnnnnnnnnnnnnnnnnnnnnnnnnnnnnnnnnnnnnnnnnnnnnnnnnnnnnnnnnnnnnnnnnnnnnnnnnnnnnnnnnnnnnnnnnnnnnnnnnnnnnnnnnnnnnnnnnnnnnnnnnnnnnnnnnnnnnnnnnnnnnnnnnnnnnnnnnnnnnnnnnnnnnnnnnnnnnnnnnnnnnnnnnnnnnnnnnnnnnnnnnnnnnnnnnnnnnnnnnnnnnnnnnnnnnnnnnnnnnnnnnnnnnnnnnnnnnnnnnnnnnnnnnnnnnnnnnnnnnnnnnnnnnnnnnnnnnnnnnnnnnnnnnnnnnnnnnnnnnnnnnnnnnnnnnnnnnnnnnnnnnnnnnnnnnnnnnnnnnnnnnnnnnnnnnnnnnnnnnnnnnnnnnnnnnnnnnnnnnnnnnnnnnnnnnnnnnnnnnnnnnnnnnnnnnnnnnnnnnnnnnnnnnnnnnnnnnnnnnnnnnnnnnnnnnnnnnnnnnnnnnnnnnnnnnnnnnnnnnnnnnnnnnnnnnnnnnnnnnnnnnnnnnnnnnnnnnnnnnnnnnnnnnnnnnnnnnnnnnnnnnnnnnnnnnnnnnnnnnnnnnnnnnnnnnnnnnnnnnnnnnnnnnnnnnnnnnnnnnnnnnnnnnnnnnnnnnnnnnnnnnnnnnnnnnnnnnnnnnnnnnnnnnnnnnnnnnnnnnnnnnnnnnnnnnnnnnnnnnnnnnnnnnnnnnnnnnnnnnnnnnnnnnnnnnnnnnnnnnnnnnnnnnnnnnnnnnnnnnnnnnnnnnnnnnnnnnnnnnnnnnnnnnnnnnnnnnnnnnnnnnnnnnnnnnnnnnnnnnnnnnnnnnnnnnnnnnnnnnnnnnnnnnnnnnnnnnnnnnnnnnnnnnnnnnnnnnnnnnnnnnnnnnnnnnnnnnnnnnnnnnnnnnnnnnnnnnnnnnnnnnnnnnnnnnnnnnnnnnnnnnnnnnnnnnnnnnnnnnnnnnnnnnnnnnnnnnnnnnnnnnnnnnnnnnnnnnnnnnnnnnnnnnnnnnnnnnnnnnnnnnnnnnnnnnnnnnnnnnnnnnnnnnnnnnnnnnnnnnnnnnnnnnnnnnnnnnnnnnnnnnnnnnnnnnnnnnnnnnnnnnnnnnnnnnnnnnnnnnnnnnnnnnnnnnnnnnnnnnnnnnnnnnnnnnnnnnnnnnnnnnnnnnnnnnnnnnnnnnnnnnnnnnnnnnnnnnnnnnnnnnnnnnnnnnnnnnnnnnnnnnnnnnnnnnnnnnnnnnnnnnnnnnnnnnnnnnnnnnnnnnnnnnnnnnnnnnnnnnnnnnnnnnnnnnnnnnnnnnnnnnnnnnnnnnnnnnnnnnnnnnnnnnnnnnnnnnnnnnnnnnnnnnnnnnnnnnnnnnnnnnnnnnnnnnnnnnnnnnnnnnnnnnnnnnnnnnnnnnnnnnnnnnnnnnnnnnnnnnnnnnnnnnnnnnnnnnnnnnnnnnnnnnnnnnnnnnnnnnnnnnnnnnnnnnnnnnnnnnnnnnnnnnnnnnnnnnnnnnnnnnnnnnnnnnnnnnnnnnnnnnnnnnnnnnnnnnnnnnnnnnnnnnnnnnnnnnnnnnnnnnnnnnnnnnnnnnnnnnnnnnnnnnnnnnnnnnnnnnnnnnnnnnnnnnnnnnnnnnnnnnnnnnnnnnnnnnnnnnnnnnnnnnnnnnnnnnnnnnnnnnnnnnnnnnnnnnnnnnnnnnnnnnnnnnnnnnnnnnnnnnnnnnnnnnnnnnnnnnnnnnnnnnnnnnnnnnnnnnnnnnnnnnnnnnnnnnnnnnnnnnnnnnnnnnnnnnnnnnnnnnnnnnnnnnnnnnnnnnnnnnnnnnnnnnnnnnnnnnnnnnnnnnnnnnnnnnnnnnnnnnnnnnnnnnnnnnnnnnnnnnnnnnnnnnnnnnnnnnnnnnnnnnnnnnnnnnnnnnnnnnnnnnnnnnnnnnnnnnnnnnnnnnnnnnnnnnnnnnnnnnnnnnnnnnnnnnnnnnnnnnnnnnnnnnnnnnnnnnnnnnnnnnnnnnnnnnnnnnnnnnnnnnnnnnnnnnnnnnnnnnnnnnnnnnnnnnnnnnnnnnnnnnnnnnnnnnnnnnnnnnnnnnnnnnnnnnnnnnnnnnnnnnnnnnnnnnnnnnnnnnnnnnnnnnnnnnnnnnnnnnnnnnnnnnnnnnnnnnnnnnnnnnnnnnnnnnnnnnnnnnnnnnnnnnnnnnnnnnnnnnnnnnnnnnnnnnnnnnnnnnnnnnnnnnnnnnnnnnnnnnnnnnnnnnnnnnnnnnnnnnnnnnnnnnnnnnnnnnnnnnnnnnnnnnnnnnnnnnnnnnnnnnnnnnnnnnnnnnnnnnnnnnnnnnnnnnnnnnnnnnnnnnnnnnnnnnnnnnnnnnnnnnnnnnnnnnnnnnnnnnnnnnnnnnnnnnnnnnnnnnnnnnnnnnnnnnnnnnnnnnnnnnnnnnnnnnnnnnnnnnnnnnnnnnnnnnnnnnnnnnnnnnnnnnnnnnnnnnnnnnnnnnnnnnnnnnnnnnnnnnnnnnnnnnnnnnnnnnnnnnnnnnnnnnnnnnnnnnnnnnnnnnnnnnnnnnnnnnnnnnnnnnnnnnnnnnnnnnnnnnnnnnnnnnnnnnnnnnnnnnnnnnnnnnnnnnnnnnnnnnnnnnnnnnnnnnnnnnnnnnnnnnnnnnnnnnnnnnnnnnnnnnnnnnnnnnnnnnnnnnnnnnnnnnnnnnnnnnnnnnnnnnnnnnnnnnnnnnnnnnnnnnnnnnnnnnnnnnnnnnnnnnnnnnnnnnnnnnnnnnnnnnnnnnnnnnnnnnnnnnnnnnnnnnnnnnnnnnnnnnnnnnnnnnnnnnnnnnnnnnnnnnnnnnnnnnnnnnnnnnnnnnnnnnnnnnnnnnnnnnnnnnnnnnnnnnnnnnnnnnnnnnnnnnnnnnnnnnnnnnnnnnnnnnnnnnnnnnnnnnnnnnnnnnnnnnnnnnnnnnnnnnnnnnnnnnnnnnnnnnnnnnnnnnnnnnnnnnnnnnnnnnnnnnnnnnnnnnnnnnnnnnnnnnnnnnnnnnnnnnnnnnnnnnnnnnnnnnnnnnnnnnnnnnnnnnnnnnnnnnnnnnnnnnnnnnnnnnnnnnnnnnnnnnnnnnnnnnnnnnnnnnnnnnnnnnnnnnnnnnnnnnnnnnnnnnnnnnnnnnnnnnnnnnnnnnnnnnnnnnnnnnnnnnnnnnnnnnnnnnnnnnnnnnnnnnnnnnnnnnnnnnnnnnnnnnnnnnnnnnnnnnnnnnnnnnnnnnnnnnnnnnnnnnnnnnnnnnnnnnnnnnnnnnnnnnnnnnnnnnnnnnnnnnnnnnnnnnnnnnnnnnnnnnnnnnnnnnnnnnnnnnnnnnnnnnnnnnnnnnnnnnnnnnnnnnnnnnnnnnnnnnnnnnnnnnnnnnnnnnnnnnnnnnnnnnnnnnnnnnnnnnnnnnnnnnnnnnnnnnnnnnnnnnnnnnnnnnnnnnnnnnnnnnnnnnnnnnnnnnnnnnnnnnnnnnnnnnnnnnnnnnnnnnnnnnnnnnnnnnnnnnnnnnnnnnnnnnnnnnnnnnnnnnnnnnnnnnnnnnnnnnnnnnnnnnnnnnnnnnnnnnnnnnnnnnnnnnnnnnnnnnnnnnnnnnnnnnnnnnnnnnnnnnnnnnnnnnnnnnnnnnnnnnnnnnnnnnnnnnnnnnnnnnnnnnnnnnnnnnnnnnnnnnnnnnnnnnnnnnnnnnnnnnnnnnnnnnnnnnnnnnnnnnnnnnnnnnnnnnnnnnnnnnnnnnnnnnnnnnnnnnnnnnnnnnnnnnnnnnnnnnnnnnnnnnnnnnnnnnnnnnnnnnnnnnnnnnnnnnnnnnnnnnnnnnnnnnnnnnnnnnnnnnnnnnnnnnnnnnnnnnnnnnnnnnnnnnnnnnnnnnnnnnnnnnnnnnnnnnnnnnnnnnnnnnnnnnnnnnnnnnnnnnnnnnnnnnnnnnnnnnnnnnnnnnnnnnnnnnnnnnnnnnnnnnnnnnnnnnnnnnnnnnnnnnnnnnnnnnnnnnnnnnnnnnnnnnnnnnnnnnnnnnnnnnnnnnnnnnnnnnnnnnnnnnnnnnnnnnnnnnnnnnnnnnnnnnnnnnnnnnnnnnnnnnnnnnnnnnnnnnnnnnnnnnnnnnnnnnnnnnnnnnnnnnnnnnnnnnnnnnnnnnnnnnnnnnnnnnnnnnnnnnnnnnnnnnnnnnnnnnnnnnnnnnnnnnnnnnnnnnnnnnnnnnnnnnnnnnnnnnnnnnnnnnnnnnnnnnnnnnnnnnnnnnnnnnnnnnnnnnnnnnnnnnnnnnnnnnnnnnnnnnnnnnnnnnnnnnnnnnnnnnnnnnnnnnnnnnnnnnnnnnnnnnnnnnnnnnnnnnnnnnnnnnnnnnnnnnnnnnnnnnnnnnnnnnnnnnnnnnnnnnnnnnnnnnnnnnnnnnnnnnnnnnnnnnnnnnnnnnnnnnnnnnnnnnnnnnnnnnnnnnnnnnnnnnnnnnnnnnnnnnnnnnnnnnnnnnnnnnnnnnnnnnnnnnnnnnnnnnnnnnnnnnnnnnnnnnnnnnnnnnnnnnnnnnnnnnnnnnnnnnnnnnnnnnnnnnnnnnnnnnnnnnnnnnnnnnnnnnnnnnnnnnnnnnnnnnnnnnnnnnnnnnnnnnnnnnnnnnnnnnnnnnnnnnnnnnnnnnnnnnnnnnnnnnnnnnnnnnnnnnnnnnnnnnnnnnnnnnnnnnnnnnnnnnnnnnnnnnnnnnnnnnnnnnnnnnnnnnnnnnnnnnnnnnnnnnnnnnnnnnnnnnnnnnnnnnnnnnnnnnnnnnnnnnnnnnnnnnnnnnnnnnnnnnnnnnnnnnnnnnnnnnnnnnnnnnnnnnnnnnnnnnnnnnnnnnnnnnnnnnnnnnnnnnnnnnnnnnnnnnnnnnnnnnnnnnnnnnnnnnnnnnnnnnnnnnnnnnnnnnnnnnnnnnnnnnnnnnnnnnnnnnnnnnnnnnnnnnnnnnnnnnnnnnnnnnnnnnnnnnnnnnnnnnnnnnnnnnnnnnnnnnnnnnnnnnnnnnnnnnnnnnnnnnnnnnnnnnnnnnnnnnnnnnnnnnnnnnnnnnnnnnnnnnnnnnnnnnnnnnnnnnnnnnnnnnnnnnnnnnnnnnnnnnnnnnnnnnnnnnnnnnnnnnnnnnnnnnnnnnnnnnnnnnnnnnnnnnnnnnnnnnnnnnnnnnnnnnnnnnnnnnnnnnnnnnnnnnnnnnnnnnnnnnnnnnnnnnnnnnnnnnnnnnnnnnnnnnnnnnnnnnnnnnnnnnnnnnnnnnnnnnnnnnnnnnnnnnnnnnnnnnnnnnnnnnnnnnnnnnnnnnnnnnnnnnnnnnnnnnnnnnnnnnnnnnnnnnnnnnnnnnnnnnnnnnnnnnnnnnnnnnnnnnnnnnnnnnnnnnnnnnnnnnnnnnnnnnnnnnnnnnnnnnnnnnnnnnnnnnnnnnnnnnnnnnnnnnnnnnnnnnnnnnnnnnnnnnnnnnnnnnnnnnnnnnnnnnnnnnnnnnnnnnnnnnnnnnnnnnnnnnnnnnnnnnnnnnnnnnnnnnnnnnnnnnnnnnnnnnnnnnnnnnnnnnnnnnnnnnnnnnnnnnnnnnnnnnnnnnnnnnnnnnnnnnnnnnnnnnnnnnnnnnnnnnnnnnnnnnnnnnnnnnnnnnnnnnnnnnnnnnnnnnnnnnnnnnnnnnnnnnnnnnnnnnnnnnnnnnnnnnnnnnnnnnnnnnnnnnnnnnnnnnnnnnnnnnnnnnnnnnnnnnnnnnnnnnnnnnnnnnnnnnnnnnnnnnnnnnnnnnnnnnnnnnnnnnnnnnnnnnnnnnnnnnnnnnnnnnnnnnnnnnnnnnnnnnnnnnnnnnnnnnnnnnnnnnnnnnnnnnnnnnnnnnnnnnnnnnnnnnnnnnnnnnnnnnnnnnnnnnnnnnnnnnnnnnnnnnnnnnnnnnnnnnnnnnnnnnnnnnnnnnnnnnnnnnnnnnnnnnnnnnnnnnnnnnnnnnnnnnnnnnnnnnnnnnnnnnnnnnnnnnnnnnnnnnnnnnnnnnnnnnnnnnnnnnnnnnnnnnnnnnnnnnnnnnnnnnnnnnnnnnnnnnnnnnnnnnnnnnnnnnnnnnnnnnnnnnnnnnnnnnnnnnnnnnnnnnnnnnnnnnnnnnnnnnnnnnnnnnnnnnnnnnnnnnnnnnnnnnnnnnnnnnnnnnnnnnnnnnnnnnnnnnnnnnnnnnnnnnnnnnnnnnnnnnnnnnnnnnnnnnnnnnnnnnnnnnnnnnnnnnnnnnnnnnnnnnnnnnnnnnnnnnnnnnnnnnnnnnnnnnnnnnnnnnnnnnnnnnnnnnnnnnnnnnnnnnnnnnnnnnnnnnnnnnnnnnnnnnnnnnnnnnnnnnnnnnnnnnnnnnnnnnnnnnnnnnnnnnnnnnnnnnnnnnnnnnnnnnnnnnnnnnnnnnnnnnnnnnnnnnnnnnnnnnnnnnnnnnnnnnnnnnnnnnnnnnnnnnnnnnnnnnnnnnnnnnnnnnnnnnnnnnnnnnnnnnnnnnnnnnnnnnnnnnnnnnnnnnnnnnnnnnnnnnnnnnnnnnnnnnnnnnnnnnnnnnnnnnnnnnnnnnnnnnnnnnnnnnnnnnnnnnnnnnnnnnnnnnnnnnnnnnnnnnnnnnnnnnnnnnnnnnnnnnnnnnnnnnnnnnnnnnnnnnnnnnnnnnnnnnnnnnnnnnnnnnnnnnnnnnnnnnnnnnnnnnnnnnnnnnnnnnnnnnnnnnnnnnnnnnnnnnnnnnnnnnnnnnnnnnnnnnnnnnnnnnnnnnnnnnnnnnnnnnnnnnnnnnnnnnnnnnnnnnnnnnnnnnnnnnnnnnnnnnnnnnnnnnnnnnnnnnnnnnnnnnnnnnnnnnnnnnnnnnnnnnnnnnnnnnnnnnnnnnnnnnnnnnnnnnnnnnnnnnnnnnnnnnnnnnnnnnnnnnnnnnnnnnnnnnnnnnnnnnnnnnnnnnnnnnnnnnnnnnnnnnnnnnnnnnnnnnnnnnnnnnnnnnnnnnnnnnnnnnnnnnnnnnnnnnnnnnnnnnnnnnnnnnnnnnnnnnnnnnnnnnnnnnnnnnnnnnnnnnnnnnnnnnnnnnnnnnnnnnnnnnnnnnnnnnnnnnnnnnnnnnnnnnnnnnnnnnnnnnnnnnnnnnnnnnnnnnnnnnnnnnnnnnnnnnnnnnnnnnnnnnnnnnnnnnnnnnnnnnnnnnnnnnnnnnnnnnnnnnnnnnnnnnnnnnnnnnnnnnnnnnnnnnnnnnnnnnnnnnnnnnnnnnnnnnnnnnnnnnnnnnnnnnnnnnnnnnnnnnnnnnnnnnnnnnnnnnnnnnnnnnnnnnnnnnnnnnnnnnnnnnnnnnnnnnnnnnnnnnnnnnnnnnnnnnnnnnnnnnnnnnnnnnnnnnnnnnnnnnnnnnnnnnnnnnnnnnnnnnnnnnnnnnnnnnnnnnnnnnnnnnnnnnnnnnnnnnnnnnnnnnnnnnnnnnnnnnnnnnnnnnnnnnnnnnnnnnnnnnnnnnnnnnnnnnnnnnnnnnnnnnnnnnnnnnnnnnnnnnnnnnnnnnnnnnnnnnnnnnnnnnnnnnnnnnnnnnnnnnnnnnnnnnnnnnnnnnnnnnnnnnnnnnnnnnnnnnnnnnnnnnnnnnnnnnnnnnnnnnnnnnnnnnnnnnnnnnnnnnnnnnnnnnnnnnnnnnnnnnnnnnnnnnnnnnnnnnnnnnnnnnnnnnnnnnnnnnnnnnnnnnnnnnnnnnnnnnnnnnnnnnnnnnnnnnnnnnnnnnnnnnnnnnnnnnnnnnnnnnnnnnnnnnnnnnnnnnnnnnnnnnnnnnnnnnnnnnnnnnnnnnnnnnnnnnnnnnnnnnnnnnnnnnnnnnnnnnnnnnnnnnnnnnnnnnnnnnnnnnnnnnnnnnnnnnnnnnnnnnnnnnnnnnnnnnnnnnnnnnnnnnnnnnnnnnnnnnnnnnnnnnnnnnnnnnnnnnnnnnnnnnnnnnnnnnnnnnnnnnnnnnnnnnnnnnnnnnnnnnnnnnnnnnnnnnnnnnnnnnnnnnnnnnnnnnnnnnnnnnnnnnnnnnnnnnnnnnnnnnnnnnnnnnnnnnnnnnnnnnnnnnnnnnnnnnnnnnnnnnnnnnnnnnnnnnnnnnnnnnnnnnnnnnnnnnnnnnnnnnnnnnnnnnnnnnnnnnnnnnnnnnnnnnnnnnnnnnnnnnnnnnnnnnnnnnnnnnnnnnnnnnnnnnnnnnnnnnnnnnnnnnnnnnnnnnnnnnnnnnnnnnnnnnnnnnnnnnnnnnnnnnnnnnnnnnnnnnnnnnnnnnnnnnnnnnnnnnnnnnnnnnnnnnnnnnnnnnnnnnnnnnnnnnnnnnnnnnnnnnnnnnnnnnnnnnnnnnnnnnnnnnnnnnnnnnnnnnnnnnnnnnnnnnnnnnnnnnnnnnnnnnnnnnnnnnnnnnnnnnnnnnnnnnnnnnnnnnnnnnnnnnnnnnnnnnnnnnnnnnnnnnnnnnnnnnnnnnnnnnnnnnnnnnnnnnnnnnnnnnnnnnnnnnnnnnnnnnnnnnnnnnnnnnnnnnnnnnnnnnnnnnnnnnnnnnnnnnnnnnnnnnnnnnnnnnnnnnnnnnnnnnnnnnnnnnnnnnnnnnnnnnnnnnnnnnnnnnnnnnnnnnnnnnnnnnnnnnnnnnnnnnnnnnnnnnnnnnnnnnnnnnnnnnnnnnnnnnnnnnnnnnnnnnnnnnnnnnnnnnnnnnnnnnnnnnnnnnnnnnnnnnnnnnnnnnnnnnnnnnnnnnnnnnnnnnnnnnnnnnnnnnnnnnnnnnnnnnnnnnnnnnnnnnnnnnnnnnnnnnnnnnnnnnnnnnnnnnnnnnnnnnnnnnnnnnnnnnnnnnnnnnnnnnnnnnnnnnnnnnnnnnnnnnnnnnnnnnnnnnnnnnnnnnnnnnnnnnnnnnnnnnnnnnnnnnnnnnnnnnnnnnnnnnnnnnnnnnnnnnnnnnnnnnnnnnnnnnnnnnnnnnnnnnnnnnnnnnnnnnnnnnnnnnnnnnnnnnnnnnnnnnnnnnnnnnnnnnnnnnnnnnnnnnnnnnnnnnnnnnnnnnnnnnnnnnnnnnnnnnnnnnnnnnnnnnnnnnnnnnnnnnnnnnnnnnnnnnnnnnnnnnnnnnnnnnnnnnnnnnnnnnnnnnnnnnnnnnnnnnnnnnnnnnnnnnnnnnnnnnnnnnnnnnnnnnnnnnnnnnnnnnnnnnnnnnnnnnnnnnnnnnnnnnnnnnnnnnnnnnnnnnnnnnnnnnnnnnnnnnnnnnnnnnnnnnnnnnnnnnnnnnnnnnnnnnnnnnnnnnnnnnnnnnnnnnnnnnnnnnnnnnnnnnnnnnnnnnnnnnnnnnnnnnnnnnnnnnnnnnnnnnnnnnnnnnnnnnnnnnnnnnnnnnnnnnnnnnnnnnnnnnnnnnnnnnnnnnnnnnnnnnnnnnnnnnnnnnnnnnnnnnnnnnnnnnnnnnnnnnnnnnnnnnnnnnnnnnnnnnnnnnnnnnnnnnnnnnnnnnnnnnnnnnnnnnnnnnnnnnnnnnnnnnnnnnnnnnnnnnnnnnnnnnnnnnnnnnnnnnnnnnnnnnnnnnnnnnnnnnnnnnnnnnnnnnnnnnnnnnnnnnnnnnnnnnnnnnnnnnnnnnnnnnnnnnnnnnnnnnnnnnnnnnnnnnnnnnnnnnnnnnnnnnnnnnnnnnnnnnnnnnnnnnnnnnnnnnnnnnnnnnnnnnnnnnnnnnnnnnnnnnnnnnnnnnnnnnnnnnnnnnnnnnnnnnnnnnnnnnnnnnnnnnnnnnnnnnnnnnnnnnnnnnnnnnnnnnnnnnnnnnnnnnnnnnnnnnnnnnnnnnnnnnnnnnnnnnnnnnnnnnnnnnnnnnnnnnnnnnnnnnnnnnnnnnnnnnnnnnnnnnnnnnnnnnnnnnnnnnnnnnnnnnnnnnnnnnnnnnnnnnnnnnnnnnnnnnnnnnnnnnnnnnnnnnnnnnnnnnnnnnnnnnnnnnnnnnnnnnnnnnnnnnnnnnnnnnnnnnnnnnnnnnnnnnnnnnnnnnnnnnnnnnnnnnnnnnnnnnnnnnnnnnnnnnnnnnnnnnnnnnnnnnnnnnnnnnnnnnnnnnnnnnnnnnnnnnnnnnnnnnnnnnnnnnnnnnnnnnnnnnnnnnnnnnnnnnnnnnnnnnnnnnnnnnnnnnnnnnnnnnnnnnnnnnnnnnnnnnnnnnnnnnnnnnnnnnnnnnnnnnnnnnnnnnnnnnnnnnnnnnnnnnnnnnnnnnnnnnnnnnnnnnnnnnnnnnnnnnnnnnnnnnnnnnnnnnnnnnnnnnnnnnnnnnnnnnnnnnnnnnnnnnnnnnnnnnnnnnnnnnnnnnnnnnnnnnnnnnnnnnnnnnnnnnnnnnnnnnnnnnnnnnnnnnnnnnnnnnnnnnnnnnnnnnnnnnnnnnnnnnnnnnnnnnnnnnnnnnnnnnnnnnnnnnnnnnnnnnnnnnnnnnnnnnnnnnnnnnnnnnnnnnnnnnnnnnnnnnnnnnnnnnnnnnnnnnnnnnnnnnnnnnnnnnnnnnnnnnnnnnnnnnnnnnnnnnnnnnnnnnnnnnnnnnnnnnnnnnnnnnnnnnnnnnnnnnnnnnnnnnnnnnnnnnnnnnnnnnnnnnnnnnnnnnnnnnnnnnnnnnnnnnnnnnnnnnnnnnnnnnnnnnnnnnnnnnnnnnnnnnnnnnnnnnnnnnnnnnnnnnnnnnnnnnnnnnnnnnnnnnnnnnnnnnnnnnnnnnnnnnnnnnnnnnnnnnnnnnnnnnnnnnnnnnnnnnnnnnnnnnnnnnnnnnnnnnnnnnnnnnnnnnnnnnnnnnnnnnnnnnnnnnnnnnnnnnnnnnnnnnnnnnnnnnnnnnnnnnnnnnnnnnnnnnnnnnnnnnnnnnnnnnnnnnnnnnnnnnnnnnnnnnnnnnnnnnnnnnnnnnnnnnnnnnnnnnnnnnnnnnnnnnnnnnnnnnnnnnnnnnnnnnnnnnnnnnnnnnnnnnnnnnnnnnnnnnnnnnnnnnnnnnnnnnnnnnnnnnnnnnnnnnnnnnnnnnnnnnnnnnnnnnnnnnnnnnnnnnnnnnnnnnnnnnnnnnnnnnnnnnnnnnnnnnnnnnnnnnnnnnnnnnnnnnnnnnnnnnnnnnnnnnnnnnnnnnnnnnnnnnnnnnnnnnnnnnnnnnnnnnnnnnnnnnnnnnnnnnnnnnnnnnnnnnnnnnnnnnnnnnnnnnnnnnnnnnnnnnnnnnnnnnnnnnnnnnnnnnnnnnnnnnnnnnnnnnnnnnnnnnnnnnnnnnnnnnnnnnnnnnnnnnnnnnnnnnnnnnnnnnnnnnnnnnnnnnnnnnnnnnnnnnnnnnnnnnnnnnnnnnnnnnnnnnnnnnnnnnnnnnnnnnnnnnnnnnnnnnnnnnnnnnnnnnnnnnnnnnnnnnnnnnnnnnnnnnnnnnnnnnnnnnnnnnnnnnnnnnnnnnnnnnnnnnnnnnnnnnnnnnnnnnnnnnnnnnnnnnnnnnnnnnnnnnnnnnnnnnnnnnnnnnnnnnnnnnnnnnnnnnnnnnnnnnnnnnnnnnnnnnnnnnnnnnnnnnnnnnnnnnnnnnnnnnnnnnnnnnnnnnnnnnnnnnnnnnnnnnnnnnnnnnnnnnnnnnnnnnnnnnnnnnnnnnnnnnnnnnnnnnnnnnnnnnnnnnnnnnnnnnnnnnnnnnnnnnnnnnnnnnnnnnnnnnnnnnnnnnnnnnnnnnnnnnnnnnnnnnnnnnnnnnnnnnnnnnnnnnnnnnnnnnnnnnnnnnnnnnnnnnnnnnnnnnnnnnnnnnnnnnnnnnnnnnnnnnnnnnnnnnnnnnnnnnnnnnnnnnnnnnnnnnnnnnnnnnnnnnnnnnnnnnnnnnnnnnnnnnnnnnnnnnnnnnnnnnnnnnnnnnnnnnnnnnnnnnnnnnnnnnnnnnnnnnnnnnnnnnnnnnnnnnnnnnnnnnnnnnnnnnnnnnnnnnnnnnnnnnnnnnnnnnnnnnnnnnnnnnnnnnnnnnnnnnnnnnnnnnnnnnnnnnnnnnnnnnnnnnnnnnnnnnnnnnnnnnnnnnnnnnnnnnnnnnnnnnnnnnnnnnnnnnnnnnnnnnnnnnnnnnnnnnnnnnnnnnnnnnnnnnnnnnnnnnnnnnnnnnnnnnnnnnnnnnnnnnnnnnnnnnnnnnnnnnnnnnnnnnnnnnnnnnnnnnnnnnnnnnnnnnnnnnnnnnnnnnnnnnnnnnnnnnnnnnnnnnnnnnnnnnnnnnnnnnnnnnnnnnnnnnnnnnnnnnnnnnnnnnnnnnnnnnnnnnnnnnnnnnnnnnnnnnnnnnnnnnnnnnnnnnnnnnnnnnnnnnnnnnnnnnnnnnnnnnnnnnnnnnnnnnnnnnnnnnnnnnnnnnnnnnnnnnnnnnnnnnnnnnnnnnnnnnnnnnnnnnnnnnnnnnnnnnnnnnnnnnnnnnnnnnnnnnnnnnnnnnnnnnnnnnnnnnnnnnnnnnnnnnnnnnnnnnnnnnnnnnnnnnnnnnnnnnnnnnnnnnnnnnnnnnnnnnnnnnnnnnnnnnnnnnnnnnnnnnnnnnnnnnnnnnnnnnnnnnnnnnnnnnnnnnnnnnnnnnnnnnnnnnnnnnnnnnnnnnnnnnnnnnnnnnnnnnnnnnnnnnnnnnnnnnnnnnnnnnnnnnnnnnnnnnnnnnnnnnnnnnnnnnnnnnnnnnnnnnnnnnnnnnnnnnnnnnnnnnnnnnnnnnnnnnnnnnnnnnnnnnnnnnnnnnnnnnnnnnnnnnnnnnnnnnnnnnnnnnnnnnnnnnnnnnnnnnnnnnnnnnnnnnnnnnnnnnnnnnnnnnnnnnnnnnnnnnnnnnnnnnnnnnnnnnnnnnnnnnnnnnnnnnnnnnnnnnnnnnnnnnnnnnnnnnnnnnnnnnnnnnnnnnnnnnnnnnnnnnnnnnnnnnnnnnnnnnnnnnnnnnnnnnnnnnnnnnnnnnnnnnnnnnnnnnnnnnnnnnnnnnnnnnnnnnnnnnnnnnnnnnnnnnnnnnnnnnnnnnnnnnnnnnnnnnnnnnnnnnnnnnnnnnnnnnnnnnnnnnnnnnnnnnnnnnnnnnnnnnnnnnnnnnnnnnnnnnnnnnnnnnnnnnnnnnnnnnnnnnnnnnnnnnnnnnnnnnnnnnnnnnnnnnnnnnnnnnnnnnnnnnnnnnnnnnnnnnnnnnnnnnnnnnnnnnnnnnnnnnnnnnnnnnnnnnnnnnnnnnnnnnnnnnnnnnnnnnnnnnnnnnnnnnnnnnnnnnnnnnnnnnnnnnnnnnnnnnnnnnnnnnnnnnnnnnnnnnnnnnnnnnnnnnnnnnnnnnnnnnnnnnnnnnnnnnnnnnnnnnnnnnnnnnnnnnnnnnnnnnnnnnnnnnnnnnnnnnnnnnnnnnnnnnnnnnnnnnnnnnnnnnnnnnnnnnnnnnnnnnnnnnnnnnnnnnnnnnnnnnnnnnnnnnnnnnnnnnnnnnnnnnnnnnnnnnnnnnnnnnnnnnnnnnnnnnnnnnnnnnnnnnnnnnnnnnnnnnnnnnnnnnnnnnnnnnnnnnnnnnnnnnnnnnnnnnnnnnnnnnnnnnnnnnnnnnnnnnnnnnnnnnnnnnnnnnnnnnnnnnnnnnnnnnnnnnnnnnnnnnnnnnnnnnnnnnnnnnnnnnnnnnnnnnnnnnnnnnnnnnnnnnnnnnnnnnnnnnnnnnnnnnnnnnnnnnnnnnnnnnnnnnnnnnnnnnnnnnnnnnnnnnnnnnnnnnnnnnnnnnnnnnnnnnnnnnnnnnnnnnnnnnnnnnnnnnnnnnnnnnnnnnnnnnnnnnnnnnnnnnnnnnnnnnnnnnnnnnnnnnnnnnnnnnnnnnnnnnnnnnnnnnnnnnnnnnnnnnnnnnnnnnnnnnnnnnnnnnnnnnnnnnnnnnnnnnnnnnnnnnnnnnnnnnnnnnnnnnnnnnnnnnnnnnnnnnnnnnnnnnnnnnnnnnnnnnnnnnnnnnnnnnnnnnnnnnnnnnnnnnnnnnnnnnnnnnnnnnnnnnnnnnnnnnnnnnnnnnnnnnnnnnnnnnnnnnnnnnnnnnnnnnnnnnnnnnnnnnnnnnnnnnnnnnnnnnnnnnnnnnnnnnnnnnnnnnnnnnnnnnnnnnnnnnnnnnnnnnnnnnnnnnnnnnnnnnnnnnnnnnnnnnnnnnnnnnnnnnnnnnnnnnnnnnnnnnnnnnnnnnnnnnnnnnnnnnnnnnnnnnnnnnnnnnnnnnnnnnnnnnnnnnnnnnnnnnnnnnnnnnnnnnnnnnnnnnnnnnnnnnnnnnnnnnnnnnnnnnnnnnnnnnnnnnnnnnnnnnnnnnnnnnnnnnnnnnnnnnnnnnnnnnnnnnnnnnnnnnnnnnnnnnnnnnnnnnnnnnnnnnnnnnnnnnnnnnnnnnnnnnnnnnnnnnnnnnnnnnnnnnnnnnnnnnnnnnnnnnnnnnnnnnnnnnnnnnnnnnnnnnnnnnnnnnnnnnnnnnnnnnnnnnnnnnnnnnnnnnnnnnnnnnnnnnnnnnnnnnnnnnnnnnnnnnnnnnnnnnnnnnnnnnnnnnnnnnnnnnnnnnnnnnnnnnnnnnnnnnnnnnnnnnnnnnnnnnnnnnnnnnnnnnnnnnnnnnnnnnnnnnnnnnnnnnnnnnnnnnnnnnnnnnnnnnnnnnnnnnnnnnnnnnnnnnnnnnnnnnnnnnnnnnnnnnnnnnnnnnnnnnnnnnnnnnnnnnnnnnnnnnnnnnnnnnnnnnnnnnnnnnnnnnnnnnnnnnnnnnnnnnnnnnnnnnnnnnnnnnnnnnnnnnnnnnnnnnnnnnnnnnnnnnnnnnnnnnnnnnnnnnnnnnnnnnnnnnnnnnnnnnnnnnnnnnnnnnnnnnnnnnnnnnnnnnnnnnnnnnnnnnnnnnnnnnnnnnnnnnnnnnnnnnnnnnnnnnnnnnnnnnnnnnnnnnnnnnnnnnnnnnnnnnnnnnnnnnnnnnnnnnnnnnnnnnnnnnnnnnnnnnnnnnnnnnnnnnnnnnnnnnnnnnnnnnnnnnnnnnnnnnnnnnnnnnnnnnnnnnnnnnnnnnnnnnnnnnnnnnnnnnnnnnnnnnnnnnnnnnnnnnnnnnnnnnnnnnnnnnnnnnnnnnnnnnnnnnnnnnnnnnnnnnnnnnnnnnnnnnnnnnnnnnnnnnnnnnnnnnnnnnnnnnnnnnnnnnnnnnnnnnnnnnnnnnnnnnnnnnnnnnnnnnnnnnnnnnnnnnnnnnnnnnnnnnnnnnnnnnnnnnnnnnnnnnnnnnnnnnnnnnnnnnnnnnnnnnnnnnnnnnnnnnnnnnnnnnnnnnnnnnnnnnnnnnnnnnnnnnnnnnnnnnnnnnnnnnnnnnnnnnnnnnnnnnnnnnnnnnnnnnnnnnnnnnnnnnnnnnnnnnnnnnnnnnnnnnnnnnnnnnnnnnnnnnnnnnnnnnnnnnnnnnnnnnnnnnnnnnnnnnnnnnnnnnnnnnnnnnnnnnnnnnnnnnnnnnnnnnnnnnnnnnnnnnnnnnnnnnnnnnnnnnnnnnnnnnnnnnnnnnnnnnnnnnnnnnnnnnnnnnnnnnnnnnnnnnnnnnnnnnnnnnnnnnnnnnnnnnnnnnnnnnnnnnnnnnnnnnnnnnnnnnnnnnnnnnnnnnnnnnnnnnnnnnnnnnnnnnnnnnnnnnnnnnnnnnnnnnnnnnnnnnnnnnnnnnnnnnnnnnnnnnnnnnnnnnnnnnnnnnnnnnnnnnnnnnnnnnnnnnnnnnnnnnnnnnnnnnnnnnnnnnnnnnnnnnnnnnnnnnnnnnnnnnnnnnnnnnnnnnnnnnnnnnnnnnnnnnnnnnnnnnnnnnnnnnnnnnnnnnnnnnnnnnnnnnnnnnnnnnnnnnnnnnnnnnnnnnnnnnnnnnnnnnnnnnnnnnnnnnnnnnnnnnnnnnnnnnnnnnnnnnnnnnnnnnnnnnnnnnnnnnnnnnnnnnnnnnnnnnnnnnnnnnnnnnnnnnnnnnnnnnnnnnnnnnnnnnnnnnnnnnnnnnnnnnnnnnnnnnnnnnnnnnnnnnnnnnnnnnnnnnnnnnnnnnnnnnnnnnnnnnnnnnnnnnnnnnnnnnnnnnnnnnnnnnnnnnnnnnnnnnnnnnnnnnnnnnnnnnnnnnnnnnnnnnnnnnnnnnnnnnnnnnnnnnnnnnnnnnnnnnnnnnnnnnnnnnnnnnnnnnnnnnnnnnnnnnnnnnnnnnnnnnnnnnnnnnnnnnnnnnnnnnnnnnnnnnnnnnnnnnnnnnnnnnnnnnnnnnnnnnnnnnnnnnnnnnnnnnnnnnnnnnnnnnnnnnnnnnnnnnnnnnnnnnnnnnnnnnnnnnnnnnnnnnnnnnnnnnnnnnnnnnnnnnnnnnnnnnnnnnnnnnnnnnnnnnnnnnnnnnnnnnnnnnnnnnnnnnnnnnnnnnnnnnnnnnnnnnnnnnnnnnnnnnnnnnnnnnnnnnnnnnnnnnnnnnnnnnnnnnnnnnnnnnnnnnnnnnnnnnnnnnnnnnnnnnnnnnnnnnnnnnnnnnnnnnnnnnnnnnnnnnnnnnnnnnnnnnnnnnnnnnnnnnnnnnnnnnnnnnnnnnnnnnnnnnnnnnnnnnnnnnnnnnnnnnnnnnnnnnnnnnnnnnnnnnnnnnnnnnnnnnnnnnnnnnnnnnnnnnnnnnnnnnnnnnnnnnnnnnnnnnnnnnnnnnnnnnnnnnnnnnnnnnnnnnnnnnnnnnnnnnnnnnnnnnnnnnnnnnnnnnnnnnnnnnnnnnnnnnnnnnnnnnnnnnnnnnnnnnnnnnnnnnnnnnnnnnnnnnnnnnnnnnnnnnnnnnnnnnnnnnnnnnnnnnnnnnnnnnnnnnnnnnnnnnnnnnnnnnnnnnnnnnnnnnnnnnnnnnnnnnnnnnnnnnnnnnnnnnnnnnnnnnnnnnnnnnnnnnnnnnnnnnnnnnnnnnnnnnnnnnnnnnnnnnnnnnnnnnnnnnnnnnnnnnnnnnnnnnnnnnnnnnnnnnnnnnnnnnnnnnnnnnnnnnnnnnnnnnnnnnnnnnnnnnnnnnnnnnnnnnnnnnnnnnnnnnnnnnnnnnnnnnnnnnnnnnnnnnnnnnnnnnnnnnnnnnnnnnnnnnnnnnnnnnnnnnnnnnnnnnnnnnnnnnnnnnnnnnnnnnnnnnnnnnnnnnnnnnnnnnnnnnnnnnnnnnnnnnnnnnnnnnnnnnnnnnnnnnnnnnnnnnnnnnnnnnnnnnnnnnnnnnnnnnnnnnnnnnnnnnnnnnnnnnnnnnnnnnnnnnnnnnnnnnnnnnnnnnnnnnnnnnnnnnnnnnnnnnnnnnnnnnnnnnnnnnnnnnnnnnnnnnnnnnnnnnnnnnnnnnnnnnnnnnnnnnnnnnnnnnnnnnnnnnnnnnnnnnnnnnnnnnnnnnnnnnnnnnnnnnnnnnnnnnnnnnnnnnnnnnnnnnnnnnnnnnnnnnnnnnnnnnnnnnnnnnnnnnnnnnnnnnnnnnnnnnnnnnnnnnnnnnnnnnnnnnnnnnnnnnnnnnnnnnnnnnnnnnnnnnnnnnnnnnnnnnnnnnnnnnnnnnnnnnnnnnnnnnnnnnnnnnnnnnnnnnnnnnnnnnnnnnnnnnnnnnnnnnnnnnnnnnnnnnnnnnnnnnnnnnnnnnnnnnnnnnnnnnnnnnnnnnnnnnnnnnnnnnnnnnnnnnnnnnnnnnnnnnnnnnnnnnnnnnnnnnnnnnnnnnnnnnnnnnnnnnnnnnnnnnnnnnnnnnnnnnnnnnnnnnnnnnnnnnnnnnnnnnnnnnnnnnnnnnnnnnnnnnnnnnnnnnnnnnnnnnnnnnnnnnnnnnnnnnnnnnnnnnnnnnnnnnnnnnnnnnnnnnnnnnnnnnnnnnnnnnnnnnnnnnnnnnnnnnnnnnnnnnnnnnnnnnnnnnnnnnnnnnnnnnnnnnnnnnnnnnnnnnnnnnnnnnnnnnnnnnnnnnnnnnnnnnnnnnnnnnnnnnnnnnnnnnnnnnnnnnnnnnnnnnnnnnnnnnnnnnnnnnnnnnnnnnnnnnnnnnnnnnnnnnnnnnnnnnnnnnnnnnnnnnnnnnnnnnnnnnnnnnnnnnnnnnnnnnnnnnnnnnnnnnnnnnnnnnnnnnnnnnnnnnnnnnnnnnnnnnnnnnnnnnnnnnnnnnnnnnnnnnnnnnnnnnnnnnnnnnnnnnnnnnnnnnnnnnnnnnnnnnnnnnnnnnnnnnnnnnnnnnnnnnnnnnnnnnnnnnnnnnnnnnnnnnnnnnnnnnnnnnnnnnnnnnnnnnnnnnnnnnnnnnnnnnnnnnnnnnnnnnnnnnnnnnnnnnnnnnnnnnnnnnnnnnnnnnnnnnnnnnnnnnnnnnnnnnnnnnnnnnnnnnnnnnnnnnnnnnnnnnnnnnnnnnnnnnnnnnnnnnnnnnnnnnnnnnnnnnnnnnnnnnnnnnnnnnnnnnnnnnnnnnnnnnnnnnnnnnnnnnnnnnnnnnnnnnnnnnnnnnnnnnnnnnnnnnnnnnnnnnnnnnnnnnnnnnnnnnnnnnnnnnnnnnnnnnnnnnnnnnnnnnnnnnnnnnnnnnnnnnnnnnnnnnnnnnnnnnnnnnnnnnnnnnnnnnnnnnnnnnnnnnnnnnnnnnnnnnnnnnnnnnnnnnnnnnnnnnnnnnnnnnnnnnnnnnnnnnnnnnnnnnnnnnnnnnnnnnnnnnnnnnnnnnnnnnnnnnnnnnnnnnnnnnnnnnnnnnnnnnnnnnnnnnnnnnnnnnnnnnnnnnnnnnnnnnnnnnnnnnnnnnnnnnnnnnnnnnnnnnnnnnnnnnnnnnnnnnnnnnnnnnnnnnnnnnnnnnnnnnnnnnnnnnnnnnnnnnnnnnnnnnnnnnnnnnnnnnnnnnnnnnnnnnnnnnnnnnnnnnnnnnnnnnnnnnnnnnnnnnnnnnnnnnnnnnnnnnnnnnnnnnnnnnnnnnnnnnnnnnnnnnnnnnnnnnnnnnnnnnnnnnnnnnnnnnnnnnnnnnnnnnnnnnnnnnnnnnnnnnnnnnnnnnnnnnnnnnnnnnnnnnnnnnnnnnnnnnnnnnnnnnnnnnnnnnnnnnnnnnnnnnnnnnnnnnnnnnnnnnnnnnnnnnnnnnnnnnnnnnnnnnnnnnnnnnnnnnnnnnnnnnnnnnnnnnnnnnnnnnnnnnnnnnnnnnnnnnnnnnnnnnnnnnnnnnnnnnnnnnnnnnnnnnnnnnnnnnnnnnnnnnnnnnnnnnnnnnnnnnnnnnnnnnnnnnnnnnnnnnnnnnnnnnnnnnnnnnnnnnnnnnnnnnnnnnnnnnnnnnnnnnnnnnnnnnnnnnnnnnnnnnnnnnnnnnnnnnnnnnnnnnnnnnnnnnnnnnnnnnnnnnnnnnnnnnnnnnnnnnnnnnnnnnnnnnnnnnnnnnnnnnnnnnnnnnnnnnnnnnnnnnnnnnnnnnnnnnnnnnnnnnnnnnnnnnnnnnnnnnnnnnnnnnnnnnnnnnnnnnnnnnnnnnnnnnnnnnnnnnnnnnnnnnnnnnnnnnnnnnnnnnnnnnnnnnnnnnnnnnnnnnnnnnnnnnnnnnnnnnnnnnnnnnnnnnnnnnnnnnnnnnnnnnnnnnnnnnnnnnnnnnnnnnnnnnnnnnnnnnnnnnnnnnnnnnnnnnnnnnnnnnnnnnnnnnnnnnnnnnnnnnnnnnnnnnnnnnnnnnnnnnnnnnnnnnnnnnnnnnnnnnnnnnnnnnnnnnnnnnnnnnnnnnnnnnnnnnnnnnnnnnnnnnnnnnnnnnnnnnnnnnnnnnnnnnnnnnnnnnnnnnnnnnnnnnnnnnnnnnnnnnnnnnnnnnnnnnnnnnnnnnnnnnnnnnnnnnnnnnnnnnnnnnnnnnnnnnnnnnnnnnnnnnnnnnnnnnnnnnnnnnnnnnnnnnnnnnnnnnnnnnnnnnnnnnnnnnnnnnnnnnnnnnnnnnnnnnnnnnnnnnnnnnnnnnnnnnnnnnnnnnnnnnnnnnnnnnnnnnnnnnnnnnnnnnnnnnnnnnnnnnnnnnnnnnnnnnnnnnnnnnnnnnnnnnnnnnnnnnnnnnnnnnnnnnnnnnnnnnnnnnnnnnnnnnnnnnnnnnnnnnnnnnnnnnnnnnnnnnnnnnnnnnnnnnnnnnnnnnnnnnnnnnnnnnnnnnnnnnnnnnnnnnnnnnnnnnnnnnnnnnnnnnnnnnnnnnnnnnnnnnnnnnnnnnnnnnnnnnnnnnnnnnnnnnnnnnnnnnnnnnnnnnnnnnnnnnnnnnnnnnnnnnnnnnnnnnnnnnnnnnnnnnnnnnnnnnnnnnnnnnnnnnnnnnnnnnnnnnnnnnnnnnnnnnnnnnnnnnnnnnnnnnnnnnnnnnnnnnnnnnnnnnnnnnnnnnnnnnnnnnnnnnnnnnnnnnnnnnnnnnnnnnnnnnnnnnnnnnnnnnnnnnnnnnnnnnnnnnnnnnnnnnnnnnnnnnnnnnnnnnnnnnnnnnnnnnnnnnnnnnnnnnnnnnnnnnnnnnnnnnnnnnnnnnnnnnnnnnnnnnnnnnnnnnnnnnnnnnnnnnnnnnnnnnnnnnnnnnnnnnnnnnnnnnnnnnnnnnnnnnnnnnnnnnnnnnnnnnnnnnnnnnnnnnnnnnnnnnnnnnnnnnnnnnnnnnnnnnnnnnnnnnnnnnnnnnnnnnnnnnnnnnnnnnnnnnnnnnnnnnnnnnnnnnnnnnnnnnnnnnnnnnnnnnnnnnnnnnnnnnnnnnnnnnnnnnnnnnnnnnnnnnnnnnnnnnnnnnnnnnnnnnnnnnnnnnnnnnnnnnnnnnnnnnnnnnnnnnnnnnnnnnnnnnnnnnnnnnnnnnnnnnnnnnnnnnnnnnnnnnnnnnnnnnnnnnnnnnnnnnnnnnnnnnnnnnnnnnnnnnnnnnnnnnnnnnnnnnnnnnnnnnnnnnnnnnnnnnnnnnnnnnnnnnnnnnnnnnnnnnnnnnnnnnnnnnnnnnnnnnnnnnnnnnnnnnnnnnnnnnnnnnnnnnnnnnnnnnnnnnnnnnnnnnnnnnnnnnnnnnnnnnnnnnnnnnnnnnnnnnnnnnnnnnnnnnnnnnnnnnnnnnnnnnnnnnnnnnnnnnnnnnnnnnnnnnnnnnnnnnnnnnnnnnnnnnnnnnnnnnnnnnnnnnnnnnnnnnnnnnnnnnnnnnnnnnnnnnnnnnnnnnnnnnnnnnnnnnnnnnnnnnnnnnnnnnnnnnnnnnnnnnnnnnnnnnnnnnnnnnnnnnnnnnnnnnnnnnnnnnnnnnnnnnnnnnnnnnnnnnnnnnnnnnnnnnnnnnnnnnnnnnnnnnnnnnnnnnnnnnnnnnnnnnnnnnnnnnnnnnnnnnnnnnnnnnnnnnnnnnnnnnnnnnnnnnnnnnnnnnnnnnnnnnnnnnnnnnnnnnnnnnnnnnnnnnnnnnnnnnnnnnnnnnnnnnnnnnnnnnnnnnnnnnnnnnnnnnnnnnnnnnnnnnnnnnnnnnnnnnnnnnnnnnnnnnnnnnnnnnnnnnnnnnnnnnnnnnnnnnnnnnnnnnnnnnnnnnnnnnnnnnnnnnnnnnnnnnnnnnnnnnnnnnnnnnnnnnnnnnnnnnnnnnnnnnnnnnnnnnnnnnnnnnnnnnnnnnnnnnnnnnnnnnnnnnnnnnnnnnnnnnnnnnnnnnnnnnnnnnnnnnnnnnnnnnnnnnnnnnnnnnnnnnnnnnnnnnnnnnnnnnnnnnnnnnnnnnnnnnnnnnnnnnnnnnnnnnnnnnnnnnnnnnnnnnnnnnnnnnnnnnnnnnnnnnnnnnnnnnnnnnnnnnnnnnnnnnnnnnnnnnnnnnnnnnnnnnnnnnnnnnnnnnnnnnnnnnnnnnnnnnnnnnnnnnnnnnnnnnnnnnnnnnnnnnnnnnnnnnnnnnnnnnnnnnnnnnnnnnnnnnnnnnnnnnnnnnnnnnnnnnnnnnnnnnnnnnnnnnnnnnnnnnnnnnnnnnnnnnnnnnnnnnnnnnnnnnnnnnnnnnnnnnnnnnnnnnnnnnnnnnnnnnnnnnnnnnnnnnnnnnnnnnnnnnnnnnnnnnnnnnnnnnnnnnnnnnnnnnnnnnnnnnnnnnnnnnnnnnnnnnnnnnnnnnnnnnnnnnnnnnnnnnnnnnnnnnnnnnnnnnnnnnnnnnnnnnnnnnnnnnnnnnnnnnnnnnnnnnnnnnnnnnnnnnnnnnnnnnnnnnnnnnnnnnnnnnnnnnnnnnnnnnnnnnnnnnnnnnnnnnnnnnnnnnnnnnnnnnnnnnnnnnnnnnnnnnnnnnnnnnnnnnnnnnnnnnnnnnnnnnnnnnnnnnnnnnnnnnnnnnnnnnnnnnnnnnnnnnnnnnnnnnnnnnnnnnnnnnnnnnnnnnnnnnnnnnnnnnnnnnnnnnnnnnnnnnnnnnnnnnnnnnnnnnnnnnnnnnnnnnnnnnnnnnnnnnnnnnnnnnnnnnnnnnnnnnnnnnnnnnnnnnnnnnnnnnnnnnnnnnnnnnnnnnnnnnnnnnnnnnnnnnnnnnnnnnnnnnnnnnnnnnnnnnnnnnnnnnnnnnnnnnnnnnnnnnnnnnnnnnnnnnnnnnnnnnnnnnnnnnnnnnnnnnnnnnnnnnnnnnnnnnnnnnnnnnnnnnnnnnnnnnnnnnnnnnnnnnnnnnnnnnnnnnnnnnnnnnnnnnnnnnnnnnnnnnnnnnnnnnnnnnnnnnnnnnnnnnnnnnnnnnnnnnnnnnnnnnnnnnnnnnnnnnnnnnnnnnnnnnnnnnnnnnnnnnnnnnnnnnnnnnnnnnnnnnnnnnnnnnnnnnnnnnnnnnnnnnnnnnnnnnnnnnnnnnnnnnnnnnnnnnnnnnnnnnnnnnnnnnnnnnnnnnnnnnnnnnnnnnnnnnnnnnnnnnnnnnnnnnnnnnnnnnnnnnnnnnnnnnnnnnnnnnnnnnnnnnnnnnnnnnnnnnnnnnnnnnnnnnnnnnnnnnnnnnnnnnnnnnnnnnnnnnnnnnnnnnnnnnnnnnnnnnnnnnnnnnnnnnnnnnnnnnnnnnnnnnnnnnnnnnnnnnnnnnnnnnnnnnnnnnnnnnnnnnnnnnnnnnnnnnnnnnnnnnnnnnnnnnnnnnnnnnnnnnnnnnnnnnnnnnnnnnnnnnnnnnnnnnnnnnnnnnnnnnnnnnnnnnnnnnnnnnnnnnnnnnnnnnnnnnnnnnnnnnnnnnnnnnnnnnnnnnnnnnnnnnnnnnnnnnnnnnnnnnnnnnnnnnnnnnnnnnnnnnnnnnnnnnnnnnnnnnnnnnnnnnnnnnnnnnnnnnnnnnnnnnnnnnnnnnnnnnnnnnnnnnnnnnnnnnnnnnnnnnnnnnnnnnnnnnnnnnnnnnnnnnnnnnnnnnnnnnnnnnnnnnnnnnnnnnnnnnnnnnnnnnnnnnnnnnnnnnnnnnnnnnnnnnnnnnnnnnnnnnnnnnnnnnnnnnnnnnnnnnnnnnnnnnnnnnnnnnnnnnnnnnnnnnnnnnnnnnnnnnnnnnnnnnnnnnnnnnnnnnnnnnnnnnnnnnnnnnnnnnnnnnnnnnnnnnnnnnnnnnnnnnnnnnnnnnnnnnnnnnnnnnnnnnnnnnnnnnnnnnnnnnnnnnnnnnnnnnnnnnnnnnnnnnnnnnnnnnnnnnnnnnnnnnnnnnnnnnnnnnnnnnnnnnnnnnnnnnnnnnnnnnnnnnnnnnnnnnnnnnnnnnnnnnnnnnnnnnnnnnnnnnnnnnnnnnnnnnnnnnnnnnnnnnnnnnnnnnnnnnnnnnnnnnnnnnnnnnnnnnnnnnnnnnnnnnnnnnnnnnnnnnnnnnnnnnnnnnnnnnnnnnnnnnnnnnnnnnnnnnnnnnnnnnnnnnnnnnnnnnnnnnnnnnnnnnnnnnnnnnnnnnnnnnnnnnnnnnnnnnnnnnnnnnnnnnnnnnnnnnnnnnnnnnnnnnnnnnnnnnnnnnnnnnnnnnnnnnnnnnnnnnnnnnnnnnnnnnnnnnnnnnnnnnnnnnnnnnnnnnnnnnnnnnnnnnnnnnnnnnnnnnnnnnnnnnnnnnnnnnnnnnnnnnnnnnnnnnnnnnnnnnnnnnnnnnnnnnnnnnnnnnnnnnnnnnnnnnnnnnnnnnnnnnnnnnnnnnnnnnnnnnnnnnnnnnnnnnnnnnnnnnnnnnnnnnnnnnnnnnnnnnnnnnnnnnnnnnnnnnnnnnnnnnnnnnnnnnnnnnnnnnnnnnnnnnnnnnnnnnnnnnnnnnnnnnnnnnnnnnnnnnnnnnnnnnnnnnnnnnnnnnnnnnnnnnnnnnnnnnnnnnnnnnnnnnnnnnnnnnnnnnnnnnnnnnnnnnnnnnnnnnnnnnnnnnnnnnnnnnnnnnnnnnnnnnnnnnnnnnnnnnnnnnnnnnnnnnnnnnnnnnnnnnnnnnnnnnnnnnnnnnnnnnnnnnnnnnnnnnnnnnnnnnnnnnnnnnnnnnnnnnnnnnnnnnnnnnnnnnnnnnnnnnnnnnnnnnnnnnnnnnnnnnnnnnnnnnnnnnnnnnnnnnnnnnnnnnnnnnnnnnnnnnnnnnnnnnnnnnnnnnnnnnnnnnnnnnnnnnnnnnnnnnnnnnnnnnnnnnnnnnnnnnnnnnnnnnnnnnnnnnnnnnnnnnnnnnnnnnnnnnnnnnnnnnnnnnnnnnnnnnnnnnnnnnnnnnnnnnnnnnnnnnnnnnnnnnnnnnnnnnnnnnnnnnnnnnnnnnnnnnnnnnnnnnnnnnnnnnnnnnnnnnnnnnnnnnnnnnnnnnnnnnnnnnnnnnnnnnnnnnnnnnnnnnnnnnnnnnnnnnnnnnnnnnnnnnnnnnnnnnnnnnnnnnnnnnnnnnnnnnnnnnnnnnnnnnnnnnnnnnnnnnnnnnnnnnnnnnnnnnnnnnnnnnnnnnnnnnnnnnnnnnnnnnnnnnnnnnnnnnnnnnnnnnnnnnnnnnnnnnnnnnnnnnnnnnnnnnnnnnnnnnnnnnnnnnnnnnnnnnnnnnnnnnnnnnnnnnnnnnnnnnnnnnnnnnnnnnnnnnnnnnnnnnnnnnnnnnnnnnnnnnnnnnnnnnnnnnnnnnnnnnnnnnnnnnnnnnnnnnnnnnnnnnnnnnnnnnnnnnnnnnnnnnnnnnnnnnnnnnnnnnnnnnnnnnnnnnnnnnnnnnnnnnnnnnnnnnnnnnnnnnnnnnnnnnnnnnnnnnnnnnnnnnnnnnnnnnnnnnnnnnnnnnnnnnnnnnnnnnnnnnnnnnnnnnnnnnnnnnnnnnnnnnnnnnnnnnnnnnnnnnnnnnnnnnnnnnnnnnnnnnnnnnnnnnnnnnnnnnnnnnnnnnnnnnnnnnnnnnnnnnnnnnnnnnnnnnnnnnnnnnnnnnnnnnnnnnnnnnnnnnnnnnnnnnnnnnnnnnnnnnnnnnnnnnnnnnnnnnnnnnnnnnnnnnnnnnnnnnnnnnnnnnnnnnnnnnnnnnnnnnnnnnnnnnnnnnnnnnnnnnnnnnnnnnnnnnnnnnnnnnnnnnnnnnnnnnnnnnnnnnnnnnnnnnnnnnnnnnnnnnnnnnnnnnnnnnnnnnnnnnnnnnnnnnnnnnnnnnnnnnnnnnnnnnnnnnnnnnnnnnnnnnnnnnnnnnnnnnnnnnnnnnnnnnnnnnnnnnnnnnnnnnnnnnnnnnnnnnnnnnnnnnnnnnnnnnnnnnnnnnnnnnnnnnnnnnnnnnnnnnnnnnnnnnnnnnnnnnnnnnnnnnnnnnnnnnnnnnnnnnnnnnnnnnnnnnnnnnnnnnnnnnnnnnnnnnnnnnnnnnnnnnnnnnnnnnnnnnnnnnnnnnnnnnnnnnnnnnnnnnnnnnnnnnnnnnnnnnnnnnnnnnnnnnnnnnnnnnnnnnnnnnnnnnnnnnnnnnnnnnnnnnnnnnnnnnnnnnnnnnnnnnnnnnnnnnnnnnnnnnnnnnnnnnnnnnnnnnnnnnnnnnnnnnnnnnnnnnnnnnnnnnnnnnnnnnnnnnnnnnnnnnnnnnnnnnnnnnnnnnnnnnnnnnnnnnnnnnnnnnnnnnnnnnnnnnnnnnnnnnnnnnnnnnnnnnnnnnnnnnnnnnnnnnnnnnnnnnnnnnnnnnnnnnnnnnnnnnnnnnnnnnnnnnnnnnnnnnnnnnnnnnnnnnnnnnnnnnnnnnnnnnnnnnnnnnnnnnnnnnnnnnnnnnnnnnnnnnnnnnnnnnnnnnnnnnnnnnnnnnnnnnnnnnnnnnnnnnnnnnnnnnnnnnnnnnnnnnnnnnnnnnnnnnnnnnnnnnnnnnnnnnnnnnnnnnnnnnnnnnnnnnnnnnnnnnnnnnnnnnnnnnnnnnnnnnnnnnnnnnnnnnnnnnnnnnnnnnnnnnnnnnnnnnnnnnnnnnnnnnnnnnnnnnnnnnnnnnnnnnnnnnnnnnnnnnnnnnnnnnnnnnnnnnnnnnnnnnnnnnnnnnnnnnnnnnnnnnnnnnnnnnnnnnnnnnnnnnnnnnnnnnnnnnnnnnnnnnnnnnnnnnnnnnnnnnnnnnnnnnnnnnnnnnnnnnnnnnnnnnnnnnnnnnnnnnnnnnnnnnnnnnnnnnnnnnnnnnnnnnnnnnnnnnnnnnnnnnnnnnnnnnnnnnnnnnnnnnnnnnnnnnnnnnnnnnnnnnnnnnnnnnnnnnnnnnnnnnnnnnnnnnnnnnnnnnnnnnnnnnnnnnnnnnnnnnnnnnnnnnnnnnnnnnnnnnnnnnnnnnnnnnnnnnnnnnnnnnnnnnnnnnnnnnnnnnnnnnnnnnnnnnnnnnnnnnnnnnnnnnnnnnnnnnnnnnnnnnnnnnnnnnnnnnnnnnnnnnnnnnnnnnnnnnnnnnnnnnnnnnnnnnnnnnnnnnnnnnnnnnnnnnnnnnnnnnnnnnnnnnnnnnnnnnnnnnnnnnnnnnnnnnnnnnnnnnnnnnnnnnnnnnnnnnnnnnnnnnnnnnnnnnnnnnnnnnnnnnnnnnnnnnnnnnnnnnnnnnnnnnnnnnnnnnnnnnnnnnnnnnnnnnnnnnnnnnnnnnnnnnnnnnnnnnnnnnnnnnnnnnnnnnnnnnnnnnnnnnnnnnnnnnnnnnnnnnnnnnnnnnnnnnnnnnnnnnnnnnnnnnnnnnnnnnnnnnnnnnnnnnnnnnnnnnnnnnnnnnnnnnnnnnnnnnnnnnnnnnnnnnnnnnnnnnnnnnnnnnnnnnnnnnnnnnnnnnnnnnnnnnnnnnnnnnnnnnnnnnnnnnnnnnnnnnnnnnnnnnnnnnnnnnnnnnnnnnnnnnnnnnnnnnnnnnnnnnnnnnnnnnnnnnnnnnnnnnnnnnnnnnnnnnnnnnnnnnnnnnnnnnnnnnnnnnnnnnnnnnnnnnnnnnnnnnnnnnnnnnnnnnnnnnnnnnnnnnnnnnnnnnnnnnnnnnnnnnnnnnnnnnnnnnnnnnnnnnnnnnnnnnnnnnnnnnnnnnnnnnnnnnnnnnnnnnnnnnnnnnnnnnnnnnnnnnnnnnnnnnnnnnnnnnnnnnnnnnnnnnnnnnnnnnnnnnnnnnnnnnnnnnnnnnnnnnnnnnnnnnnnnnnnnnnnnnnnnnnnnnnnnnnnnnnnnnnnnnnnnnnnnnnnnnnnnnnnnnnnnnnnnnnnnnnnnnnnnnnnnnnnnnnnnnnnnnnnnnnnnnnnnnnnnnnnnnnnnnnnnnnnnnnnnnnnnnnnnnnnnnnnnnnnnnnnnnnnnnnnnnnnnnnnnnnnnnnnnnnnnnnnnnnnnnnnnnnnnnnnnnnnnnnnnnnnnnnnnnnnnnnnnnnnnnnnnnnnnnnnnnnnnnnnnnnnnnnnnnnnnnnnnnnnnnnnnnnnnnnnnnnnnnnnnnnnnnnnnnnnnnnnnnnnnnnnnnnnnnnnnnnnnnnnnnnnnnnnnnnnnnnnnnnnnnnnnnnnnnnnnnnnnnnnnnnnnnnnnnnnnnnnnnnnnnnnnnnnnnnnnnnnnnnnnnnnnnnnnnnnnnnnnnnnnnnnnnnnnnnnnnnnnnnnnnnnnnnnnnnnnnnnnnnnnnnnnnnnnnnnnnnnnnnnnnnnnnnnnnnnnnnnnnnnnnnnnnnnnnnnnnnnnnnnnnnnnnnnnnnnnnnnnnnnnnnnnnnnnnnnnnnnnnnnnnnnnnnnnnnnnnnnnnnnnnnnnnnnnnnnnnnnnnnnnnnnnnnnnnnnnnnnnnnnnnnnnnnnnnnnnnnnnnnnnnnnnnnnnnnnnnnnnnnnnnnnnnnnnnnnnnnnnnnnnnnnnnnnnnnnnnnnnnnnnnnnnnnnnnnnnnnnnnnnnnnnnnnnnnnnnnnnnnnnnnnnnnnnnnnnnnnnnnnnnnnnnnnnnnnnnnnnnnnnnnnnnnnnnnnnnnnnnnnnnnnnnnnnnnnnnnnnnnnnnnnnnnnnnnnnnnnnnnnnnnnnnnnnnnnnnnnnnnnnnnnnnnnnnnnnnnnnnnnnnnnnnnnnnnnnnnnnnnnnnnnnnnnnnnnnnnnnnnnnnnnnnnnnnnnnnnnnnnnnnnnnnnnnnnnnnnnnnnnnnnnnnnnnnnnnnnnnnnnnnnnnnnnnnnnnnnnnnnnnnnnnnnnnnnnnnnnnnnnnnnnnnnnnnnnnnnnnnnnnnnnnnnnnnnnnnnnnnnnnnnnnnnnnnnnnnnnnnnnnnnnnnnnnnnnnnnnnnnnnnnnnnnnnnnnnnnnnnnnnnnnnnnnnnnnnnnnnnnnnnnnnnnnnnnnnnnnnnnnnnnnnnnnnnnnnnnnnnnnnnnnnnnnnnnnnnnnnnnnnnnnnnnnnnnnnnnnnnnnnnnnnnnnnnnnnnnnnnnnnnnnnnnnnnnnnnnnnnnnnnnnnnnnnnnnnnnnnnnnnnnnnnnnnnnnnnnnnnnnnnnnnnnnnnnnnnnnnnnnnnnnnnnnnnnnnnnnnnnnnnnnnnnnnnnnnnnnnnnnnnnnnnnnnnnnnnnnnnnnnnnnnnnnnnnnnnnnnnnnnnnnnnnnnnnnnnnnnnnnnnnnnnnnnnnnnnnnnnnnnnnnnnnnnnnnnnnnnnnnnnnnnnnnnnnnnnnnnnnnnnnnnnnnnnnnnnnnnnnnnnnnnnnnnnnnnnnnnnnnnnnnnnnnnnnnnnnnnnnnnnnnnnnnnnnnnnnnnnnnnnnnnnnnnnnnnnnnnnnnnnnnnnnnnnnnnnnnnnnnnnnnnnnnnnnnnnnnnnnnnnnnnnnnnnnnnnnnnnnnnnnnnnnnnnnnnnnnnnnnnnnnnnnnnnnnnnnnnnnnnnnnnnnnnnnnnnnnnnnnnnnnnnnnnnnnnnnnnnnnnnnnnnnnnnnnnnnnnnnnnnnnnnnnnnnnnnnnnnnnnnnnnnnnnnnnnnnnnnnnnnnnnnnnnnnnnnnnnnnnnnnnnnnnnnnnnnnnnnnnnnnnnnnnnnnnnnnnnnnnnnnnnnnnnnnnnnnnnnnnnnnnnnnnnnnnnnnnnnnnnnnnnnnnnnnnnnnnnnnnnnnnnnnnnnnnnnnnnnnnnnnnnnnnnnnnnnnnnnnnnnnnnnnnnnnnnnnnnnnnnnnnnnnnnnnnnnnnnnnnnnnnnnnnnnnnnnnnnnnnnnnnnnnnnnnnnnnnnnnnnnnnnnnnnnnnnnnnnnnnnnnnnnnnnnnnnnnnnnnnnnnnnnnnnnnnnnnnnnnnnnnnnnnnnnnnnnnnnnnnnnnnnnnnnnnnnnnnnnnnnnnnnnnnnnnnnnnnnnnnnnnnnnnnnnnnnnnnnnnnnnnnnnnnnnnnnnnnnnnnnnnnnnnnnnnnnnnnnnnnnnnnnnnnnnnnnnnnnnnnnnnnnnnnnnnnnnnnnnnnnnnnnnnnnnnnnnnnnnnnnnnnnnnnnnnnnnnnnnnnnnnnnnnnnnnnnnnnnnnnnnnnnnnnnnnnnnnnnnnnnnnnnnnnnnnnnnnnnnnnnnnnnnnnnnnnnnnnnnnnnnnnnnnnnnnnnnnnnnnnnnnnnnnnnnnnnnnnnnnnnnnnnnnnnnnnnnnnnnnnnnnnnnnnnnnnnnnnnnnnnnnnnnnnnnnnnnnnnnnnnnnnnnnnnnnnnnnnnnnnnnnnnnnnnnnnnnnnnnnnnnnnnnnnnnnnnnnnnnnnnnnnnnnnnnnnnnnnnnnnnnnnnnnnnnnnnnnnnnnnnnnnnnnnnnnnnnnnnnnnnnnnnnnnnnnnnnnnnnnnnnnnnnnnnnnnnnnnnnnnnnnnnnnnnnnnnnnnnnnnnnnnnnnnnnnnnnnnnnnnnnnnnnnnnnnnnnnnnnnnnnnnnnnnnnnnnnnnnnnnnnnnnnnnnnnnnnnnnnnnnnnnnnnnnnnnnnnnnnnnnnnnnnnnnnnnnnnnnnnnnnnnnnnnnnnnnnnnnnnnnnnnnnnnnnnnnnnnnnnnnnnnnnnnnnnnnnnnnnnnnnnnnnnnnnnnnnnnnnnnnnnnnnnnnnnnnnnnnnnnnnnnnnnnnnnnnnnnnnnnnnnnnnnnnnnnnnnnnnnnnnnnnnnnnnnnnnnnnnnnnnnnnnnnnnnnnnnnnnnnnnnnnnnnnnnnnnnnnnnnnnnnnnnnnnnnnnnnnnnnnnnnnnnnnnnnnnnnnnnnnnnnnnnnnnnnnnnnnnnnnnnnnnnnnnnnnnnnnnnnnnnnnnnnnnnnnnnnnnnnnnnnnnnnnnnnnnnnnnnnnnnnnnnnnnnnnnnnnnnnnnnnnnnnnnnnnnnnnnnnnnnnnnnnnnnnnnnnnnnnnnnnnnnnnnnnnnnnnnnnnnnnnnnnnnnnnnnnnnnnnnnnnnnnnnnnnnnnnnnnnnnnnnnnnnnnnnnnnnnnnnnnnnnnnnnnnnnnnnnnnnnnnnnnnnnnnnnnnnnnnnnnnnnnnnnnnnnnnnnnnnnnnnnnnnnnnnnnnnnnnnnnnnnnnnnnnnnnnnnnnnnnnnnnnnnnnnnnnnnnnnnnnnnnnnnnnnnnnnnnnnnnnnnnnnnnnnnnnnnnnnnnnnnnnnnnnnnnnnnnnnnnnnnnnnnnnnnnnnnnnnnnnnnnnnnnnnnnnnnnnnnnnnnnnnnnnnnnnnnnnnnnnnnnnnnnnnnnnnnnnnnnnnnnnnnnnnnnnnnnnnnnnnnnnnnnnnnnnnnnnnnnnnnnnnnnnnnnnnnnnnnnnnnnnnnnnnnnnnnnnnnnnnnnnnnnnnnnnnnnnnnnnnnnnnnnnnnnnnnnnnnnnnnnnnnnnnnnnnnnnnnnnnnnnnnnnnnnnnnnnnnnnnnnnnnnnnnnnnnnnnnnnnnnnnnnnnnnnnnnnnnnnnnnnnnnnnnnnnnnnnnnnnnnnnnnnnnnnnnnnnnnnnnnnnnnnnnnnnnnnnnnnnnnnnnnnnnnnnnnnnnnnnnnnnnnnnnnnnnnnnnnnnnnnnnnnnnnnnnnnnnnnnnnnnnnnnnnnnnnnnnnnnnnnnnnnnnnnnnnnnnnnnnnnnnnnnnnnnnnnnnnnnnnnnnnnnnnnnnnnnnnnnnnnnnnnnnnnnnnnnnnnnnnnnnnnnnnnnnnnnnnnnnnnnnnnnnnnnnnnnnnnnnnnnnnnnnnnnnnnnnnnnnnnnnnnnnnnnnnnnnnnnnnnnnnnnnnnnnnnnnnnnnnnnnnnnnnnnnnnnnnnnnnnnnnnnnnnnnnnnnnnnnnnnnnnnnnnnnnnnnnnnnnnnnnnnnnnnnnnnnnnnnnnnnnnnnnnnnnnnnnnnnnnnnnnnnnnnnnnnnnnnnnnnnnnnnnnnnnnnnnnnnnnnnnnnnnnnnnnnnnnnnnnnnnnnnnnnnnnnnnnnnnnnnnnnnnnnnnnnnnnnnnnnnnnnnnnnnnnnnnnnnnnnnnnnnnnnnnnnnnnnnnnnnnnnnnnnnnnnnnnnnnnnnnnnnnnnnnnnnnnnnnnnnnnnnnnnnnnnnnnnnnnnnnnnnnnnnnnnnnnnnnnnnnnnnnnnnnnnnnnnnnnnnnnnnnnnnnnnnnnnnnnnnnnnnnnnnnnnnnnnnnnnnnnnnnnnnnnnnnnnnnnnnnnnnnnnnnnnnnnnnnnnnnnnnnnnnnnnnnnnnnnnnnnnnnnnnnnnnnnnnnnnnnnnnnnnnnnnnnnnnnnnnnnnnnnnnnnnnnnnnnnnnnnnnnnnnnnnnnnnnnnnnnnnnnnnnnnnnnnnnnnnnnnnnnnnnnnnnnnnnnnnnnnnnnnnnnnnnnnnnnnnnnnnnnnnnnnnnnnnnnnnnnnnnnnnnnnnnnnnnnnnnnnnnnnnnnnnnnnnnnnnnnnnnnnnnnnnnnnnnnnnnnnnnnnnnnnnnnnnnnnnnnnnnnnnnnnnnnnnnnnnnnnnnnnnnnnnnnnnnnnnnnnnnnnnnnnnnnnnnnnnnnnnnnnnnnnnnnnnnnnnnnnnnnnnnnnnnnnnnnnnnnnnnnnnnnnnnnnnnnnnnnnnnnnnnnnnnnnnnnnnnnnnnnnnnnnnnnnnnnnnnnnnnnnnnnnnnnnnnnnnnnnnnnnnnnnnnnnnnnnnnnnnnnnnnnnnnnnnnnnnnnnnnnnnnnnnnnnnnnnnnnnnnnnnnnnnnnnnnnnnnnnnnnnnnnnnnnnnnnnnnnnnnnnnnnnnnnnnnnnnnnnnnnnnnnnnnnnnnnnnnnnnnnnnnnnnnnnnnnnnnnnnnnnnnnnnnnnnnnnnnnnnnnnnnnnnnnnnnnnnnnnnnnnnnnnnnnnnnnnnnnnnnnnnnnnnnnnnnnnnnnnnnnnnnnnnnnnnnnnnnnnnnnnnnnnnnnnnnnnnnnnnnnnnnnnnnnnnnnnnnnnnnnnnnnnnnnnnnnnnnnnnnnnnnnnnnnnnnnnnnnnnnnnnnnnnnnnnnnnnnnnnnnnnnnnnnnnnnnnnnnnnnnnnnnnnnnnnnnnnnnnnnnnnnnnnnnnnnnnnnnnnnnnnnnnnnnnnnnnnnnnnnnnnnnnnnnnnnnnnnnnnnnnnnnnnnnnnnnnnnnnnnnnnnnnnnnnnnnnnnnnnnnnnnnnnnnnnnnnnnnnnnnnnnnnnnnnnnnnnnnnnnnnnnnnnnnnnnnnnnnnnnnnnnnnnnnnnnnnnnnnnnnnnnnnnnnnnnnnnnnnnnnnnnnnnnnnnnnnnnnnnnnnnnnnnnnnnnnnnnnnnnnnnnnnnnnnnnnnnnnnnnnnnnnnnnnnnnnnnnnnnnnnnnnnnnnnnnnnnnnnnnnnnnnnnnnnnnnnnnnnnnnnnnnnnnnnnnnnnnnnnnnnnnnnnnnnnnnnnnnnnnnnnnnnnnnnnnnnnnnnnnnnnnnnnnnnnnnnnnnnnnnnnnnnnnnnnnnnnnnnnnnnnnnnnnnnnnnnnnnnnnnnnnnnnnnnnnnnnnnnnnnnnnnnnnnnnnnnnnnnnnnnnnnnnnnnnnnnnnnnnnnnnnnnnnnnnnnnnnnnnnnnnnnnnnnnnnnnnnnnnnnnnnnnnnnnnnnnnnnnnnnnnnnnnnnnnnnnnnnnnnnnnnnnnnnnnnnnnnnnnnnnnnnnnnnnnnnnnnnnnnnnnnnnnnnnnnnnnnnnnnnnnnnnnnnnnnnnnnnnnnnnnnnnnnnnnnnnnnnnnnnnnnnnnnnnnnnnnnnnnnnnnnnnnnnnnnnnnnnnnnnnnnnnnnnnnnnnnnnnnnnnnnnnnnnnnnnnnnnnnnnnnnnnnnnnnnnnnnnnnnnnnnnnnnnnnnnnnnnnnnnnnnnnnnnnnnnnnnnnnnnnnnnnnnnnnnnnnnnnnnnnnnnnnnnnnnnnnnnnnnnnnnnnnnnnnnnnnnnnnnnnnnnnnnnnnnnnnnnnnnnnnnnnnnnnnnnnnnnnnnnnnnnnnnnnnnnnnnnnnnnnnnnnnnnnnnnnnnnnnnnnnnnnnnnnnnnnnnnnnnnnnnnnnnnnnnnnnnnnnnnnnnnnnnnnnnnnnnnnnnnnnnnnnnnnnnnnnnnnnnnnnnnnnnnnnnnnnnnnnnnnnnnnnnnnnnnnnnnnnnnnnnnnnnnnnnnnnnnnnnnnnnnnnnnnnnnnnnnnnnnnnnnnnnnnnnnnnnnnnnnnnnnnnnnnnnnnnnnnnnnnnnnnnnnnnnnnnnnnnnnnnnnnnnnnnnnnnnnnnnnnnnnnnnnnnnnnnnnnnnnnnnnnnnnnnnnnnnnnnnnnnnnnnnnnnnnnnnnnnnnnnnnnnnnnnnnnnnnnnnnnnnnnnnnnnnnnnnnnnnnnnnnnnnnnnnnnnnnnnnnnnnnnnnnnnnnnnnnnnnnnnnnnnnnnnnnnnnnnnnnnnnnnnnnnnnnnnnnnnnnnnnnnnnnnnnnnnnnnnnnnnnnnnnnnnnnnnnnnnnnnnnnnnnnnnnnnnnnnnnnnnnnnnnnnnnnnnnnnnnnnnnnnnnnnnnnnnnnnnnnnnnnnnnnnnnnnnnnnnnnnnnnnnnnnnnnnnnnnnnnnnnnnnnnnnnnnnnnnnnnnnnnnnnnnnnnnnnnnnnnnnnnnnnnnnnnnnnnnnnnnnnnnnnnnnnnnnnnnnnnnnnnnnnnnnnnnnnnnnnnnnnnnnnnnnnnnnnnnnnnnnnnnnnnnnnnnnnnnnnnnnnnnnnnnnnnnnnnnnnnnnnnnnnnnnnnnnnnnnnnnnnnnnnnnnnnnnnnnnnnnnnnnnnnnnnnnnnnnnnnnnnnnnnnnnnnnnnnnnnnnnnnnnnnnnnnnnnnnnnnnnnnnnnnnnnnnnnnnnnnnnnnnnnnnnnnnnnnnnnnnnnnnnnnnnnnnnnnnnnnnnnnnnnnnnnnnnnnnnnnnnnnnnnnnnnnnnnnnnnnnnnnnnnnnnnnnnnnnnnnnnnnnnnnnnnnnnnnnnnnnnnnnnnnnnnnnnnnnnnnnnnnnnnnnnnnnnnnnnnnnnnnnnnnnnnnnnnnnnnnnnnnnnnnnnnnnnnnnnnnnnnnnnnnnnnnnnnnnnnnnnnnnnnnnnnnnnnnnnnnnnnnnnnnnnnnnnnnnnnnnnnnnnnnnnnnnnnnnnnnnnnnnnnnnnnnnnnnnnnnnnnnnnnnnnnnnnnnnnnnnnnnnnnnnnnnnnnnnnnnnnnnnnnnnnnnnnnnnnnnnnnnnnnnnnnnnnnnnnnnnnnnnnnnnnnnnnnnnnnnnnnnnnnnnnnnnnnnnnnnnnnnnnnnnnnnnnnnnnnnnnnnnnnnnnnnnnnnnnnnnnnnnnnnnnnnnnnnnnnnnnnnnnnnnnnnnnnnnnnnnnnnnnnnnnnnnnnnnnnnnnnnnnnnnnnnnnnnnnnnnnnnnnnnnnnnnnnnnnnnnnnnnnnnnnnnnnnnnnnnnnnnnnnnnnnnnnnnnnnnnnnnnnnnnnnnnnnnnnnnnnnnnnnnnnnnnnnnnnnnnnnnnnnnnnnnnnnnnnnnnnnnnnnnnnnnnnnnnnnnnnnnnnnnnnnnnnnnnnnnnnnnnnnnnnnnnnnnnnnnnnnnnnnnnnnnnnnnnnnnnnnnnnnnnnnnnnnnnnnnnnnnnnnnnnnnnnnnnnnnnnnnnnnnnnnnnnnnnnnnnnnnnnnnnnnnnnnnnnnnnnnnnnnnnnnnnnnnnnnnnnnnnnnnnnnnnnnnnnnnnnnnnnnnnnnnnnnnnnnnnnnnnnnnnnnnnnnnnnnnnnnnnnnnnnnnnnnnnnnnnnnnnnnnnnnnnnnnnnnnnnnnnnnnnnnnnnnnnnnnnnnnnnnnnnnnnnnnnnnnnnnnnnnnnnnnnnnnnnnnnnnnnnnnnnnnnnnnnnnnnnnnnnnnnnnnnnnnnnnnnnnnnnnnnnnnnnnnnnnnnnnnnnnnnnnnnnnnnnnnnnnnnnnnnnnnnnnnnnnnnnnnnnnnnnnnnnnnnnnnnnnnnnnnnnnnnnnnnnnnnnnnnnnnnnnnnnnnnnnnnnnnnnnnnnnnnnnnnnnnnnnnnnnnnnnnnnnnnnnnnnnnnnnnnnnnnnnnnnnnnnnnnnnnnnnnnnnnnnnnnnnnnnnnnnnnnnnnnnnnnnnnnnnnnnnnnnnnnnnnnnnnnnnnnnnnnnnnnnnnnnnnnnnnnnnnnnnnnnnnnnnnnnnnnnnnnnnnnnnnnnnnnnnnnnnnnnnnnnnnnnnnnnnnnnnnnnnnnnnnnnnnnnnnnnnnnnnnnnnnnnnnnnnnnnnnnnnnnnnnnnnnnnnnnnnnnnnnnnnnnnnnnnnnnnnnnnnnnnnnnnnnnnnnnnnnnnnnnnnnnnnnnnnnnnnnnnnnnnnnnnnnnnnnnnnnnnnnnnnnnnnnnnnnnnnnnnnnnnnnnnnnnnnnnnnnnnnnnnnnnnnnnnnnnnnnnnnnnnnnnnnnnnnnnnnnnnnnnnnnnnnnnnnnnnnnnnnnnnnnnnnnnnnnnnnnnnnnnnnnnnnnnnnnnnnnnnnnnnnnnnnnnnnnnnnnnnnnnnnnnnnnnnnnnnnnnnnnnnnnnnnnnnnnnnnnnnnnnnnnnnnnnnnnnnnnnnnnnnnnnnnnnnnnnnnnnnnnnnnnnnnnnnnnnnnnnnnnnnnnnnnnnnnnnnnnnnnnnnnnnnnnnnnnnnnnnnnnnnnnnnnnnnnnnnnnnnnnnnnnnnnnnnnnnnnnnnnnnnnnnnnnnnnnnnnnnnnnnnnnnnnnnnnnnnnnnnnnnnnnnnnnnnnnnnnnnnnnnnnnnnnnnnnnnnnnnnnnnnnnnnnnnnnnnnnnnnnnnnnnnnnnnnnnnnnnnnnnnnnnnnnnnnnnnnnnnnnnnnnnnnnnnnnnnnnnnnnnnnnnnnnnnnnnnnnnnnnnnnnnnnnnnnnnnnnnnnnnnnnnnnnnnnnnnnnnnnnnnnnnnnnnnnnnnnnnnnnnnnnnnnnnnnnnnnnnnnnnnnnnnnnnnnnnnnnnnnnnnnnnnnnnnnnnnnnnnnnnnnnnnnnnnnnnnnnnnnnnnnnnnnnnnnnnnnnnnnnnnnnnnnnnnnnnnnnnnnnnnnnnnnnnnnnnnnnnnnnnnnnnnnnnnnnnnnnnnnnnnnnnnnnnnnnnnnnnnnnnnnnnnnnnnnnnnnnnnnnnnnnnnnnnnnnnnnnnnnnnnnnnnnnnnnnnnnnnnnnnnnnnnnnnnnnnnnnnnnnnnnnnnnnnnnnnnnnnnnnnnnnnnnnnnnnnnnnnnnnnnnnnnnnnnnnnnnnnnnnnnnnnnnnnnnnnnnnnnnnnnnnnnnnnnnnnnnnnnnnnnnnnnnnnnnnnnnnnnnnnnnnnnnnnnnnnnnnnnnnnnnnnnnnnnnnnnnnnnnnnnnnnnnnnnnnnnnnnnnnnnnnnnnnnnnnnnnnnnnnnnnnnnnnnnnnnnnnnnnnnnnnnnnnnnnnnnnnnnnnnnnnnnnnnnnnnnnnnnnnnnnnnnnnnnnnnnnnnnnnnnnnnnnnnnnnnnnnnnnnnnnnnnnnnnnnnnnnnnnnnnnnnnnnnnnnnnnnnnnnnnnnnnnnnnnnnnnnnnnnnnnnnnnnnnnnnnnnnnnnnnnnnnnnnnnnnnnnnnnnnnnnnnnnnnnnnnnnnnnnnnnnnnnnnnnnnnnnnnnnnnnnnnnnnnnnnnnnnnnnnnnnnnnnnnnnnnnnnnnnnnnnnnnnnnnnnnnnnnnnnnnnnnnnnnnnnnnnnnnnnnnnnnnnnnnnnnnnnnnnnnnnnnnnnnnnnnnnnnnnnnnnnnnnnnnnnnnnnnnnnnnnnnnnnnnnnnnnnnnnnnnnnnnnnnnnnnnnnnnnnnnnnnnnnnnnnnnnnnnnnnnnnnnnnnnnnnnnnnnnnnnnnnnnnnnnnnnnnnnnnnnnnnnnnnnnnnnnnnnnnnnnnnnnnnnnnnnnnnnnnnnnnnnnnnnnnnnnnnnnnnnnnnnnnnnnnnnnnnnnnnnnnnnnnnnnnnnnnnnnnnnnnnnnnnnnnnnnnnnnnnnnnnnnnnnnnnnnnnnnnnnnnnnnnnnnnnnnnnnnnnnnnnnnnnnnnnnnnnnnnnnnnnnnnnnnnnnnnnnnnnnnnnnnnnnnnnnnnnnnnnnnnnnnnnnnnnnnnnnnnnnnnnnnnnnnnnnnnnnnnnnnnnnnnnnnnnnnnnnnnnnnnnnnnnnnnnnnnnnnnnnnnnnnnnnnnnnnnnnnnnnnnnnnnnnnnnnnnnnnnnnnnnnnnnnnnnnnnnnnnnnnnnnnnnnnnnnnnnnnnnnnnnnnnnnnnnnnnnnnnnnnnnnnnnnnnnnnnnnnnnnnnnnnnnnnnnnnnnnnnnnnnnnnnnnnnnnnnnnnnnnnnnnnnnnnnnnnnnnnnnnnnnnnnnnnnnnnnnnnnnnnnnnnnnnnnnnnnnnnnnnnnnnnnnnnnnnnnnnnnnnnnnnnnnnnnnnnnnnnnnnnnnnnnnnnnnnnnnnnnnnnnnnnnnnnnnnnnnnnnnnnnnnnnnnnnnnnnnnnnnnnnnnnnnnnnnnnnnnnnnnnnnnnnnnnnnnnnnnnnnnnnnnnnnnnnnnnnnnnnnnnnnnnnnnnnnnnnnnnnnnnnnnnnnnnnnnnnnnnnnnnnnnnnnnnnnnnnnnnnnnnnnnnnnnnnnnnnnnnnnnnnnnnnnnnnnnnnnnnnnnnnnnnnnnnnnnnnnnnnnnnnnnnnnnnnnnnnnnnnnnnnnnnnnnnnnnnnnnnnnnnnnnnnnnnnnnnnnnnnnnnnnnnnnnnnnnnnnnnnnnnnnnnnnnnnnnnnnnnnnnnnnnnnnnnnnnnnnnnnnnnnnnnnnnnnnnnnnnnnnnnnnnnnnnnnnnnnnnnnnnnnnnnnnnnnnnnnnnnnnnnnnnnnnnnnnnnnnnnnnnnnnnnnnnnnnnnnnnnnnnnnnnnnnnnnnnnnnnnnnnnnnnnnnnnnnnnnnnnnnnnnnnnnnnnnnnnnnnnnnnnnnnnnnnnnnnnnnnnnnnnnnnnnnnnnnnnnnnnnnnnnnnnnnnnnnnnnnnnnnnnnnnnnnnnnnnnnnnnnnnnnnnnnnnnnnnnnnnnnnnnnnnnnnnnnnnnnnnnnnnnnnnnnnnnnnnnnnnnnnnnnnnnnnnnnnnnnnnnnnnnnnnnnnnnnnnnnnnnnnnnnnnnnnnnnnnnnnnnnnnnnnnnnnnnnnnnnnnnnnnnnnnnnnnnnnnnnnnnnnnnnnnnnnnnnnnnnnnnnnnnnnnnnnnnnnnnnnnnnnnnnnnnnnnnnnnnnnnnnnnnnnnnnnnnnnnnnnnnnnnnnnnnnnnnnnnnnnnnnnnnnnnnnnnnnnnnnnnnnnnnnnnnnnnnnnnnnnnnnnnnnnnnnnnnnnnnnnnnnnnnnnnnnnnnnnnnnnnnnnnnnnnnnnnnnnnnnnnnnnnnnnnnnnnnnnnnnnnnnnnnnnnnnnnnnnnnnnnnnnnnnnnnnnnnnnnnnnnnnnnnnnnnnnnnnnnnnnnnnnnnnnnnnnnnnnnnnnnnnnnnnnnnnnnnnnnnnnnnnnnnnnnnnnnnnnnnnnnnnnnnnnnnnnnnnnnnnnnnnnnnnnnnnnnnnnnnnnnnnnnnnnnnnnnnnnnnnnnnnnnnnnnnnnnnnnnnnnnnnnnnnnnnnnnnnnnnnnnnnnnnnnnnnnnnnnnnnnnnnnnnnnnnnnnnnnnnnnnnnnnnnnnnnnnnnnnnnnnnnnnnnnnnnnnnnnnnnnnnnnnnnnnnnnnnnnnnnnnnnnnnnnnnnnnnnnnnnnnnnnnnnnnnnnnnnnnnnnnnnnnnnnnnnnnnnnnnnnnnnnnnnnnnnnnnnnnnnnnnnnnnnnnnnnnnnnnnnnnnnnnnnnnnnnnnnnnnnnnnnnnnnnnnnnnnnnnnnnnnnnnnnnnnnnnnnnnnnnnnnnnnnnnnnnnnnnnnnnnnnnnnnnnnnnnnnnnnnnnnnnnnnnnnnnnnnnnnnnnnnnnnnnnnnnnnnnnnnnnnnnnnnnnnnnnnnnnnnnnnnnnnnnnnnnnnnnnnnnnnnnnnnnnnnnnnnnnnnnnnnnnnnnnnnnnnnnnnnnnnnnnnnnnnnnnnnnnnnnnnnnnnnnnnnnnnnnnnnnnnnnnnnnnnnnnnnnnnnnnnnnnnnnnnnnnnnnnnnnnnnnnnnnnnnnnnnnnnnnnnnnnnnnnnnnnnnnnnnnnnnnnnnnnnnnnnnnnnnnnnnnnnnnnnnnnnnnnnnnnnnnnnnnnnnnnnnnnnnnnnnnnnnnnnnnnnnnnnnnnnnnnnnnnnnnnnnnnnnnnnnnnnnnnnnnnnnnnnnnnnnnnnnnnnnnnnnnnnnnnnnnnnnnnnnnnnnnnnnnnnnnnnnnnnnnnnnnnnnnnnnnnnnnnnnnnnnnnnnnnnnnnnnnnnnnnnnnnnnnnnnnnnnnnnnnnnnnnnnnnnnnnnnnnnnnnnnnnnnnnnnnnnnnnnnnnnnnnnnnnnnnnnnnnnnnnnnnnnnnnnnnnnnnnnnnnnnnnnnnnnnnnnnnnnnnnnnnnnnnnnnnnnnnnnnnnnnnnnnnnnnnnnnnnnnnnnnnnnnnnnnnnnnnnnnnnnnnnnnnnnnnnnnnnnnnnnnnnnnnnnnnnnnnnnnnnnnnnnnnnnnnnnnnnnnnnnnnnnnnnnnnnnnnnnnnnnnnnnnnnnnnnnnnnnnnnnnnnnnnnnnnnnnnnnnnnnnnnnnnnnnnnnnnnnnnnnnnnnnnnnnnnnnnnnnnnnnnnnnnnnnnnnnnnnnnnnnnnnnnnnnnnnnnnnnnnnnnnnnnnnnnnnnnnnnnnnnnnnnnnnnnnnnnnnnnnnnnnnnnnnnnnnnnnnnnnnnnnnnnnnnnnnnnnnnnnnnnnnnnnnnnnnnnnnnnnnnnnnnnnnnnnnnnnnnnnnnnnnnnnnnnnnnnnnnnnnnnnnnnnnnnnnnnnnnnnnnnnnnnnnnnnnnnnnnnnnnnnnnnnnnnnnnnnnnnnnnnnnnnnnnnnnnnnnnnnnnnnnnnnnnnnnnnnnnnnnnnnnnnnnnnnnnnnnnnnnnnnnnnnnnnnnnnnnnnnnnnnnnnnnnnnnnnnnnnnnnnnnnnnnnnnnnnnnnnnnnnnnnnnnnnnnnnnnnnnnnnnnnnnnnnnnnnnnnnnnnnnnnnnnnnnnnnnnnnnnnnnnnnnnnnnnnnnnnnnnnnnnnnnnnnnnnnnnnnnnnnnnnnnnnnnnnnnnnnnnnnnnnnnnnnnnnnnnnnnnnnnnnnnnnnnnnnnnnnnnnnnnnnnnnnnnnnnnnnnnnnnnnnnnnnnnnnnnnnnnnnnnnnnnnnnnnnnnnnnnnnnnnnnnnnnnnnnnnnnnnnnnnnnnnnnnnnnnnnnnnnnnnnnnnnnnnnnnnnnnnnnnnnnnnnnnnnnnnnnnnnnnnnnnnnnnnnnnnnnnnnnnnnnnnnnnnnnnnnnnnnnnnnnnnnnnnnnnnnnnnnnnnnnnnnnnnnnnnnnnnnnnnnnnnnnnnnnnnnnnnnnnnnnnnnnnnnnnnnnnnnnnnnnnnnnnnnnnnnnnnnnnnnnnnnnnnnnnnnnnnnnnnnnnnnnnnnnnnnnnnnnnnnnnnnnnnnnnnnnnnnnnnnnnnnnnnnnnnnnnnnnnnnnnnnnnnnnnnnnnnnnnnnnnnnnnnnnnnnnnnnnnnnnnnnnnnnnnnnnnnnnnnnnnnnnnnnnnnnnnnnnnnnnnnnnnnnnnnnnnnnnnnnnnnnnnnnnnnnnnnnnnnnnnnnnnnnnnnnnnnnnnnnnnnnnnnnnnnnnnnnnnnnnnnnnnnnnnnnnnnnnnnnnnnnnnnnnnnnnnnnnnnnnnnnnnnnnnnnnnnnnnnnnnnnnnnnnnnnnnnnnnnnnnnnnnnnnnnnnnnnnnnnnnnnnnnnnnnnnnnnnnnnnnnnnnnnnnnnnnnnnnnnnnnnnnnnnnnnnnnnnnnnnnnnnnnnnnnnnnnnnnnnnnnnnnnnnnnnnnnnnnnnnnnnnnnnnnnnnnnnnnnnnnnnnnnnnnnnnnnnnnnnnnnnnnnnnnnnnnnnnnnnnnnnnnnnnnnnnnnnnnnnnnnnnnnnnnnnnnnnnnnnnnnnnnnnnnnnnnnnnnnnnnnnnnnnnnnnnnnnnnnnnnnnnnnnnnnnnnnnnnnnnnnnnnnnnnnnnnnnnnnnnnnnnnnnnnnnnnnnnnnnnnnnnnnnnnnnnnnnnnnnnnnnnnnnnnnnnnnnnnnnnnnnnnnnnnnnnnnnnnnnnnnnnnnnnnnnnnnnnnnnnnnnnnnnnnnnnnnnnnnnnnnnnnnnnnnnnnnnnnnnnnnnnnnnnnnnnnnnnnnnnnnnnnnnnnnnnnnnnnnnnnnnnnnnnnnnnnnnnnnnnnnnnnnnnnnnnnnnnnnnnnnnnnnnnnnnnnnnnnnnnnnnnnnnnnnnnnnnnnnnnnnnnnnnnnnnnnnnnnnnnnnnnnnnnnnnnnnnnnnnnnnnnnnnnnnnnnnnnnnnnnnnnnnnnnnnnnnnnnnnnnnnnnnnnnnnnnnnnnnnnnnnnnnnnnnnnnnnnnnnnnnnnnnnnnnnnnnnnnnnnnnnnnnnnnnnnnnnnnnnnnnnnnnnnnnnnnnnnnnnnnnnnnnnnnnnnnnnnnnnnnnnnnnnnnnnnnnnnnnnnnnnnnnnnnnnnnnnnnnnnnnnnnnnnnnnnnnnnnnnnnnnnnnnnnnnnnnnnnnnnnnnnnnnnnnnnnnnnnnnnnnnnnnnnnnnnnnnnnnnnnnnnnnnnnnnnnnnnnnnnnnnnnnnnnnnnnnnnnnnnnnnnnnnnnnnnnnnnnnnnnnnnnnnnnnnnnnnnnnnnnnnnnnnnnnnnnnnnnnnnnnnnnnnnnnnnnnnnnnnnnnnnnnnnnnnnnnnnnnnnnnnnnnnnnnnnnnnnnnnnnnnnnnnnnnnnnnnnnnnnnnnnnnnnnnnnnnnnnnnnnnnnnnnnnnnnnnnnnnnnnnnnnnnnnnnnnnnnnnnnnnnnnnnnnnnnnnnnnnnnnnnnnnnnnnnnnnnnnnnnnnnnnnnnnnnnnnnnnnnnnnnnnnnnnnnnnnnnnnnnnnnnnnnnnnnnnnnnnnnnnnnnnnnnnnnnnnnnnnnnnnnnnnnnnnnnnnnnnnnnnnnnnnnnnnnnnnnnnnnnnnnnnnnnnnnnnnnnnnnnnnnnnnnnnnnnnnnnnnnnnnnnnnnnnnnnnnnnnnnnnnnnnnnnnnnnnnnnnnnnnnnnnnnnnnnnnnnnnnnnnnnnnnnnnnnnnnnnnnnnnnnnnnnnnnnnnnnnnnnnnnnnnnnnnnnnnnnnnnnnnnnnnnnnnnnnnnnnnnnnnnnnnnnnnnnnnnnnnnnnnnnnnnnnnnnnnnnnnnnnnnnnnnnnnnnnnnnnnnnnnnnnnnnnnnnnnnnnnnnnnnnnnnnnnnnnnnnnnnnnnnnnnnnnnnnnnnnnnnnnnnnnnnnnnnnnnnnnnnnnnnnnnnnnnnnnnnnnnnnnnnnnnnnnnnnnnnnnnnnnnnnnnnnnnnnnnnnnnnnnnnnnnnnnnnnnnnnnnnnnnnnnnnnnnnnnnnnnnnnnnnnnnnnnnnnnnnnnnnnnnnnnnnnnnnnnnnnnnnnnnnnnnnnnnnnnnnnnnnnnnnnnnnnnnnnnnnnnnnnnnnnnnnnnnnnnnnnnnnnnnnnnnnnnnnnnnnnnnnnnnnnnnnnnnnnnnnnnnnnnnnnnnnnnnnnnnnnnnnnnnnnnnnnnnnnnnnnnnnnnnnnnnnnnnnnnnnnnnnnnnnnnnnnnnnnnnnnnnnnnnnnnnnnnnnnnnnnnnnnnnnnnnnnnnnnnnnnnnnnnnnnnnnnnnnnnnnnnnnnnnnnnnnnnnnnnnnnnnnnnnnnnnnnnnnnnnnnnnnnnnnnnnnnnnnnnnnnnnnnnnnnnnnnnnnnnnnnnnnnnnnnnnnnnnnnnnnnnnnnnnnnnnnnnnnnnnnnnnnnnnnnnnnnnnnnnnnnnnnnnnnnnnnnnnnnnnnnnnnnnnnnnnnnnnnnnnnnnnnnnnnnnnnnnnnnnnnnnnnnnnnnnnnnnnnnnnnnnnnnnnnnnnnnnnnnnnnnnnnnnnnnnnnnnnnnnnnnnnnnnnnnnnnnnnnnnnnnnnnnnnnnnnnnnnnnnnnnnnnnnnnnnnnnnnnnnnnnnnnnnnnnnnnnnnnnnnnnnnnnnnnnnnnnnnnnnnnnnnnnnnnnnnnnnnnnnnnnnnnnnnnnnnnnnnnnnnnnnnnnnnnnnnnnnnnnnnnnnnnnnnnnnnnnnnnnnnnnnnnnnnnnnnnnnnnnnnnnnnnnnnnnnnnnnnnnnnnnnnnnnnnnnnnnnnnnnnnnnnnnnnnnnnnnnnnnnnnnnnnnnnnnnnnnnnnnnnnnnnnnnnnnnnnnnnnnnnnnnnnnnnnnnnnnnnnnnnnnnnnnnnnnnnnnnnnnnnnnnnnnnnnnnnnnnnnnnnnnnnnnnnnnnnnnnnnnnnnnnnnnnnnnnnnnnnnnnnnnnnnnnnnnnnnnnnnnnnnnnnnnnnnnnnnnnnnnnnnnnnnnnnnnnnnnnnnnnnnnnnnnnnnnnnnnnnnnnnnnnnnnnnnnnnnnnnnnnnnnnnnnnnnnnnnnnnnnnnnnnnnnnnnnnnnnnnnnnnnnnnnnnnnnnnnnnnnnnnnnnnnnnnnnnnnnnnnnnnnnnnnnnnnnnnnnnnnnnnnnnnnnnnnnnnnnnnnnnnnnnnnnnnnnnnnnnnnnnnnnnnnnnnnnnnnnnnnnnnnnnnnnnnnnnnnnnnnnnnnnnnnnnnnnnnnnnnnnnnnnnnnnnnnnnnnnnnnnnnnnnnnnnnnnnnnnnnnnnnnnnnnnnnnnnnnnnnnnnnnnnnnnnnnnnnnnnnnnnnnnnnnnnnnnnnnnnnnnnnnnnnnnnnnnnnnnnnnnnnnnnnnnnnnnnnnnnnnnnnnnnnnnnnnnnnnnnnnnnnnnnnnnnnnnnnnnnnnnnnnnnnnnnnnnnnnnnnnnnnnnnnnnnnnnnnnnnnnnnnnnnnnnnnnnnnnnnnnnnnnnnnnnnnnnnnnnnnnnnnnnnnnnnnnnnnnnnnnnnnnnnnnnnnnnnnnnnnnnnnnnnnnnnnnnnnnnnnnnnnnnnnnnnnnnnnnnnnnnnnnnnnnnnnnnnnnnnnnnnnnnnnnnnnnnnnnnnnnnnnnnnnnnnnnnnnnnnnnnnnnnnnnnnnnnnnnnnnnnnnnnnnnnnnnnnnnnnnnnnnnnnnnnnnnnnnnnnnnnnnnnnnnnnnnnnnnnnnnnnnnnnnnnnnnnnnnnnnnnnnnnnnnnnnnnnnnnnnnnnnnnnnnnnnnnnnnnnnnnnnnnnnnnnnnnnnnnnnnnnnnnnnnnnnnnnnnnnnnnnnnnnnnnnnnnnnnnnnnnnnnnnnnnnnnnnnnnnnnnnnnnnnnnnnnnnnnnnnnnnnnnnnnnnnnnnnnnnnnnnnnnnnnnnnnnnnnnnnnnnnnnnnnnnnnnnnnnnnnnnnnnnnnnnnnnnnnnnnnnnnnnnnnnnnnnnnnnnnnnnnnnnnnnnnnnnnnnnnnnnnnnnnnnnnnnnnnnnnnnnnnnnnnnnnnnnnnnnnnnnnnnnnnnnnnnnnnnnnnnnnnnnnnnnnnnnnnnnnnnnnnnnnnnnnnnnnnnnnnnnnnnnnnnnnnnnnnnnnnnnnnnnnnnnnnnnnnnnnnnnnnnnnnnnnnnnnnnnnnnnnnnnnnnnnnnnnnnnnnnnnnnnnnnnnnnnnnnnnnnnnnnnnnnnnnnnnnnnnnnnnnnnnnnnnnnnnnnnnnnnnnnnnnnnnnnnnnnnnnnnnnnnnnnnnnnnnnnnnnnnnnnnnnnnnnnnnnnnnnnnnnnnnnnnnnnnnnnnnnnnnnnnnnnnnnnnnnnnnnnnnnnnnnnnnnnnnnnnnnnnnnnnnnnnnnnnnnnnnnnnnnnnnnnnnnnnnnnnnnnnnnnnnnnnnnnnnnnnnnnnnnnnnnnnnnnnnnnnnnnnnnnnnnnnnnnnnnnnnnnnnnnnnnnnnnnnnnnnnnnnnnnnnnnnnnnnnnnnnnnnnnnnnnnnnnnnnnnnnnnnnnnnnnnnnnnnnnnnnnnnnnnnnnnnnnnnnnnnnnnnnnnnnnnnnnnnnnnnnnnnnnnnnnnnnnnnnnnnnnnnnnnnnnnnnnnnnnnnnnnnnnnnnnnnnnnnnnnnnnnnnnnnnnnnnnnnnnnnnnnnnnnnnnnnnnnnnnnnnnnnnnnnnnnnnnnnnnnnnnnnnnnnnnnnnnnnnnnnnnnnnnnnnnnnnnnnnnnnnnnnnnnnnnnnnnnnnnnnnnnnnnnnnnnnnnnnnnnnnnnnnnnnnnnnnnnnnnnnnnnnnnnnnnnnnnnnnnnnnnnnnnnnnnnnnnnnnnnnnnnnnnnnnnnnnnnnnnnnnnnnnnnnnnnnnnnnnnnnnnnnnnnnnnnnnnnnnnnnnnnnnnnnnnnnnnnnnnnnnnnnnnnnnnnnnnnnnnnnnnnnnnnnnnnnnnnnnnnnnnnnnnnnnnnnnnnnnnnnnnnnnnnnnnnnnnnnnnnnnnnnnnnnnnnnnnnnnnnnnnnnnnnnnnnnnnnnnnnnnnnnnnnnnnnnnnnnnnnnnnnnnnnnnnnnnnnnnnnnnnnnnnnnnnnnnnnnnnnnnnnnnnnnnnnnnnnnnnnnnnnnnnnnnnnnnnnnnnnnnnnnnnnnnnnnnnnnnnnnnnnnnnnnnnnnnnnnnnnnnnnnnnnnnnnnnnnnnnnnnnnnnnnnnnnnnnnnnnnnnnnnnnnnnnnnnnnnnnnnnnnnnnnnnnnnnnnnnnnnnnnnnnnnnnnnnnnnnnnnnnnnnnnnnnnnnnnnnnnnnnnnnnnnnnnnnnnnnnnnnnnnnnnnnnnnnnnnnnnnnnnnnnnnnnnnnnnnnnnnnnnnnnnnnnnnnnnnnnnnnnnnnnnnnnnnnnnnnnnnnnnnnnnnnnnnnnnnnnnnnnnnnnnnnnnnnnnnnnnnnnnnnnnnnnnnnnnnnnnnnnnnnnnnnnnnnnnnnnnnnnnnnnnnnnnnnnnnnnnnnnnnnnnnnnnnnnnnnnnnnnnnnnnnnnnnnnnnnnnnnnnnnnnnnnnnnnnnnnnnnnnnnnnnnnnnnnnnnnnnnnnnnnnnnnnnnnnnnnnnnnnnnnnnnnnnnnnnnnnnnnnnnnnnnnnnnnnnnnnnnnnnnnnnnnnnnnnnnnnnnnnnnnnnnnnnnnnnnnnnnnnnnnnnnnnnnnnnnnnnnnnnnnnnnnnnnnnnnnnnnnnnnnnnnnnnnnnnnnnnnnnnnnnnnnnnnnnnnnnnnnnnnnnnnnnnnnnnnnnnnnnnnnnnnnnnnnnnnnnnnnnnnnnnnnnnnnnnnnnnnnnnnnnnnnnnnnnnnnnnnnnnnnnnnnnnnnnnnnnnnnnnnnnnnnnnnnnnnnnnnnnnnnnnnnnnnnnnnnnnnnnnnnnnnnnnnnnnnnnnnnnnnnnnnnnnnnnnnnnnnnnnnnnnnnnnnnnnnnnnnnnnnnnnnnnnnnnnnnnnnnnnnnnnnnnnnnnnnnnnnnnnnnnnnnnnnnnnnnnnnnnnnnnnnnnnnnnnnnnnnnnnnnnnnnnnnnnnnnnnnnnnnnnnnnnnnnnnnnnnnnnnnnnnnnnnnnnnnnnnnnnnnnnnnnnnnnnnnnnnnnnnnnnnnnnnnnnnnnnnnnnnnnnnnnnnnnnnnnnnnnnnnnnnnnnnnnnnnnnnnnnnnnnnnnnnnnnnnnnnnnnnnnnnnnnnnnnnnnnnnnnnnnnnnnnnnnnnnnnnnnnnnnnnnnnnnnnnnnnnnnnnnnnnnnnnnnnnnnnnnnnnnnnnnnnnnnnnnnnnnnnnnnnnnnnnnnnnnnnnnnnnnnnnnnnnnnnnnnnnnnnnnnnnnnnnnnnnnnnnnnnnnnnnnnnnnnnnnnnnnnnnnnnnnnnnnnnnnnnnnnnnnnnnnnnnnnnnnnnnnnnnnnnnnnnnnnnnnnnnnnnnnnnnnnnnnnnnnnnnnnnnnnnnnnnnnnnnnnnnnnnnnnnnnnnnnnnnnnnnnnnnnnnnnnnnnnnnnnnnnnnnnnnnnnnnnnnnnnnnnnnnnnnnnnnnnnnnnnnnnnnnnnnnnnnnnnnnnnnnnnnnnnnnnnnnnnnnnnnnnnnnnnnnnnnnnnnnnnnnnnnnnnnnnnnnnnnnnnnnnnnnnnnnnnnnnnnnnnnnnnnnnnnnnnnnnnnnnnnnnnnnnnnnnnnnnnnnnnnnnnnnnnnnnnnnnnnnnnnnnnnnnnnnnnnnnnnnnnnnnnnnnnnnnnnnnnnnnnnnnnnnnnnnnnnnnnnnnnnnnnnnnnnnnnnnnnnnnnnnnnnnnnnnnnnnnnnnnnnnnnnnnnnnnnnnnnnnnnnnnnnnnnnnnnnnnnnnnnnnnnnnnnnnnnnnnnnnnnnnnnnnnnnnnnnnnnnnnnnnnnnnnnnnnnnnnnnnnnnnnnnnnnnnnnnnnnnnnnnnnnnnnnnnnnnnnnnnnnnnnnnnnnnnnnnnnnnnnnnnnnnnnnnnnnnnnnnnnnnnnnnnnnnnnnnnnnnnnnnnnnnnnnnnnnnnnnnnnnnnnnnnnnnnnnnnnnnnnnnnnnnnnnnnnnnnnnnnnnnnnnnnnnnnnnnnnnnnnnnnnnnnnnnnnnnnnnnnnnnnnnnnnnnnnnnnnnnnnnnnnnnnnnnnnnnnnnnnnnnnnnnnnnnnnnnnnnnnnnnnnnnnnnnnnnnnnnnnnnnnnnnnnnnnnnnnnnnnnnnnnnnnnnnnnnnnnnnnnnnnnnnnnnnnnnnnnnnnnnnnnnnnnnnnnnnnnnnnnnnnnnnnnnnnnnnnnnnnnnnnnnnnnnnnnnnnnnnnnnnnnnnnnnnnnnnnnnnnnnnnnnnnnnnnnnnnnnnnnnnnnnnnnnnnnnnnnnnnnnnnnnnnnnnnnnnnnnnnnnnnnnnnnnnnnnnnnnnnnnnnnnnnnnnnnnnnnnnnnnnnnnnnnnnnnnnnnnnnnnnnnnnnnnnnnnnnnnnnnnnnnnnnnnnnnnnnnnnnnnnnnnnnnnnnnnnnnnnnnnnnnnnnnnnnnnnnnnnnnnnnnnnnnnnnnnnnnnnnnnnnnnnnnnnnnnnnnnnnnnnnnnnnnnnnnnnnnnnnnnnnnnnnnnnnnnnnnnnnnnnnnnnnnnnnnnnnnnnnnnnnnnnnnnnnnnnnnnnnnnnnnnnnnnnnnnnnnnnnnnnnnnnnnnnnnnnnnnnnnnnnnnnnnnnnnnnnnnnnnnnnnnnnnnnnnnnnnnnnnnnnnnnnnnnnnnnnnnnnnnnnnnnnnnnnnnnnnnnnnnnnnnnnnnnnnnnnnnnnnnnnnnnnnnnnnnnnnnnnnnnnnnnnnnnnnnnnnnnnnnnnnnnnnnnnnnnnnnnnnnnnnnnnnnnnnnnnnnnnnnnnnnnnnnnnnnnnnnnnnnnnnnnnnnnnnnnnnnnnnnnnnnnnnnnnnnnnnnnnnnnnnnnnnnnnnnnnnnnnnnnnnnnnnnnnnnnnnnnnnnnnnnnnnnnnnnnnnnnnnnnnnnnnnnnnnnnnnnnnnnnnnnnnnnnnnnnnnnnnnnnnnnnnnnnnnnnnnnnnnnnnnnnnnnnnnnnnnnnnnnnnnnnnnnnnnnnnnnnnnnnnnnnnnnnnnnnnnnnnnnnnnnnnnnnnnnnnnnnnnnnnnnnnnnnnnnnnnnnnnnnnnnnnnnnnnnnnnnnnnnnnnnnnnnnnnnnnnnnnnnnnnnnnnnnnnnnnnnnnnnnnnnnnnnnnnnnnnnnnnnnnnnnnnnnnnnnnnnnnnnnnnnnnnnnnnnnnnnnnnnnnnnnnnnnnnnnnnnnnnnnnnnnnnnnnnnnnnnnnnnnnnnnnnnnnnnnnnnnnnnnnnnnnnnnnnnnnnnnnnnnnnnnnnnnnnnnnnnnnnnnnnnnnnnnnnnnnnnnnnnnnnnnnnnnnnnnnnnnnnnnnnnnnnnnnnnnnnnnnnnnnnnnnnnnnnnnnnnnnnnnnnnnnnnnnnnnnnnnnnnnnnnnnnnnnnnnnnnnnnnnnnnnnnnnnnnnnnnnnnnnnnnnnnnnnnnnnnnnnnnnnnnnnnnnnnnnnnnnnnnnnnnnnnnnnnnnnnnnnnnnnnnnnnnnnnnnnnnnnnnnnnnnnnnnnnnnnnnnnnnnnnnnnnnnnnnnnnnnnnnnnnnnnnnnnnnnnnnnnnnnnnnnnnnnnnnnnnnnnnnnnnnnnnnnnnnnnnnnnnnnnnnnnnnnnnnnnnnnnnnnnnnnnnnnnnnnnnnnnnnnnnnnnnnnnnnnnnnnnnnnnnnnnnnnnnnnnnnnnnnnnnnnnnnnnnnnnnnnnnnnnnnnnnnnnnnnnnnnnnnnnnnnnnnnnnnnnnnnnnnnnnnnnnnnnnnnnnnnnnnnnnnnnnnnnnnnnnnnnnnnnnnnnnnnnnnnnnnnnnnnnnnnnnnnnnnnnnnnnnnnnnnnnnnnnnnnnnnnnnnnnnnnnnnnnnnnnnnnnnnnnnnnnnnnnnnnnnnnnnnnnnnnnnnnnnnnnnnnnnnnnnnnnnnnnnnnnnnnnnnnnnnnnnnnnnnnnnnnnnnnnnnnnnnnnnnnnnnnnnnnnnnnnnnnnnnnnnnnnnnnnnnnnnnnnnnnnnnnnnnnnnnnnnnnnnnnnnnnnnnnnnnnnnnnnnnnnnnnnnnnnnnnnnnnnnnnnnnnnnnnnnnnnnnnnnnnnnnnnnnnnnnnnnnnnnnnnnnnnnnnnnnnnnnnnnnnnnnnnnnnnnnnnnnnnnnnnnnnnnnnnnnnnnnnnnnnnnnnnnnnnnnnnnnnnnnnnnnnnnnnnnnnnnnnnnnnnnnnnnnnnnnnnnnnnnnnnnnnnnnnnnnnnnnnnnnnnnnnnnnnnnnnnnnnnnnnnnnnnnnnnnnnnnnnnnnnnnnnnnnnnnnnnnnnnnnnnnnnnnnnnnnnnnnnnnnnnnnnnnnnnnnnnnnnnnnnnnnnnnnnnnnnnnnnnnnnnnnnnnnnnnnnnnnnnnnnnnnnnnnnnnnnnnnnnnnnnnnnnnnnnnnnnnnnnnnnnnnnnnnnnnnnnnnnnnnnnnnnnnnnnnnnnnnnnnnnnnnnnnnnnnnnnnnnnnnnnnnnnnnnnnnnnnnnnnnnnnnnnnnnnnnnnnnnnnnnnnnnnnnnnnnnnnnnnnnnnnnnnnnnnnnnnnnnnnnnnnnnnnnnnnnnnnnnnnnnnnnnnnnnnnnnnnnnnnnnnnnnnnnnnnnnnnnnnnnnnnnnnnnnnnnnnnnnnnnnnnnnnnnnnnnnnnnnnnnnnnnnnnnnnnnnnnnnnnnnnnnnnnnnnnnnnnnnnnnnnnnnnnnnnnnnnnnnnnnnnnnnnnnnnnnnnnnnnnnnnnnnnnnnnnnnnnnnnnnnnnnnnnnnnnnnnnnnnnnnnnnnnnnnnnnnnnnnnnnnnnnnnnnnnnnnnnnnnnnnnnnnnnnnnnnnnnnnnnnnnnnnnnnnnnnnnnnnnnnnnnnnnnnnnnnnnnnnnnnnnnnnnnnnnnnnnnnnnnnnnnnnnnnnnnnnnnnnnnnnnnnnnnnnnnnnnnnnnnnnnnnnnnnnnnnnnnnnnnnnnnnnnnnnnnnnnnnnnnnnnnnnnnnnnnnnnnnnnnnnnnnnnnnnnnnnnnnnnnnnnnnnnnnnnnnnnnnnnnnnnnnnnnnnnnnnnnnnnnnnnnnnnnnnnnnnnnnnnnnnnnnnnnnnnnnnnnnnnnnnnnnnnnnnnnnnnnnnnnnnnnnnnnnnnnnnnnnnnnnnnnnnnnnnnnnnnnnnnnnnnnnnnnnnnnnnnnnnnnnnnnnnnnnnnnnnnnnnnnnnnnnnnnnnnnnnnnnnnnnnnnnnnnnnnnnnnnnnnnnnnnnnnnnnnnnnnnnnnnnnnnnnnnnnnnnnnnnnnnnnnnnnnnnnnnnnnnnnnnnnnnnnnnnnnnnnnnnnnnnnnnnnnnnnnnnnnnnnnnnnnnnnnnnnnnnnnnnnnnnnnnnnnnnnnnnnnnnnnnnnnnnnnnnnnnnnnnnnnnnnnnnnnnnnnnnnnnnnnnnnnnnnnnnnnnnnnnnnnnnnnnnnnnnnnnnnnnnnnnnnnnnnnnnnnnnnnnnnnnnnnnnnnnnnnnnnnnnnnnnnnnnnnnnnnnnnnnnnnnnnnnnnnnnnnnnnnnnnnnnnnnnnnnnnnnnnnnnnnnnnnnnnnnnnnnnnnnnnnnnnnnnnnnnnnnnnnnnnnnnnnnnnnnnnnnnnnnnnnnnnnnnnnnnnnnnnnnnnnnnnnnnnnnnnnnnnnnnnnnnnnnnnnnnnnnnnnnnnnnnnnnnnnnnnnnnnnnnnnnnnnnnnnnnnnnnnnnnnnnnnnnnnnnnnnnnnnnnnnnnnnnnnnnnnnnnnnnnnnnnnnnnnnnnnnnnnnnnnnnnnnnnnnnnnnnnnnnnnnnnnnnnnnnnnnnnnnnnnnnnnnnnnnnnnnnnnnnnnnnnnnnnnnnnnnnnnnnnnnnnnnnnnnnnnnnnnnnnnnnnnnnnnnnnnnnnnnnnnnnnnnnnnnnnnnnnnnnnnnnnnnnnnnnnnnnnnnnnnnnnnnnnnnnnnnnnnnnnnnnnnnnnnnnnnnnnnnnnnnnnnnnnnnnnnnnnnnnnnnnnnnnnnnnnnnnnnnnnnnnnnnnnnnnnnnnnnnnnnnnnnnnnnnnnnnnnnnnnnnnnnnnnnnnnnnnnnnnnnnnnnnnnnnnnnnnnnnnnnnnnnnnnnnnnnnnnnnnnnnnnnnnnnnnnnnnnnnnnnnnnnnnnnnnnnnnnnnnnnnnnnnnnnnnnnnnnnnnnnnnnnnnnnnnnnnnnnnnnnnnnnnnnnnnnnnnnnnnnnnnnnnnnnnnnnnnnnnnnnnnnnnnnnnnnnnnnnnnnnnnnnnnnnnnnnnnnnnnnnnnnnnnnnnnnnnnnnnnnnnnnnnnnnnnnnnnnnnnnnnnnnnnnnnnnnnnnnnnnnnnnnnnnnnnnnnnnnnnnnnnnnnnnnnnnnnnnnnnnnnnnnnnnnnnnnnnnnnnnnnnnnnnnnnnnnnnnnnnnnnnnnnnnnnnnnnnnnnnnnnnnnnnnnnnnnnnnnnnnnnnnnnnnnnnnnnnnnnnnnnnnnnnnnnnnnnnnnnnnnnnnnnnnnnnnnnnnnnnnnnnnnnnnnnnnnnnnnnnnnnnnnnnnnnnnnnnnnnnnnnnnnnnnnnnnnnnnnnnnnnnnnnnnnnnnnnnnnnnnnnnnnnnnnnnnnnnnnnnnnnnnnnnnnnnnnnnnnnnnnnnnnnnnnnnnnnnnnnnnnnnnnnnnnnnnnnnnnnnnnnnnnnnnnnnnnnnnnnnnnnnnnnnnnnnnnnnnnnnnnnnnnnnnnnnnnnnnnnnnnnnnnnnnnnnnnnnnnnnnnnnnnnnnnnnnnnnnnnnnnnnnnnnnnnnnnnnnnnnnnnnnnnnnnnnnnnnnnnnnnnnnnnnnnnnnnnnnnnnnnnnnnnnnnnnnnnnnnnnnnnnnnnnnnnnnnnnnnnnnnnnnnnnnnnnnnnnnnnnnnnnnnnnnnnnnnnnnnnnnnnnnnnnnnnnnnnnnnnnnnnnnnnnnnnnnnnnnnnnnnnnnnnnnnnnnnnnnnnnnnnnnnnnnnnnnnnnnnnnnnnnnnnnnnnnnnnnnnnnnnnnnnnnnnnnnnnnnnnnnnnnnnnnnnnnnnnnnnnnnnnnnnnnnnnnnnnnnnnnnnnnnnnnnnnnnnnnnnnnnnnnnnnnnnnnnnnnnnnnnnnnnnnnnnnnnnnnnnnnnnnnnnnnnnnnnnnnnnnnnnnnnnnnnnnnnnnnnnnnnnnnnnnnnnnnnnnnnnnnnnnnnnnnnnnnnnnnnnnnnnnnnnnnnnnnnnnnnnnnnnnnnnnnnnnnnnnnnnnnnnnnnnnnnnnnnnnnnnnnnnnnnnnnnnnnnnnnnnnnnnnnnnnnnnnnnnnnnnnnnnnnnnnnnnnnnnnnnnnnnnnnnnnnnnnnnnnnnnnnnnnnnnnnnnnnnnnnnnnnnnnnnnnnnnnnnnnnnnnnnnnnnnnnnnnnnnnnnnnnnnnnnnnnnnnnnnnnnnnnnnnnnnnnnnnnnnnnnnnnnnnnnnnnnnnnnnnnnnnnnnnnnnnnnnnnnnnnnnnnnnnnnnnnnnnnnnnnnnnnnnnnnnnnnnnnnnnnnnnnnnnnnnnnnnnnnnnnnnnnnnnnnnnnnnnnnnnnnnnnnnnnnnnnnnnnnnnnnnnnnnnnnnnnnnnnnnnnnnnnnnnnnnnnnnnnnnnnnnnnnnnnnnnnnnnnnnnnnnnnnnnnnnnnnnnnnnnnnnnnnnnnnnnnnnnnnnnnnnnnnnnnnnnnnnnnnnnnnnnnnnnnnnnnnnnnnnnnnnnnnnnnnnnnnnnnnnnnnnnnnnnnnnnnnnnnnnnnnnnnnnnnnnnnnnnnnnnnnnnnnnnnnnnnnnnnnnnnnnnnnnnnnnnnnnnnnnnnnnnnnnnnnnnnnnnnnnnnnnnnnnnnnnnnnnnnnnnnnnnnnnnnnnnnnnnnnnnnnnnnnnnnnnnnnnnnnnnnnnnnnnnnnnnnnnnnnnnnnnnnnnnnnnnnnnnnnnnnnnnnnnnnnnnnnnnnnnnnnnnnnnnnnnnnnnnnnnnnnnnnnnnnnnnnnnnnnnnnnnnnnnnnnnnnnnnnnnnnnnnnnnnnnnnnnnnnnnnnnnnnnnnnnnnnnnnnnnnnnnnnnnnnnnnnnnnnnnnnnnnnnnnnnnnnnnnnnnnnnnnnnnnnnnnnnnnnnnnnnnnnnnnnnnnnnnnnnnnnnnnnnnnnnnnnnnnnnnnnnnnnnnnnnnnnnnnnnnnnnnnnnnnnnnnnnnnnnnnnnnnnnnnnnnnnnnnnnnnnnnnnnnnnnnnnnnnnnnnnnnnnnnnnnnnnnnnnnnnnnnnnnnnnnnnnnnnnnnnnnnnnnnnnnnnnnnnnnnnnnnnnnnnnnnnnnnnnnnnnnnnnnnnnnnnnnnnnnnnnnnnnnnnnnnnnnnnnnnnnnnnnnnnnnnnnnnnnnnnnnnnnnnnnnnnnnnnnnnnnnnnnnnnnnnnnnnnnnnnnnnnnnnnnnnnnnnnnnnnnnnnnnnnnnnnnnnnnnnnnnnnnnnnnnnnnnnnnnnnnnnnnnnnnnnnnnnnnnnnnnnnnnnnnnnnnnnnnnnnnnnnnnnnnnnnnnnnnnnnnnnnnnnnnnnnnnnnnnnnnnnnnnnnnnnnnnnnnnnnnnnnnnnnnnnnnnnnnnnnnnnnnnnnnnnnnnnnnnnnnnnnnnnnnnnnnnnnnnnnnnnnnnnnnnnnnnnnnnnnnnnnnnnnnnnnnnnnnnnnnnnnnnnnnnnnnnnnnnnnnnnnnnnnnnnnnnnnnnnnnnnnnnnnnnnnnnnnnnnnnnnnnnnnnnnnnnnnnnnnnnnnnnnnnnnnnnnnnnnnnnnnnnnnnnnnnnnnnnnnnnnnnnnnnnnnnnnnnnnnnnnnnnnnnnnnnnnnnnnnnnnnnnnnnnnnnnnnnnnnnnnnnnnnnnnnnnnnnnnnnnnnnnnnnnnnnnnnnnnnnnnnnnnnnnnnnnnnnnnnnnnnnnnnnnnnnnnnnnnnnnnnnnnnnnnnnnnnnnnnnnnnnnnnnnnnnnnnnnnnnnnnnnnnnnnnnnnnnnnnnnnnnnnnnnnnnnnnnnnnnnnnnnnnnnnnnnnnnnnnnnnnnnnnnnnnnnnnnnnnnnnnnnnnnnnnnnnnnnnnnnnnnnnnnnnnnnnnnnnnnnnnnnnnnnnnnnnnnnnnnnnnnnnnnnnnnnnnnnnnnnnnnnnnnnnnnnnnnnnnnnnnnnnnnnnnnnnnnnnnnnnnnnnnnnnnnnnnnnnnnnnnnnnnnnnnnnnnnnnnnnnnnnnnnnnnnnnnnnnnnnnnnnnnnnnnnnnnnnnnnnnnnnnnnnnnnnnnnnnnnnnnnnnnnnnnnnnnnnnnnnnnnnnnnnnnnnnnnnnnnnnnnnnnnnnnnnnnnnnnnnnnnnnnnnnnnnnnnnnnnnnnnnnnnnnnnnnnnnnnnnnnnnnnnnnnnnnnnnnnnnnnnnnnnnnnnnnnnnnnnnnnnnnnnnnnnnnnnnnnnnnnnnnnnnnnnnnnnnnnnnnnnnnnnnnnnnnnnnnnnnnnnnnnnnnnnnnnnnnnnnnnnnnnnnnnnnnnnnnnnnnnnnnnnnnnnnnnnnnnnnnnnnnnnnnnnnnnnnnnnnnnnnnnnnnnnnnnnnnnnnnnnnnnnnnnnnnnnnnnnnnnnnnnnnnnnnnnnnnnnnnnnnnnncaaagaatttccggcgctcccgaggcggcaaggccttcacgtactccaatacttcattcgcgcccatcatcgaaaaatatcacgcacggggcgcgcagcgcaagttcggcgggctgccgcagggcgagcacagctctacgattcaccgtctcgccaaaacgcagagttgcactctgcgccagccagccttttttcttcgcggcacaaaggggcgctacagttctgctcccggacttgcctttcatccctcccaggtgtataccttcgtcatgtttatcctgtggtagccacctggcgggcggccgggtcgcgatcacccaacggccccaccacccgcctcttgccccgtgaaggaggaagcagtgaagtataacctgctcgaagaaaagtggattcccgttctatacaaggacgggatcagcacacgtgtgaatgtcattgaggcgtttacggaagccggccgcatccgcgaaatcgcggccagcaaccctatggaccgcttggccatcctgcgtttcctgctcgcgcttctctattggtgcaaggggaatcctccagacgaaaccgacttgatctcttcgtttccctcggattggttcaagaggctcgatgacaataaggactgtttcaacctgctgggcgatgggaggcgtttttaccaacagaagcctaagcgtcttgagaagaaactctcggccgactatctcatgcaggaggtgcccaccggcacaaacttctggcacttccggcatgggacagatttgagagacggcttatgtccggcgtgctgtgcaatgggcctgttgcgcctgccgctctttgctacctcggccgggcgcggcaagcccccgggcgtcaatcaaaaaccgccgacctacatcgtgccgatgggcgactcgctttccgaaaccctgcgtctctcgtggcggaaaagaccggagccgaacctgggcacgcccacatgggaaaagccggacataaccctccctcaacacggcaatgttcccctattaacgggattaacgtgggtgccgcgccgcgtgtggttggacgctcccgaggaaccccagtccaactgcatcgcctgcgggcgcagagaggctctgatccgtcgatgtgtctttgcgggtatcggcagcacaagaacagacgaagggagtccggcacgagtgtggaacgacccgcacaccatcagggaaggcgacgagattgtgaagcctttcagcgcgcttggcccggccgatgctgcggctgggaagtggacgaaagtcgtggctggaatcctgtgcggggaaaagccgaaggaaaaacaaaggttgtgggtcgtcagctttgcgacagtgcagaatgacaaatacctggaagcaaccgagtgggagattccgttcctgaccgcgcttgacgacatgaaggttcaggagagtatagaaagcatcggggcgtggcagagggaaggctggaagctccctggcaaaaccaaaccgcgagagatttcccaaacaaggggacaccttgaaattctctccgccgtcgccgcggttcgtccccaagccgaaagaacggtttccggaagaattgaccaattgatcgcccaaggcggcgacgcatggcaagaagccgcccaggagtatcgtccgctgatggccgcagtcgccaaatcgctttcacccggttacacaagcgcgtctctccgaagtcggcaagaaattgccgcagtaaagccggacatgcggccgaagaaaaaccacaaaaacgaagggagggacaagtgactgcaacggagcagtacgtcgaagttctgagtcggctgaaacccggtgagctcgggctcttgcgcaaccatgccggacaagggctcgacgaatcggtggagggctttgaccttttcgcaggactctggtggccactgcgggcgcaaacccagcgggcgcctcgccgtgaggtggcgtggcttgtcgccaaactctacgccttccggcccctcgagcattcacccggggagacgctcgctcgccaactcgcgcgctcccggcccggcgacaaaacagagcgaaagcgtttcgagcaacgcttcgataggatgctgacgctgccgcttgctgaaatcgaacccgccctacaatgggcaatcgacctcatcgctgccaagcaccccaaactcgactgggtacggctgacgaacgatctttccatctgggaacgcgaatccacccggctcaaatgggccacggaattcttgagctgttcaataggaggagaatcatgttgatccagattcacgccattcaaaatcacagcccggccaacctgaaccgggatgacctgggcgcgcccaagacttgcttttttggcggagtcttgcgctcccgtatttccagccagtgtctcaagcgcagcatccgcatgagtgaggagttcagccaattgcgcggcggagtgcgcacccgccagttagcgaaagagattgccgaaaaggtgacgggcaaagacgtcaggaagcgcgccgagaacattctcaaggcctgcggcctggagcctaaaaaggcaaaaaagcaggaaggagagggtgaacaagaaagtgccgagaggagcaagatgttggtttacaccacgcaaggggcgattgtacggatggccgaactcctccagaaggaagacggaaaaacggacgaggccttagcagcggagttcgggaagctgatcagtgaatccgtcgccgtgccggacatggccctgtgcggcaggatgcttgaaacgggagtactcgaaaacaccactgtcgaggcatcgcttcaggtggcccatgcgatttccacccatgaggcccgcccggaggtggactactatgtggccgctgatgatgtccccggcgaggacgcgggcgcagcttacgtggatgaagccatgtttggctcagcatgtttttacaagtatttctccattcattgggaaacgctggtcaggaacctcgagcccttcggcgcggatcacgaaaagttggcggcccataccgtcggcgagttcattcgcgcagcggcgttggtcaaccccacgggaaaacaaaacagttttgccgcgcacaatcctcctgacggaatgttggtggaagtcagaaacactccaatcagctacgccaacgccttcgccaaaccggcggctcctcagggcgaacgggacatcatctcgcagagcgtggcggagcttgcccattatgtgaacgacatggatacgggatacggcaagcccacgaagcggttctggttctctcccaatctccgctatccgttgacggctaccaccacggaaagcgaaaacggaaaacagaaacagcgtgaggtcccgcttgccgacaaagatgtcaagtctcttgacgaactgatagcggccgtactcaaccaaatcggccacgactggcaggaggtcgagaaagtggtcctgaatccggaggtgccccgtgagcccaaacacgctgttcattcggcttgaagggcctcttcaggcttggggcgatcagcaatcgaagtttgtcatccggcggacggctgaggccccgaccaaatcgggcgtaatcggcatgctgtgcgcggccttgggcgcctcccggtcagaggccgctgaggagtggcttccaaggctaagccggctgctcatgggcgtacgcatcgacgcgcccggagtccgctggtgggattatcacaccgtgggcgccggcatgccgatgcgcactgccgagggtggaagcaagcccggggccatgctcacccgccgcgagtacctttgcgatgcgtcgttcttggttgcactccagggtgaaccgggcctgatcgctgaaattgacgccgcggtcaagtcgccccgatggactctgtacctcggcagaaagtgctgcccgccctcgcgccctttgctggagcatccgccaggggaattttccgatttgctctccgccctcgaatcggtaccttggcgcaaacggctggagggagacccacagccccaaacgctggaatgtctgctcgactggcacccaaccgcagaccagccggacgctcccgatgattcgctcgtttggtacgacgtgcctcggagtctcgacccgccctcgcacgaagctcgattcgtcattcgcaagcaattacgcgtcggggctgaaggcggcgtgaccgttgcacctctgcccgcacagagcgccacgccggcgcctccccgcccaagggcggattacaccaataccgagtacaaaaaccggcgcaaagagcggctcgacgatgaccatcacttatgcgttttttgcaagtctcccgccaccaccgtgcagcacatcacctaccgtcgcgcgggtggcggcgagttgaaggacgatttgcgctccctctgccgcctctgccacgacgccgtgaccatgcttgaatacggcctgggcatgggactcgaccgcatcaatcccgaggacccgcaatggcgtgaccggattatcgacaagcgggacgagatcgtcaggttccgctcggaggaaacccgcaggcgattgctcgccgaggaggtggaataggatgtacatttcctgtctcctaatcaacgtcggtgacaaccccgaccgtccccgccccgggcggctctggctgcgcaacctttatcacgttcatcagcgcctctgcatggcctttccctcccatccccaaaaagatccccacttcctcgcgcccttcaagcccgcggactttgacgggaagcaagtccatgtggagcgcggtgcggattccggctttctctttcgcatcgacccgcaactgggcggccgggccatgattgtggtgcagtccgccaccaaacccgattgggactatgcctttcaaaatgcgggccatcttctggtgaattccttcgccgctccccctcaggtaaaagaactcgatccctgtttcagcgccggtcagcagcttcgctttcgaatccgcgtcaacctgagcaaaaagataaagaccagcacagcgggcatcgatcttaccaggccgcgagtggggacggatccccagggccgaccgaaggcccaaagcaaacgcgtggcgctcacctgggataaggaccaggacccgcaggacgccatacgggagtggttcgctaaaaaggcccagaacggcggcttcaagctgggagccttgcgcgctctgcacatcggctggggcgctggaaatgacccggactccacgcctgccgtccaggacagccgctcgggggacaggcgcatgaaattccgctccgccttgctcgaaggaacgctcacggttgaggaccctgctaaatttcgtgaagccgtcgttcacggcatcgggcccggcaaggccttcggtttcggcctgctttcagtagcccccgaagcccgctcagcgggcggcgacgtgtagcccacggcgcaagccagacccgtggtggtgacatgcgaactcaagatctgcatattctaccgaagttcagcgacggatggagttacctgtacgtcgagcgctgcaaggtggatcaggaagaccgggcccttgccctgcacaatgaagcggggaagacgcccgtgccttgcgcaaatctggccttgctcatgctgggaccgggcgtctccatcactcacgccgccatttccgtgctggcggaccatgggtgcctagtggcgtggtgcggagaagagggggtccgcttctacgccacgggcatgggcgagacgcgcaacgccgccaattttctccatcaggcgcgcctgtgggcgcacgagggttttcgcatgcaggtggtgcgccgcctctatcagttgcgttttgccgagaagttcgaccccgccttgaccctgcaacagatacgtggcatggagggcgtacgggttcgagacgcctacgcgaaggccgccaaggaggccggcatcgcctgggaaggccgaaactatcagcgccaggagtggagccaggcggaccccgctaaccgggccttgtccgccgccaattcctgcctttacggtatctgccatgcggccgtcgtctcggctgggttttcccccgccctcgggtttatccatacgggcaagatgctctcctttgtgtacgatgtggccgacttgtacaaaactgaaatcaccgttccgatggcctttcgcgccgccgccgaagcgcaagatcaactcgagcggcgggtgcgcatcacctgccgcgacaggtttgtatccacacggcttttggaaaggatcatcccggacatcctgtctgccctgatgctgtcaaaagcggcggcgtccgactctgaatttgaccttgatgccgctgcccccggctccctctgggacgatttgcagggcgccgtggaaggcggccacttgcacgccgtagaagaggaagaaacggagcccaaccatggtggttctgattcttgagcgcgtcccgccagcattgcgaggcgagctcactcggtggtttctcgaacctcaggcaggggtgtttgtgggacgcgtctccgctctggttcgcgatcggttatgggaaaaggcttgcgcccaagccaaaggaggcggatgcctgattctccactcaagcgataatgagcagggattccgtgtccgaacatggggcagaacagcgcgctgcatcgatgacttcgagggcctttttctcgtgcgtatgccgcagaatcaatagcttgggaagtgttgtccccacgcgcgtgggggtgaaccgtaaagatgattaagctggtgcggggtcatcccgttgtccccacgcgcgtgggggtgaaccggctttcagataaaggtgggaagcgccgtaccagttgtccccacgcgcgtgggggtgaaccgtagcagataatcccaaacccgccaggagtggcgttgtccccacgcgcgtgggggtgaaccgctgagtgcaacgcgtcggtgttttcatcgatcgttgtccccacgcgcgtgggggtgaaccgaatcggcgcgggcgatcaatttgtgtcgggcagttgtccccacgcgcgtgggggtgaaccgcaccccgataccggcaaaagccccttgagcgtgttgtccccacgcgcgtgggggtgaaccgcagacgagatgtgacttggtgcgtatcatggagttgtccccacgcgcgtgggggtgaaccgtcagcgtgtagctcgtcgcattcgagctgtgcgttgtccccacgcgcgtgggggtgaaccgcaattcctcatctcaggcaacgctcctcagtagttgtccccacgcgcgtgggg

SEQ ID NO: 1111 - DNA, 103260 bp, Artificial Sequence
  Synthetic Oligonucleotide
  misc_feature (1)..(96028): n is a, c, g, or t
nnnnnnnnnnnnnnnnnnnnnnnnnnnnnnnnnnnnnnnnnnnnnnnnnnnnnnnnnnnnnnnnnnnnnnnnnnnnnnnnnnnnnnnnnnnnnnnnnnnnnnnnnnnnnnnnnnnnnnnnnnnnnnnnnnnnnnnnnnnnnnnnnnnnnnnnnnnnnnnnnnnnnnnnnnnnnnnnnnnnnnnnnnnnnnnnnnnnnnnnnnnnnnnnnnnnnnnnnnnnnnnnnnnnnnnnnnnnnnnnnnnnnnnnnnnnnnnnnnnnnnnnnnnnnnnnnnnnnnnnnnnnnnnnnnnnnnnnnnnnnnnnnnnnnnnnnnnnnnnnnnnnnnnnnnnnnnnnnnnnnnnnnnnnnnnnnnnnnnnnnnnnnnnnnnnnnnnnnnnnnnnnnnnnnnnnnnnnnnnnnnnnnnnnnnnnnnnnnnnnnnnnnnnnnnnnnnnnnnnnnnnnnnnnnnnnnnnnnnnnnnnnnnnnnnnnnnnnnnnnnnnnnnnnnnnnnnnnnnnnnnnnnnnnnnnnnnnnnnnnnnnnnnnnnnnnnnnnnnnnnnnnnnnnnnnnnnnnnnnnnnnnnnnnnnnnnnnnnnnnnnnnnnnnnnnnnnnnnnnnnnnnnnnnnnnnnnnnnnnnnnnnnnnnnnnnnnnnnnnnnnnnnnnnnnnnnnnnnnnnnnnnnnnnnnnnnnnnnnnnnnnnnnnnnnnnnnnnnnnnnnnnnnnnnnnnnnnnnnnnnnnnnnnnnnnnnnnnnnnnnnnnnnnnnnnnnnnnnnnnnnnnnnnnnnnnnnnnnnnnnnnnnnnnnnnnnnnnnnnnnnnnnnnnnnnnnnnnnnnnnnnnnnnnnnnnnnnnnnnnnnnnnnnnnnnnnnnnnnnnnnnnnnnnnnnnnnnnnnnnnnnnnnnnnnnnnnnnnnnnnnnnnnnnnnnnnnnnnnnnnnnnnnnnnnnnnnnnnnnnnnnnnnnnnnnnnnnnnnnnnnnnnnnnnnnnnnnnnnnnnnnnnnnnnnnnnnnnnnnnnnnnnnnnnnnnnnnnnnnnnnnnnnnnnnnnnnnnnnnnnnnnnnnnnnnnnnnnnnnnnnnnnnnnnnnnnnnnnnnnnnnnnnnnnnnnnnnnnnnnnnnnnnnnnnnnnnnnnnnnnnnnnnnnnnnnnnnnnnnnnnnnnnnnnnnnnnnnnnnnnnnnnnnnnnnnnnnnnnnnnnnnnnnnnnnnnnnnnnnnnnnnnnnnnnnnnnnnnnnnnnnnnnnnnnnnnnnnnnnnnnnnnnnnnnnnnnnnnnnnnnnnnnnnnnnnnnnnnnnnnnnnnnnnnnnnnnnnnnnnnnnnnnnnnnnnnnnnnnnnnnnnnnnnnnnnnnnnnnnnnnnnnnnnnnnnnnnnnnnnnnnnnnnnnnnnnnnnnnnnnnnnnnnnnnnnnnnnnnnnnnnnnnnnnnnnnnnnnnnnnnnnnnnnnnnnnnnnnnnnnnnnnnnnnnnnnnnnnnnnnnnnnnnnnnnnnnnnnnnnnnnnnnnnnnnnnnnnnnnnnnnnnnnnnnnnnnnnnnnnnnnnnnnnnnnnnnnnnnnnnnnnnnnnnnnnnnnnnnnnnnnnnnnnnnnnnnnnnnnnnnnnnnnnnnnnnnnnnnnnnnnnnnnnnnnnnnnnnnnnnnnnnnnnnnnnnnnnnnnnnnnnnnnnnnnnnnnnnnnnnnnnnnnnnnnnnnnnnnnnnnnnnnnnnnnnnnnnnnnnnnnnnnnnnnnnnnnnnnnnnnnnnnnnnnnnnnnnnnnnnnnnnnnnnnnnnnnnnnnnnnnnnnnnnnnnnnnnnnnnnnnnnnnnnnnnnnnnnnnnnnnnnnnnnnnnnnnnnnnnnnnnnnnnnnnnnnnnnnnnnnnnnnnnnnnnnnnnnnnnnnnnnnnnnnnnnnnnnnnnnnnnnnnnnnnnnnnnnnnnnnnnnnnnnnnnnnnnnnnnnnnnnnnnnnnnnnnnnnnnnnnnnnnnnnnnnnnnnnnnnnnnnnnnnnnnnnnnnnnnnnnnnnnnnnnnnnnnnnnnnnnnnnnnnnnnnnnnnnnnnnnnnnnnnnnnnnnnnnnnnnnnnnnnnnnnnnnnnnnnnnnnnnnnnnnnnnnnnnnnnnnnnnnnnnnnnnnnnnnnnnnnnnnnnnnnnnnnnnnnnnnnnnnnnnnnnnnnnnnnnnnnnnnnnnnnnnnnnnnnnnnnnnnnnnnnnnnnnnnnnnnnnnnnnnnnnnnnnnnnnnnnnnnnnnnnnnnnnnnnnnnnnnnnnnnnnnnnnnnnnnnnnnnnnnnnnnnnnnnnnnnnnnnnnnnnnnnnnnnnnnnnnnnnnnnnnnnnnnnnnnnnnnnnnnnnnnnnnnnnnnnnnnnnnnnnnnnnnnnnnnnnnnnnnnnnnnnnnnnnnnnnnnnnnnnnnnnnnnnnnnnnnnnnnnnnnnnnnnnnnnnnnnnnnnnnnnnnnnnnnnnnnnnnnnnnnnnnnnnnnnnnnnnnnnnnnnnnnnnnnnnnnnnnnnnnnnnnnnnnnnnnnnnnnnnnnnnnnnnnnnnnnnnnnnnnnnnnnnnnnnnnnnnnnnnnnnnnnnnnnnnnnnnnnnnnnnnnnnnnnnnnnnnnnnnnnnnnnnnnnnnnnnnnnnnnnnnnnnnnnnnnnnnnnnnnnnnnnnnnnnnnnnnnnnnnnnnnnnnnnnnnnnnnnnnnnnnnnnnnnnnnnnnnnnnnnnnnnnnnnnnnnnnnnnnnnnnnnnnnnnnnnnnnnnnnnnnnnnnnnnnnnnnnnnnnnnnnnnnnnnnnnnnnnnnnnnnnnnnnnnnnnnnnnnnnnnnnnnnnnnnnnnnnnnnnnnnnnnnnnnnnnnnnnnnnnnnnnnnnnnnnnnnnnnnnnnnnnnnnnnnnnnnnnnnnnnnnnnnnnnnnnnnnnnnnnnnnnnnnnnnnnnnnnnnnnnnnnnnnnnnnnnnnnnnnnnnnnnnnnnnnnnnnnnnnnnnnnnnnnnnnnnnnnnnnnnnnnnnnnnnnnnnnnnnnnnnnnnnnnnnnnnnnnnnnnnnnnnnnnnnnnnnnnnnnnnnnnnnnnnnnnnnnnnnnnnnnnnnnnnnnnnnnnnnnnnnnnnnnnnnnnnnnnnnnnnnnnnnnnnnnnnnnnnnnnnnnnnnnnnnnnnnnnnnnnnnnnnnnnnnnnnnnnnnnnnnnnnnnnnnnnnnnnnnnnnnnnnnnnnnnnnnnnnnnnnnnnnnnnnnnnnnnnnnnnnnnnnnnnnnnnnnnnnnnnnnnnnnnnnnnnnnnnnnnnnnnnnnnnnnnnnnnnnnnnnnnnnnnnnnnnnnnnnnnnnnnnnnnnnnnnnnnnnnnnnnnnnnnnnnnnnnnnnnnnnnnnnnnnnnnnnnnnnnnnnnnnnnnnnnnnnnnnnnnnnnnnnnnnnnnnnnnnnnnnnnnnnnnnnnnnnnnnnnnnnnnnnnnnnnnnnnnnnnnnnnnnnnnnnnnnnnnnnnnnnnnnnnnnnnnnnnnnnnnnnnnnnnnnnnnnnnnnnnnnnnnnnnnnnnnnnnnnnnnnnnnnnnnnnnnnnnnnnnnnnnnnnnnnnnnnnnnnnnnnnnnnnnnnnnnnnnnnnnnnnnnnnnnnnnnnnnnnnnnnnnnnnnnnnnnnnnnnnnnnnnnnnnnnnnnnnnnnnnnnnnnnnnnnnnnnnnnnnnnnnnnnnnnnnnnnnnnnnnnnnnnnnnnnnnnnnnnnnnnnnnnnnnnnnnnnnnnnnnnnnnnnnnnnnnnnnnnnnnnnnnnnnnnnnnnnnnnnnnnnnnnnnnnnnnnnnnnnnnnnnnnnnnnnnnnnnnnnnnnnnnnnnnnnnnnnnnnnnnnnnnnnnnnnnnnnnnnnnnnnnnnnnnnnnnnnnnnnnnnnnnnnnnnnnnnnnnnnnnnnnnnnnnnnnnnnnnnnnnnnnnnnnnnnnnnnnnnnnnnnnnnnnnnnnnnnnnnnnnnnnnnnnnnnnnnnnnnnnnnnnnnnnnnnnnnnnnnnnnnnnnnnnnnnnnnnnnnnnnnnnnnnnnnnnnnnnnnnnnnnnnnnnnnnnnnnnnnnnnnnnnnnnnnnnnnnnnnnnnnnnnnnnnnnnnnnnnnnnnnnnnnnnnnnnnnnnnnnnnnnnnnnnnnnnnnnnnnnnnnnnnnnnnnnnnnnnnnnnnnnnnnnnnnnnnnnnnnnnnnnnnnnnnnnnnnnnnnnnnnnnnnnnnnnnnnnnnnnnnnnnnnnnnnnnnnnnnnnnnnnnnnnnnnnnnnnnnnnnnnnnnnnnnnnnnnnnnnnnnnnnnnnnnnnnnnnnnnnnnnnnnnnnnnnnnnnnnnnnnnnnnnnnnnnnnnnnnnnnnnnnnnnnnnnnnnnnnnnnnnnnnnnnnnnnnnnnnnnnnnnnnnnnnnnnnnnnnnnnnnnnnnnnnnnnnnnnnnnnnnnnnnnnnnnnnnnnnnnnnnnnnnnnnnnnnnnnnnnnnnnnnnnnnnnnnnnnnnnnnnnnnnnnnnnnnnnnnnnnnnnnnnnnnnnnnnnnnnnnnnnnnnnnnnnnnnnnnnnnnnnnnnnnnnnnnnnnnnnnnnnnnnnnnnnnnnnnnnnnnnnnnnnnnnnnnnnnnnnnnnnnnnnnnnnnnnnnnnnnnnnnnnnnnnnnnnnnnnnnnnnnnnnnnnnnnnnnnnnnnnnnnnnnnnnnnnnnnnnnnnnnnnnnnnnnnnnnnnnnnnnnnnnnnnnnnnnnnnnnnnnnnnnnnnnnnnnnnnnnnnnnnnnnnnnnnnnnnnnnnnnnnnnnnnnnnnnnnnnnnnnnnnnnnnnnnnnnnnnnnnnnnnnnnnnnnnnnnnnnnnnnnnnnnnnnnnnnnnnnnnnnnnnnnnnnnnnnnnnnnnnnnnnnnnnnnnnnnnnnnnnnnnnnnnnnnnnnnnnnnnnnnnnnnnnnnnnnnnnnnnnnnnnnnnnnnnnnnnnnnnnnnnnnnnnnnnnnnnnnnnnnnnnnnnnnnnnnnnnnnnnnnnnnnnnnnnnnnnnnnnnnnnnnnnnnnnnnnnnnnnnnnnnnnnnnnnnnnnnnnnnnnnnnnnnnnnnnnnnnnnnnnnnnnnnnnnnnnnnnnnnnnnnnnnnnnnnnnnnnnnnnnnnnnnnnnnnnnnnnnnnnnnnnnnnnnnnnnnnnnnnnnnnnnnnnnnnnnnnnnnnnnnnnnnnnnnnnnnnnnnnnnnnnnnnnnnnnnnnnnnnnnnnnnnnnnnnnnnnnnnnnnnnnnnnnnnnnnnnnnnnnnnnnnnnnnnnnnnnnnnnnnnnnnnnnnnnnnnnnnnnnnnnnnnnnnnnnnnnnnnnnnnnnnnnnnnnnnnnnnnnnnnnnnnnnnnnnnnnnnnnnnnnnnnnnnnnnnnnnnnnnnnnnnnnnnnnnnnnnnnnnnnnnnnnnnnnnnnnnnnnnnnnnnnnnnnnnnnnnnnnnnnnnnnnnnnnnnnnnnnnnnnnnnnnnnnnnnnnnnnnnnnnnnnnnnnnnnnnnnnnnnnnnnnnnnnnnnnnnnnnnnnnnnnnnnnnnnnnnnnnnnnnnnnnnnnnnnnnnnnnnnnnnnnnnnnnnnnnnnnnnnnnnnnnnnnnnnnnnnnnnnnnnnnnnnnnnnnnnnnnnnnnnnnnnnnnnnnnnnnnnnnnnnnnnnnnnnnnnnnnnnnnnnnnnnnnnnnnnnnnnnnnnnnnnnnnnnnnnnnnnnnnnnnnnnnnnnnnnnnnnnnnnnnnnnnnnnnnnnnnnnnnnnnnnnnnnnnnnnnnnnnnnnnnnnnnnnnnnnnnnnnnnnnnnnnnnnnnnnnnnnnnnnnnnnnnnnnnnnnnnnnnnnnnnnnnnnnnnnnnnnnnnnnnnnnnnnnnnnnnnnnnnnnnnnnnnnnnnnnnnnnnnnnnnnnnnnnnnnnnnnnnnnnnnnnnnnnnnnnnnnnnnnnnnnnnnnnnnnnnnnnnnnnnnnnnnnnnnnnnnnnnnnnnnnnnnnnnnnnnnnnnnnnnnnnnnnnnnnnnnnnnnnnnnnnnnnnnnnnnnnnnnnnnnnnnnnnnnnnnnnnnnnnnnnnnnnnnnnnnnnnnnnnnnnnnnnnnnnnnnnnnnnnnnnnnnnnnnnnnnnnnnnnnnnnnnnnnnnnnnnnnnnnnnnnnnnnnnnnnnnnnnnnnnnnnnnnnnnnnnnnnnnnnnnnnnnnnnnnnnnnnnnnnnnnnnnnnnnnnnnnnnnnnnnnnnnnnnnnnnnnnnnnnnnnnnnnnnnnnnnnnnnnnnnnnnnnnnnnnnnnnnnnnnnnnnnnnnnnnnnnnnnnnnnnnnnnnnnnnnnnnnnnnnnnnnnnnnnnnnnnnnnnnnnnnnnnnnnnnnnnnnnnnnnnnnnnnnnnnnnnnnnnnnnnnnnnnnnnnnnnnnnnnnnnnnnnnnnnnnnnnnnnnnnnnnnnnnnnnnnnnnnnnnnnnnnnnnnnnnnnnnnnnnnnnnnnnnnnnnnnnnnnnnnnnnnnnnnnnnnnnnnnnnnnnnnnnnnnnnnnnnnnnnnnnnnnnnnnnnnnnnnnnnnnnnnnnnnnnnnnnnnnnnnnnnnnnnnnnnnnnnnnnnnnnnnnnnnnnnnnnnnnnnnnnnnnnnnnnnnnnnnnnnnnnnnnnnnnnnnnnnnnnnnnnnnnnnnnnnnnnnnnnnnnnnnnnnnnnnnnnnnnnnnnnnnnnnnnnnnnnnnnnnnnnnnnnnnnnnnnnnnnnnnnnnnnnnnnnnnnnnnnnnnnnnnnnnnnnnnnnnnnnnnnnnnnnnnnnnnnnnnnnnnnnnnnnnnnnnnnnnnnnnnnnnnnnnnnnnnnnnnnnnnnnnnnnnnnnnnnnnnnnnnnnnnnnnnnnnnnnnnnnnnnnnnnnnnnnnnnnnnnnnnnnnnnnnnnnnnnnnnnnnnnnnnnnnnnnnnnnnnnnnnnnnnnnnnnnnnnnnnnnnnnnnnnnnnnnnnnnnnnnnnnnnnnnnnnnnnnnnnnnnnnnnnnnnnnnnnnnnnnnnnnnnnnnnnnnnnnnnnnnnnnnnnnnnnnnnnnnnnnnnnnnnnnnnnnnnnnnnnnnnnnnnnnnnnnnnnnnnnnnnnnnnnnnnnnnnnnnnnnnnnnnnnnnnnnnnnnnnnnnnnnnnnnnnnnnnnnnnnnnnnnnnnnnnnnnnnnnnnnnnnnnnnnnnnnnnnnnnnnnnnnnnnnnnnnnnnnnnnnnnnnnnnnnnnnnnnnnnnnnnnnnnnnnnnnnnnnnnnnnnnnnnnnnnnnnnnnnnnnnnnnnnnnnnnnnnnnnnnnnnnnnnnnnnnnnnnnnnnnnnnnnnnnnnnnnnnnnnnnnnnnnnnnnnnnnnnnnnnnnnnnnnnnnnnnnnnnnnnnnnnnnnnnnnnnnnnnnnnnnnnnnnnnnnnnnnnnnnnnnnnnnnnnnnnnnnnnnnnnnnnnnnnnnnnnnnnnnnnnnnnnnnnnnnnnnnnnnnnnnnnnnnnnnnnnnnnnnnnnnnnnnnnnnnnnnnnnnnnnnnnnnnnnnnnnnnnnnnnnnnnnnnnnnnnnnnnnnnnnnnnnnnnnnnnnnnnnnnnnnnnnnnnnnnnnnnnnnnnnnnnnnnnnnnnnnnnnnnnnnnnnnnnnnnnnnnnnnnnnnnnnnnnnnnnnnnnnnnnnnnnnnnnnnnnnnnnnnnnnnnnnnnnnnnnnnnnnnnnnnnnnnnnnnnnnnnnnnnnnnnnnnnnnnnnnnnnnnnnnnnnnnnnnnnnnnnnnnnnnnnnnnnnnnnnnnnnnnnnnnnnnnnnnnnnnnnnnnnnnnnnnnnnnnnnnnnnnnnnnnnnnnnnnnnnnnnnnnnnnnnnnnnnnnnnnnnnnnnnnnnnnnnnnnnnnnnnnnnnnnnnnnnnnnnnnnnnnnnnnnnnnnnnnnnnnnnnnnnnnnnnnnnnnnnnnnnnnnnnnnnnnnnnnnnnnnnnnnnnnnnnnnnnnnnnnnnnnnnnnnnnnnnnnnnnnnnnnnnnnnnnnnnnnnnnnnnnnnnnnnnnnnnnnnnnnnnnnnnnnnnnnnnnnnnnnnnnnnnnnnnnnnnnnnnnnnnnnnnnnnnnnnnnnnnnnnnnnnnnnnnnnnnnnnnnnnnnnnnnnnnnnnnnnnnnnnnnnnnnnnnnnnnnnnnnnnnnnnnnnnnnnnnnnnnnnnnnnnnnnnnnnnnnnnnnnnnnnnnnnnnnnnnnnnnnnnnnnnnnnnnnnnnnnnnnnnnnnnnnnnnnnnnnnnnnnnnnnnnnnnnnnnnnnnnnnnnnnnnnnnnnnnnnnnnnnnnnnnnnnnnnnnnnnnnnnnnnnnnnnnnnnnnnnnnnnnnnnnnnnnnnnnnnnnnnnnnnnnnnnnnnnnnnnnnnnnnnnnnnnnnnnnnnnnnnnnnnnnnnnnnnnnnnnnnnnnnnnnnnnnnnnnnnnnnnnnnnnnnnnnnnnnnnnnnnnnnnnnnnnnnnnnnnnnnnnnnnnnnnnnnnnnnnnnnnnnnnnnnnnnnnnnnnnnnnnnnnnnnnnnnnnnnnnnnnnnnnnnnnnnnnnnnnnnnnnnnnnnnnnnnnnnnnnnnnnnnnnnnnnnnnnnnnnnnnnnnnnnnnnnnnnnnnnnnnnnnnnnnnnnnnnnnnnnnnnnnnnnnnnnnnnnnnnnnnnnnnnnnnnnnnnnnnnnnnnnnnnnnnnnnnnnnnnnnnnnnnnnnnnnnnnnnnnnnnnnnnnnnnnnnnnnnnnnnnnnnnnnnnnnnnnnnnnnnnnnnnnnnnnnnnnnnnnnnnnnnnnnnnnnnnnnnnnnnnnnnnnnnnnnnnnnnnnnnnnnnnnnnnnnnnnnnnnnnnnnnnnnnnnnnnnnnnnnnnnnnnnnnnnnnnnnnnnnnnnnnnnnnnnnnnnnnnnnnnnnnnnnnnnnnnnnnnnnnnnnnnnnnnnnnnnnnnnnnnnnnnnnnnnnnnnnnnnnnnnnnnnnnnnnnnnnnnnnnnnnnnnnnnnnnnnnnnnnnnnnnnnnnnnnnnnnnnnnnnnnnnnnnnnnnnnnnnnnnnnnnnnnnnnnnnnnnnnnnnnnnnnnnnnnnnnnnnnnnnnnnnnnnnnnnnnnnnnnnnnnnnnnnnnnnnnnnnnnnnnnnnnnnnnnnnnnnnnnnnnnnnnnnnnnnnnnnnnnnnnnnnnnnnnnnnnnnnnnnnnnnnnnnnnnnnnnnnnnnnnnnnnnnnnnnnnnnnnnnnnnnnnnnnnnnnnnnnnnnnnnnnnnnnnnnnnnnnnnnnnnnnnnnnnnnnnnnnnnnnnnnnnnnnnnnnnnnnnnnnnnnnnnnnnnnnnnnnnnnnnnnnnnnnnnnnnnnnnnnnnnnnnnnnnnnnnnnnnnnnnnnnnnnnnnnnnnnnnnnnnnnnnnnnnnnnnnnnnnnnnnnnnnnnnnnnnnnnnnnnnnnnnnnnnnnnnnnnnnnnnnnnnnnnnnnnnnnnnnnnnnnnnnnnnnnnnnnnnnnnnnnnnnnnnnnnnnnnnnnnnnnnnnnnnnnnnnnnnnnnnnnnnnnnnnnnnnnnnnnnnnnnnnnnnnnnnnnnnnnnnnnnnnnnnnnnnnnnnnnnnnnnnnnnnnnnnnnnnnnnnnnnnnnnnnnnnnnnnnnnnnnnnnnnnnnnnnnnnnnnnnnnnnnnnnnnnnnnnnnnnnnnnnnnnnnnnnnnnnnnnnnnnnnnnnnnnnnnnnnnnnnnnnnnnnnnnnnnnnnnnnnnnnnnnnnnnnnnnnnnnnnnnnnnnnnnnnnnnnnnnnnnnnnnnnnnnnnnnnnnnnnnnnnnnnnnnnnnnnnnnnnnnnnnnnnnnnnnnnnnnnnnnnnnnnnnnnnnnnnnnnnnnnnnnnnnnnnnnnnnnnnnnnnnnnnnnnnnnnnnnnnnnnnnnnnnnnnnnnnnnnnnnnnnnnnnnnnnnnnnnnnnnnnnnnnnnnnnnnnnnnnnnnnnnnnnnnnnnnnnnnnnnnnnnnnnnnnnnnnnnnnnnnnnnnnnnnnnnnnnnnnnnnnnnnnnnnnnnnnnnnnnnnnnnnnnnnnnnnnnnnnnnnnnnnnnnnnnnnnnnnnnnnnnnnnnnnnnnnnnnnnnnnnnnnnnnnnnnnnnnnnnnnnnnnnnnnnnnnnnnnnnnnnnnnnnnnnnnnnnnnnnnnnnnnnnnnnnnnnnnnnnnnnnnnnnnnnnnnnnnnnnnnnnnnnnnnnnnnnnnnnnnnnnnnnnnnnnnnnnnnnnnnnnnnnnnnnnnnnnnnnnnnnnnnnnnnnnnnnnnnnnnnnnnnnnnnnnnnnnnnnnnnnnnnnnnnnnnnnnnnnnnnnnnnnnnnnnnnnnnnnnnnnnnnnnnnnnnnnnnnnnnnnnnnnnnnnnnnnnnnnnnnnnnnnnnnnnnnnnnnnnnnnnnnnnnnnnnnnnnnnnnnnnnnnnnnnnnnnnnnnnnnnnnnnnnnnnnnnnnnnnnnnnnnnnnnnnnnnnnnnnnnnnnnnnnnnnnnnnnnnnnnnnnnnnnnnnnnnnnnnnnnnnnnnnnnnnnnnnnnnnnnnnnnnnnnnnnnnnnnnnnnnnnnnnnnnnnnnnnnnnnnnnnnnnnnnnnnnnnnnnnnnnnnnnnnnnnnnnnnnnnnnnnnnnnnnnnnnnnnnnnnnnnnnnnnnnnnnnnnnnnnnnnnnnnnnnnnnnnnnnnnnnnnnnnnnnnnnnnnnnnnnnnnnnnnnnnnnnnnnnnnnnnnnnnnnnnnnnnnnnnnnnnnnnnnnnnnnnnnnnnnnnnnnnnnnnnnnnnnnnnnnnnnnnnnnnnnnnnnnnnnnnnnnnnnnnnnnnnnnnnnnnnnnnnnnnnnnnnnnnnnnnnnnnnnnnnnnnnnnnnnnnnnnnnnnnnnnnnnnnnnnnnnnnnnnnnnnnnnnnnnnnnnnnnnnnnnnnnnnnnnnnnnnnnnnnnnnnnnnnnnnnnnnnnnnnnnnnnnnnnnnnnnnnnnnnnnnnnnnnnnnnnnnnnnnnnnnnnnnnnnnnnnnnnnnnnnnnnnnnnnnnnnnnnnnnnnnnnnnnnnnnnnnnnnnnnnnnnnnnnnnnnnnnnnnnnnnnnnnnnnnnnnnnnnnnnnnnnnnnnnnnnnnnnnnnnnnnnnnnnnnnnnnnnnnnnnnnnnnnnnnnnnnnnnnnnnnnnnnnnnnnnnnnnnnnnnnnnnnnnnnnnnnnnnnnnnnnnnnnnnnnnnnnnnnnnnnnnnnnnnnnnnnnnnnnnnnnnnnnnnnnnnnnnnnnnnnnnnnnnnnnnnnnnnnnnnnnnnnnnnnnnnnnnnnnnnnnnnnnnnnnnnnnnnnnnnnnnnnnnnnnnnnnnnnnnnnnnnnnnnnnnnnnnnnnnnnnnnnnnnnnnnnnnnnnnnnnnnnnnnnnnnnnnnnnnnnnnnnnnnnnnnnnnnnnnnnnnnnnnnnnnnnnnnnnnnnnnnnnnnnnnnnnnnnnnnnnnnnnnnnnnnnnnnnnnnnnnnnnnnnnnnnnnnnnnnnnnnnnnnnnnnnnnnnnnnnnnnnnnnnnnnnnnnnnnnnnnnnnnnnnnnnnnnnnnnnnnnnnnnnnnnnnnnnnnnnnnnnnnnnnnnnnnnnnnnnnnnnnnnnnnnnnnnnnnnnnnnnnnnnnnnnnnnnnnnnnnnnnnnnnnnnnnnnnnnnnnnnnnnnnnnnnnnnnnnnnnnnnnnnnnnnnnnnnnnnnnnnnnnnnnnnnnnnnnnnnnnnnnnnnnnnnnnnnnnnnnnnnnnnnnnnnnnnnnnnnnnnnnnnnnnnnnnnnnnnnnnnnnnnnnnnnnnnnnnnnnnnnnnnnnnnnnnnnnnnnnnnnnnnnnnnnnnnnnnnnnnnnnnnnnnnnnnnnnnnnnnnnnnnnnnnnnnnnnnnnnnnnnnnnnnnnnnnnnnnnnnnnnnnnnnnnnnnnnnnnnnnnnnnnnnnnnnnnnnnnnnnnnnnnnnnnnnnnnnnnnnnnnnnnnnnnnnnnnnnnnnnnnnnnnnnnnnnnnnnnnnnnnnnnnnnnnnnnnnnnnnnnnnnnnnnnnnnnnnnnnnnnnnnnnnnnnnnnnnnnnnnnnnnnnnnnnnnnnnnnnnnnnnnnnnnnnnnnnnnnnnnnnnnnnnnnnnnnnnnnnnnnnnnnnnnnnnnnnnnnnnnnnnnnnnnnnnnnnnnnnnnnnnnnnnnnnnnnnnnnnnnnnnnnnnnnnnnnnnnnnnnnnnnnnnnnnnnnnnnnnnnnnnnnnnnnnnnnnnnnnnnnnnnnnnnnnnnnnnnnnnnnnnnnnnnnnnnnnnnnnnnnnnnnnnnnnnnnnnnnnnnnnnnnnnnnnnnnnnnnnnnnnnnnnnnnnnnnnnnnnnnnnnnnnnnnnnnnnnnnnnnnnnnnnnnnnnnnnnnnnnnnnnnnnnnnnnnnnnnnnnnnnnnnnnnnnnnnnnnnnnnnnnnnnnnnnnnnnnnnnnnnnnnnnnnnnnnnnnnnnnnnnnnnnnnnnnnnnnnnnnnnnnnnnnnnnnnnnnnnnnnnnnnnnnnnnnnnnnnnnnnnnnnnnnnnnnnnnnnnnnnnnnnnnnnnnnnnnnnnnnnnnnnnnnnnnnnnnnnnnnnnnnnnnnnnnnnnnnnnnnnnnnnnnnnnnnnnnnnnnnnnnnnnnnnnnnnnnnnnnnnnnnnnnnnnnnnnnnnnnnnnnnnnnnnnnnnnnnnnnnnnnnnnnnnnnnnnnnnnnnnnnnnnnnnnnnnnnnnnnnnnnnnnnnnnnnnnnnnnnnnnnnnnnnnnnnnnnnnnnnnnnnnnnnnnnnnnnnnnnnnnnnnnnnnnnnnnnnnnnnnnnnnnnnnnnnnnnnnnnnnnnnnnnnnnnnnnnnnnnnnnnnnnnnnnnnnnnnnnnnnnnnnnnnnnnnnnnnnnnnnnnnnnnnnnnnnnnnnnnnnnnnnnnnnnnnnnnnnnnnnnnnnnnnnnnnnnnnnnnnnnnnnnnnnnnnnnnnnnnnnnnnnnnnnnnnnnnnnnnnnnnnnnnnnnnnnnnnnnnnnnnnnnnnnnnnnnnnnnnnnnnnnnnnnnnnnnnnnnnnnnnnnnnnnnnnnnnnnnnnnnnnnnnnnnnnnnnnnnnnnnnnnnnnnnnnnnnnnnnnnnnnnnnnnnnnnnnnnnnnnnnnnnnnnnnnnnnnnnnnnnnnnnnnnnnnnnnnnnnnnnnnnnnnnnnnnnnnnnnnnnnnnnnnnnnnnnnnnnnnnnnnnnnnnnnnnnnnnnnnnnnnnnnnnnnnnnnnnnnnnnnnnnnnnnnnnnnnnnnnnnnnnnnnnnnnnnnnnnnnnnnnnnnnnnnnnnnnnnnnnnnnnnnnnnnnnnnnnnnnnnnnnnnnnnnnnnnnnnnnnnnnnnnnnnnnnnnnnnnnnnnnnnnnnnnnnnnnnnnnnnnnnnnnnnnnnnnnnnnnnnnnnnnnnnnnnnnnnnnnnnnnnnnnnnnnnnnnnnnnnnnnnnnnnnnnnnnnnnnnnnnnnnnnnnnnnnnnnnnnnnnnnnnnnnnnnnnnnnnnnnnnnnnnnnnnnnnnnnnnnnnnnnnnnnnnnnnnnnnnnnnnnnnnnnnnnnnnnnnnnnnnnnnnnnnnnnnnnnnnnnnnnnnnnnnnnnnnnnnnnnnnnnnnnnnnnnnnnnnnnnnnnnnnnnnnnnnnnnnnnnnnnnnnnnnnnnnnnnnnnnnnnnnnnnnnnnnnnnnnnnnnnnnnnnnnnnnnnnnnnnnnnnnnnnnnnnnnnnnnnnnnnnnnnnnnnnnnnnnnnnnnnnnnnnnnnnnnnnnnnnnnnnnnnnnnnnnnnnnnnnnnnnnnnnnnnnnnnnnnnnnnnnnnnnnnnnnnnnnnnnnnnnnnnnnnnnnnnnnnnnnnnnnnnnnnnnnnnnnnnnnnnnnnnnnnnnnnnnnnnnnnnnnnnnnnnnnnnnnnnnnnnnnnnnnnnnnnnnnnnnnnnnnnnnnnnnnnnnnnnnnnnnnnnnnnnnnnnnnnnnnnnnnnnnnnnnnnnnnnnnnnnnnnnnnnnnnnnnnnnnnnnnnnnnnnnnnnnnnnnnnnnnnnnnnnnnnnnnnnnnnnnnnnnnnnnnnnnnnnnnnnnnnnnnnnnnnnnnnnnnnnnnnnnnnnnnnnnnnnnnnnnnnnnnnnnnnnnnnnnnnnnnnnnnnnnnnnnnnnnnnnnnnnnnnnnnnnnnnnnnnnnnnnnnnnnnnnnnnnnnnnnnnnnnnnnnnnnnnnnnnnnnnnnnnnnnnnnnnnnnnnnnnnnnnnnnnnnnnnnnnnnnnnnnnnnnnnnnnnnnnnnnnnnnnnnnnnnnnnnnnnnnnnnnnnnnnnnnnnnnnnnnnnnnnnnnnnnnnnnnnnnnnnnnnnnnnnnnnnnnnnnnnnnnnnnnnnnnnnnnnnnnnnnnnnnnnnnnnnnnnnnnnnnnnnnnnnnnnnnnnnnnnnnnnnnnnnnnnnnnnnnnnnnnnnnnnnnnnnnnnnnnnnnnnnnnnnnnnnnnnnnnnnnnnnnnnnnnnnnnnnnnnnnnnnnnnnnnnnnnnnnnnnnnnnnnnnnnnnnnnnnnnnnnnnnnnnnnnnnnnnnnnnnnnnnnnnnnnnnnnnnnnnnnnnnnnnnnnnnnnnnnnnnnnnnnnnnnnnnnnnnnnnnnnnnnnnnnnnnnnnnnnnnnnnnnnnnnnnnnnnnnnnnnnnnnnnnnnnnnnnnnnnnnnnnnnnnnnnnnnnnnnnnnnnnnnnnnnnnnnnnnnnnnnnnnnnnnnnnnnnnnnnnnnnnnnnnnnnnnnnnnnnnnnnnnnnnnnnnnnnnnnnnnnnnnnnnnnnnnnnnnnnnnnnnnnnnnnnnnnnnnnnnnnnnnnnnnnnnnnnnnnnnnnnnnnnnnnnnnnnnnnnnnnnnnnnnnnnnnnnnnnnnnnnnnnnnnnnnnnnnnnnnnnnnnnnnnnnnnnnnnnnnnnnnnnnnnnnnnnnnnnnnnnnnnnnnnnnnnnnnnnnnnnnnnnnnnnnnnnnnnnnnnnnnnnnnnnnnnnnnnnnnnnnnnnnnnnnnnnnnnnnnnnnnnnnnnnnnnnnnnnnnnnnnnnnnnnnnnnnnnnnnnnnnnnnnnnnnnnnnnnnnnnnnnnnnnnnnnnnnnnnnnnnnnnnnnnnnnnnnnnnnnnnnnnnnnnnnnnnnnnnnnnnnnnnnnnnnnnnnnnnnnnnnnnnnnnnnnnnnnnnnnnnnnnnnnnnnnnnnnnnnnnnnnnnnnnnnnnnnnnnnnnnnnnnnnnnnnnnnnnnnnnnnnnnnnnnnnnnnnnnnnnnnnnnnnnnnnnnnnnnnnnnnnnnnnnnnnnnnnnnnnnnnnnnnnnnnnnnnnnnnnnnnnnnnnnnnnnnnnnnnnnnnnnnnnnnnnnnnnnnnnnnnnnnnnnnnnnnnnnnnnnnnnnnnnnnnnnnnnnnnnnnnnnnnnnnnnnnnnnnnnnnnnnnnnnnnnnnnnnnnnnnnnnnnnnnnnnnnnnnnnnnnnnnnnnnnnnnnnnnnnnnnnnnnnnnnnnnnnnnnnnnnnnnnnnnnnnnnnnnnnnnnnnnnnnnnnnnnnnnnnnnnnnnnnnnnnnnnnnnnnnnnnnnnnnnnnnnnnnnnnnnnnnnnnnnnnnnnnnnnnnnnnnnnnnnnnnnnnnnnnnnnnnnnnnnnnnnnnnnnnnnnnnnnnnnnnnnnnnnnnnnnnnnnnnnnnnnnnnnnnnnnnnnnnnnnnnnnnnnnnnnnnnnnnnnnnnnnnnnnnnnnnnnnnnnnnnnnnnnnnnnnnnnnnnnnnnnnnnnnnnnnnnnnnnnnnnnnnnnnnnnnnnnnnnnnnnnnnnnnnnnnnnnnnnnnnnnnnnnnnnnnnnnnnnnnnnnnnnnnnnnnnnnnnnnnnnnnnnnnnnnnnnnnnnnnnnnnnnnnnnnnnnnnnnnnnnnnnnnnnnnnnnnnnnnnnnnnnnnnnnnnnnnnnnnnnnnnnnnnnnnnnnnnnnnnnnnnnnnnnnnnnnnnnnnnnnnnnnnnnnnnnnnnnnnnnnnnnnnnnnnnnnnnnnnnnnnnnnnnnnnnnnnnnnnnnnnnnnnnnnnnnnnnnnnnnnnnnnnnnnnnnnnnnnnnnnnnnnnnnnnnnnnnnnnnnnnnnnnnnnnnnnnnnnnnnnnnnnnnnnnnnnnnnnnnnnnnnnnnnnnnnnnnnnnnnnnnnnnnnnnnnnnnnnnnnnnnnnnnnnnnnnnnnnnnnnnnnnnnnnnnnnnnnnnnnnnnnnnnnnnnnnnnnnnnnnnnnnnnnnnnnnnnnnnnnnnnnnnnnnnnnnnnnnnnnnnnnnnnnnnnnnnnnnnnnnnnnnnnnnnnnnnnnnnnnnnnnnnnnnnnnnnnnnnnnnnnnnnnnnnnnnnnnnnnnnnnnnnnnnnnnnnnnnnnnnnnnnnnnnnnnnnnnnnnnnnnnnnnnnnnnnnnnnnnnnnnnnnnnnnnnnnnnnnnnnnnnnnnnnnnnnnnnnnnnnnnnnnnnnnnnnnnnnnnnnnnnnnnnnnnnnnnnnnnnnnnnnnnnnnnnnnnnnnnnnnnnnnnnnnnnnnnnnnnnnnnnnnnnnnnnnnnnnnnnnnnnnnnnnnnnnnnnnnnnnnnnnnnnnnnnnnnnnnnnnnnnnnnnnnnnnnnnnnnnnnnnnnnnnnnnnnnnnnnnnnnnnnnnnnnnnnnnnnnnnnnnnnnnnnnnnnnnnnnnnnnnnnnnnnnnnnnnnnnnnnnnnnnnnnnnnnnnnnnnnnnnnnnnnnnnnnnnnnnnnnnnnnnnnnnnnnnnnnnnnnnnnnnnnnnnnnnnnnnnnnnnnnnnnnnnnnnnnnnnnnnnnnnnnnnnnnnnnnnnnnnnnnnnnnnnnnnnnnnnnnnnnnnnnnnnnnnnnnnnnnnnnnnnnnnnnnnnnnnnnnnnnnnnnnnnnnnnnnnnnnnnnnnnnnnnnnnnnnnnnnnnnnnnnnnnnnnnnnnnnnnnnnnnnnnnnnnnnnnnnnnnnnnnnnnnnnnnnnnnnnnnnnnnnnnnnnnnnnnnnnnnnnnnnnnnnnnnnnnnnnnnnnnnnnnnnnnnnnnnnnnnnnnnnnnnnnnnnnnnnnnnnnnnnnnnnnnnnnnnnnnnnnnnnnnnnnnnnnnnnnnnnnnnnnnnnnnnnnnnnnnnnnnnnnnnnnnnnnnnnnnnnnnnnnnnnnnnnnnnnnnnnnnnnnnnnnnnnnnnnnnnnnnnnnnnnnnnnnnnnnnnnnnnnnnnnnnnnnnnnnnnnnnnnnnnnnnnnnnnnnnnnnnnnnnnnnnnnnnnnnnnnnnnnnnnnnnnnnnnnnnnnnnnnnnnnnnnnnnnnnnnnnnnnnnnnnnnnnnnnnnnnnnnnnnnnnnnnnnnnnnnnnnnnnnnnnnnnnnnnnnnnnnnnnnnnnnnnnnnnnnnnnnnnnnnnnnnnnnnnnnnnnnnnnnnnnnnnnnnnnnnnnnnnnnnnnnnnnnnnnnnnnnnnnnnnnnnnnnnnnnnnnnnnnnnnnnnnnnnnnnnnnnnnnnnnnnnnnnnnnnnnnnnnnnnnnnnnnnnnnnnnnnnnnnnnnnnnnnnnnnnnnnnnnnnnnnnnnnnnnnnnnnnnnnnnnnnnnnnnnnnnnnnnnnnnnnnnnnnnnnnnnnnnnnnnnnnnnnnnnnnnnnnnnnnnnnnnnnnnnnnnnnnnnnnnnnnnnnnnnnnnnnnnnnnnnnnnnnnnnnnnnnnnnnnnnnnnnnnnnnnnnnnnnnnnnnnnnnnnnnnnnnnnnnnnnnnnnnnnnnnnnnnnnnnnnnnnnnnnnnnnnnnnnnnnnnnnnnnnnnnnnnnnnnnnnnnnnnnnnnnnnnnnnnnnnnnnnnnnnnnnnnnnnnnnnnnnnnnnnnnnnnnnnnnnnnnnnnnnnnnnnnnnnnnnnnnnnnnnnnnnnnnnnnnnnnnnnnnnnnnnnnnnnnnnnnnnnnnnnnnnnnnnnnnnnnnnnnnnnnnnnnnnnnnnnnnnnnnnnnnnnnnnnnnnnnnnnnnnnnnnnnnnnnnnnnnnnnnnnnnnnnnnnnnnnnnnnnnnnnnnnnnnnnnnnnnnnnnnnnnnnnnnnnnnnnnnnnnnnnnnnnnnnnnnnnnnnnnnnnnnnnnnnnnnnnnnnnnnnnnnnnnnnnnnnnnnnnnnnnnnnnnnnnnnnnnnnnnnnnnnnnnnnnnnnnnnnnnnnnnnnnnnnnnnnnnnnnnnnnnnnnnnnnnnnnnnnnnnnnnnnnnnnnnnnnnnnnnnnnnnnnnnnnnnnnnnnnnnnnnnnnnnnnnnnnnnnnnnnnnnnnnnnnnnnnnnnnnnnnnnnnnnnnnnnnnnnnnnnnnnnnnnnnnnnnnnnnnnnnnnnnnnnnnnnnnnnnnnnnnnnnnnnnnnnnnnnnnnnnnnnnnnnnnnnnnnnnnnnnnnnnnnnnnnnnnnnnnnnnnnnnnnnnnnnnnnnnnnnnnnnnnnnnnnnnnnnnnnnnnnnnnnnnnnnnnnnnnnnnnnnnnnnnnnnnnnnnnnnnnnnnnnnnnnnnnnnnnnnnnnnnnnnnnnnnnnnnnnnnnnnnnnnnnnnnnnnnnnnnnnnnnnnnnnnnnnnnnnnnnnnnnnnnnnnnnnnnnnnnnnnnnnnnnnnnnnnnnnnnnnnnnnnnnnnnnnnnnnnnnnnnnnnnnnnnnnnnnnnnnnnnnnnnnnnnnnnnnnnnnnnnnnnnnnnnnnnnnnnnnnnnnnnnnnnnnnnnnnnnnnnnnnnnnnnnnnnnnnnnnnnnnnnnnnnnnnnnnnnnnnnnnnnnnnnnnnnnnnnnnnnnnnnnnnnnnnnnnnnnnnnnnnnnnnnnnnnnnnnnnnnnnnnnnnnnnnnnnnnnnnnnnnnnnnnnnnnnnnnnnnnnnnnnnnnnnnnnnnnnnnnnnnnnnnnnnnnnnnnnnnnnnnnnnnnnnnnnnnnnnnnnnnnnnnnnnnnnnnnnnnnnnnnnnnnnnnnnnnnnnnnnnnnnnnnnnnnnnnnnnnnnnnnnnnnnnnnnnnnnnnnnnnnnnnnnnnnnnnnnnnnnnnnnnnnnnnnnnnnnnnnnnnnnnnnnnnnnnnnnnnnnnnnnnnnnnnnnnnnnnnnnnnnnnnnnnnnnnnnnnnnnnnnnnnnnnnnnnnnnnnnnnnnnnnnnnnnnnnnnnnnnnnnnnnnnnnnnnnnnnnnnnnnnnnnnnnnnnnnnnnnnnnnnnnnnnnnnnnnnnnnnnnnnnnnnnnnnnnnnnnnnnnnnnnnnnnnnnnnnnnnnnnnnnnnnnnnnnnnnnnnnnnnnnnnnnnnnnnnnnnnnnnnnnnnnnnnnnnnnnnnnnnnnnnnnnnnnnnnnnnnnnnnnnnnnnnnnnnnnnnnnnnnnnnnnnnnnnnnnnnnnnnnnnnnnnnnnnnnnnnnnnnnnnnnnnnnnnnnnnnnnnnnnnnnnnnnnnnnnnnnnnnnnnnnnnnnnnnnnnnnnnnnnnnnnnnnnnnnnnnnnnnnnnnnnnnnnnnnnnnnnnnnnnnnnnnnnnnnnnnnnnnnnnnnnnnnnnnnnnnnnnnnnnnnnnnnnnnnnnnnnnnnnnnnnnnnnnnnnnnnnnnnnnnnnnnnnnnnnnnnnnnnnnnnnnnnnnnnnnnnnnnnnnnnnnnnnnnnnnnnnnnnnnnnnnnnnnnnnnnnnnnnnnnnnnnnnnnnnnnnnnnnnnnnnnnnnnnnnnnnnnnnnnnnnnnnnnnnnnnnnnnnnnnnnnnnnnnnnnnnnnnnnnnnnnnnnnnnnnnnnnnnnnnnnnnnnnnnnnnnnnnnnnnnnnnnnnnnnnnnnnnnnnnnnnnnnnnnnnnnnnnnnnnnnnnnnnnnnnnnnnnnnnnnnnnnnnnnnnnnnnnnnnnnnnnnnnnnnnnnnnnnnnnnnnnnnnnnnnnnnnnnnnnnnnnnnnnnnnnnnnnnnnnnnnnnnnnnnnnnnnnnnnnnnnnnnnnnnnnnnnnnnnnnnnnnnnnnnnnnnnnnnnnnnnnnnnnnnnnnnnnnnnnnnnnnnnnnnnnnnnnnnnnnnnnnnnnnnnnnnnnnnnnnnnnnnnnnnnnnnnnnnnnnnnnnnnnnnnnnnnnnnnnnnnnnnnnnnnnnnnnnnnnnnnnnnnnnnnnnnnnnnnnnnnnnnnnnnnnnnnnnnnnnnnnnnnnnnnnnnnnnnnnnnnnnnnnnnnnnnnnnnnnnnnnnnnnnnnnnnnnnnnnnnnnnnnnnnnnnnnnnnnnnnnnnnnnnnnnnnnnnnnnnnnnnnnnnnnnnnnnnnnnnnnnnnnnnnnnnnnnnnnnnnnnnnnnnnnnnnnnnnnnnnnnnnnnnnnnnnnnnnnnnnnnnnnnnnnnnnnnnnnnnnnnnnnnnnnnnnnnnnnnnnnnnnnnnnnnnnnnnnnnnnnnnnnnnnnnnnnnnnnnnnnnnnnnnnnnnnnnnnnnnnnnnnnnnnnnnnnnnnnnnnnnnnnnnnnnnnnnnnnnnnnnnnnnnnnnnnnnnnnnnnnnnnnnnnnnnnnnnnnnnnnnnnnnnnnnnnnnnnnnnnnnnnnnnnnnnnnnnnnnnnnnnnnnnnnnnnnnnnnnnnnnnnnnnnnnnnnnnnnnnnnnnnnnnnnnnnnnnnnnnnnnnnnnnnnnnnnnnnnnnnnnnnnnnnnnnnnnnnnnnnnnnnnnnnnnnnnnnnnnnnnnnnnnnnnnnnnnnnnnnnnnnnnnnnnnnnnnnnnnnnnnnnnnnnnnnnnnnnnnnnnnnnnnnnnnnnnnnnnnnnnnnnnnnnnnnnnnnnnnnnnnnnnnnnnnnnnnnnnnnnnnnnnnnnnnnnnnnnnnnnnnnnnnnnnnnnnnnnnnnnnnnnnnnnnnnnnnnnnnnnnnnnnnnnnnnnnnnnnnnnnnnnnnnnnnnnnnnnnnnnnnnnnnnnnnnnnnnnnnnnnnnnnnnnnnnnnnnnnnnnnnnnnnnnnnnnnnnnnnnnnnnnnnnnnnnnnnnnnnnnnnnnnnnnnnnnnnnnnnnnnnnnnnnnnnnnnnnnnnnnnnnnnnnnnnnnnnnnnnnnnnnnnnnnnnnnnnnnnnnnnnnnnnnnnnnnnnnnnnnnnnnnnnnnnnnnnnnnnnnnnnnnnnnnnnnnnnnnnnnnnnnnnnnnnnnnnnnnnnnnnnnnnnnnnnnnnnnnnnnnnnnnnnnnnnnnnnnnnnnnnnnnnnnnnnnnnnnnnnnnnnnnnnnnnnnnnnnnnnnnnnnnnnnnnnnnnnnnnnnnnnnnnnnnnnnnnnnnnnnnnnnnnnnnnnnnnnnnnnnnnnnnnnnnnnnnnnnnnnnnnnnnnnnnnnnnnnnnnnnnnnnnnnnnnnnnnnnnnnnnnnnnnnnnnnnnnnnnnnnnnnnnnnnnnnnnnnnnnnnnnnnnnnnnnnnnnnnnnnnnnnnnnnnnnnnnnnnnnnnnnnnnnnnnnnnnnnnnnnnnnnnnnnnnnnnnnnnnnnnnnnnnnnnnnnnnnnnnnnnnnnnnnnnnnnnnnnnnnnnnnnnnnnnnnnnnnnnnnnnnnnnnnnnnnnnnnnnnnnnnnnnnnnnnnnnnnnnnnnnnnnnnnnnnnnnnnnnnnnnnnnnnnnnnnnnnnnnnnnnnnnnnnnnnnnnnnnnnnnnnnnnnnnnnnnnnnnnnnnnnnnnnnnnnnnnnnnnnnnnnnnnnnnnnnnnnnnnnnnnnnnnnnnnnnnnnnnnnnnnnnnnnnnnnnnnnnnnnnnnnnnnnnnnnnnnnnnnnnnnnnnnnnnnnnnnnnnnnnnnnnnnnnnnnnnnnnnnnnnnnnnnnnnnnnnnnnnnnnnnnnnnnnnnnnnnnnnnnnnnnnnnnnnnnnnnnnnnnnnnnnnnnnnnnnnnnnnnnnnnnnnnnnnnnnnnnnnnnnnnnnnnnnnnnnnnnnnnnnnnnnnnnnnnnnnnnnnnnnnnnnnnnnnnnnnnnnnnnnnnnnnnnnnnnnnnnnnnnnnnnnnnnnnnnnnnnnnnnnnnnnnnnnnnnnnnnnnnnnnnnnnnnnnnnnnnnnnnnnnnnnnnnnnnnnnnnnnnnnnnnnnnnnnnnnnnnnnnnnnnnnnnnnnnnnnnnnnnnnnnnnnnnnnnnnnnnnnnnnnnnnnnnnnnnnnnnnnnnnnnnnnnnnnnnnnnnnnnnnnnnnnnnnnnnnnnnnnnnnnnnnnnnnnnnnnnnnnnnnnnnnnnnnnnnnnnnnnnnnnnnnnnnnnnnnnnnnnnnnnnnnnnnnnnnnnnnnnnnnnnnnnnnnnnnnnnnnnnnnnnnnnnnnnnnnnnnnnnnnnnnnnnnnnnnnnnnnnnnnnnnnnnnnnnnnnnnnnnnnnnnnnnnnnnnnnnnnnnnnnnnnnnnnnnnnnnnnnnnnnnnnnnnnnnnnnnnnnnnnnnnnnnnnnnnnnnnnnnnnnnnnnnnnnnnnnnnnnnnnnnnnnnnnnnnnnnnnnnnnnnnnnnnnnnnnnnnnnnnnnnnnnnnnnnnnnnnnnnnnnnnnnnnnnnnnnnnnnnnnnnnnnnnnnnnnnnnnnnnnnnnnnnnnnnnnnnnnnnnnnnnnnnnnnnnnnnnnnnnnnnnnnnnnnnnnnnnnnnnnnnnnnnnnnnnnnnnnnnnnnnnnnnnnnnnnnnnnnnnnnnnnnnnnnnnnnnnnnnnnnnnnnnnnnnnnnnnnnnnnnnnnnnnnnnnnnnnnnnnnnnnnnnnnnnnnnnnnnnnnnnnnnnnnnnnnnnnnnnnnnnnnnnnnnnnnnnnnnnnnnnnnnnnnnnnnnnnnnnnnnnnnnnnnnnnnnnnnnnnnnnnnnnnnnnnnnnnnnnnnnnnnnnnnnnnnnnnnnnnnnnnnnnnnnnnnnnnnnnnnnnnnnnnnnnnnnnnnnnnnnnnnnnnnnnnnnnnnnnnnnnnnnnnnnnnnnnnnnnnnnnnnnnnnnnnnnnnnnnnnnnnnnnnnnnnnnnnnnnnnnnnnnnnnnnnnnnnnnnnnnnnnnnnnnnnnnnnnnnnnnnnnnnnnnnnnnnnnnnnnnnnnnnnnnnnnnnnnnnnnnnnnnnnnnnnnnnnnnnnnnnnnnnnnnnnnnnnnnnnnnnnnnnnnnnnnnnnnnnnnnnnnnnnnnnnnnnnnnnnnnnnnnnnnnnnnnnnnnnnnnnnnnnnnnnnnnnnnnnnnnnnnnnnnnnnnnnnnnnnnnnnnnnnnnnnnnnnnnnnnnnnnnnnnnnnnnnnnnnnnnnnnnnnnnnnnnnnnnnnnnnnnnnnnnnnnnnnnnnnnnnnnnnnnnnnnnnnnnnnnnnnnnnnnnnnnnnnnnnnnnnnnnnnnnnnnnnnnnnnnnnnnnnnnnnnnnnnnnnnnnnnnnnnnnnnnnnnnnnnnnnnnnnnnnnnnnnnnnnnnnnnnnnnnnnnnnnnnnnnnnnnnnnnnnnnnnnnnnnnnnnnnnnnnnnnnnnnnnnnnnnnnnnnnnnnnnnnnnnnnnnnnnnnnnnnnnnnnnnnnnnnnnnnnnnnnnnnnnnnnnnnnnnnnnnnnnnnnnnnnnnnnnnnnnnnnnnnnnnnnnnnnnnnnnnnnnnnnnnnnnnnnnnnnnnnnnnnnnnnnnnnnnnnnnnnnnnnnnnnnnnnnnnnnnnnnnnnnnnnnnnnnnnnnnnnnnnnnnnnnnnnnnnnnnnnnnnnnnnnnnnnnnnnnnnnnnnnnnnnnnnnnnnnnnnnnnnnnnnnnnnnnnnnnnnnnnnnnnnnnnnnnnnnnnnnnnnnnnnnnnnnnnnnnnnnnnnnnnnnnnnnnnnnnnnnnnnnnnnnnnnnnnnnnnnnnnnnnnnnnnnnnnnnnnnnnnnnnnnnnnnnnnnnnnnnnnnnnnnnnnnnnnnnnnnnnnnnnnnnnnnnnnnnnnnnnnnnnnnnnnnnnnnnnnnnnnnnnnnnnnnnnnnnnnnnnnnnnnnnnnnnnnnnnnnnnnnnnnnnnnnnnnnnnnnnnnnnnnnnnnnnnnnnnnnnnnnnnnnnnnnnnnnnnnnnnnnnnnnnnnnnnnnnnnnnnnnnnnnnnnnnnnnnnnnnnnnnnnnnnnnnnnnnnnnnnnnnnnnnnnnnnnnnnnnnnnnnnnnnnnnnnnnnnnnnnnnnnnnnnnnnnnnnnnnnnnnnnnnnnnnnnnnnnnnnnnnnnnnnnnnnnnnnnnnnnnnnnnnnnnnnnnnnnnnnnnnnnnnnnnnnnnnnnnnnnnnnnnnnnnnnnnnnnnnnnnnnnnnnnnnnnnnnnnnnnnnnnnnnnnnnnnnnnnnnnnnnnnnnnnnnnnnnnnnnnnnnnnnnnnnnnnnnnnnnnnnnnnnnnnnnnnnnnnnnnnnnnnnnnnnnnnnnnnnnnnnnnnnnnnnnnnnnnnnnnnnnnnnnnnnnnnnnnnnnnnnnnnnnnnnnnnnnnnnnnnnnnnnnnnnnnnnnnnnnnnnnnnnnnnnnnnnnnnnnnnnnnnnnnnnnnnnnnnnnnnnnnnnnnnnnnnnnnnnnnnnnnnnnnnnnnnnnnnnnnnnnnnnnnnnnnnnnnnnnnnnnnnnnnnnnnnnnnnnnnnnnnnnnnnnnnnnnnnnnnnnnnnnnnnnnnnnnnnnnnnnnnnnnnnnnnnnnnnnnnnnnnnnnnnnnnnnnnnnnnnnnnnnnnnnnnnnnnnnnnnnnnnnnnnnnnnnnnnnnnnnnnnnnnnnnnnnnnnnnnnnnnnnnnnnnnnnnnnnnnnnnnnnnnnnnnnnnnnnnnnnnnnnnnnnnnnnnnnnnnnnnnnnnnnnnnnnnnnnnnnnnnnnnnnnnnnnnnnnnnnnnnnnnnnnnnnnnnnnnnnnnnnnnnnnnnnnnnnnnnnnnnnnnnnnnnnnnnnnnnnnnnnnnnnnnnnnnnnnnnnnnnnnnnnnnnnnnnnnnnnnnnnnnnnnnnnnnnnnnnnnnnnnnnnnnnnnnnnnnnnnnnnnnnnnnnnnnnnnnnnnnnnnnnnnnnnnnnnnnnnnnnnnnnnnnnnnnnnnnnnnnnnnnnnnnnnnnnnnnnnnnnnnnnnnnnnnnnnnnnnnnnnnnnnnnnnnnnnnnnnnnnnnnnnnnnnnnnnnnnnnnnnnnnnnnnnnnnnnnnnnnnnnnnnnnnnnnnnnnnnnnnnnnnnnnnnnnnnnnnnnnnnnnnnnnnnnnnnnnnnnnnnnnnnnnnnnnnnnnnnnnnnnnnnnnnnnnnnnnnnnnnnnnnnnnnnnnnnnnnnnnnnnnnnnnnnnnnnnnnnnnnnnnnnnnnnnnnnnnnnnnnnnnnnnnnnnnnnnnnnnnnnnnnnnnnnnnnnnnnnnnnnnnnnnnnnnnnnnnnnnnnnnnnnnnnnnnnnnnnnnnnnnnnnnnnnnnnnnnnnnnnnnnnnnnnnnnnnnnnnnnnnnnnnnnnnnnnnnnnnnnnnnnnnnnnnnnnnnnnnnnnnnnnnnnnnnnnnnnnnnnnnnnnnnnnnnnnnnnnnnnnnnnnnnnnnnnnnnnnnnnnnnnnnnnnnnnnnnnnnnnnnnnnnnnnnnnnnnnnnnnnnnnnnnnnnnnnnnnnnnnnnnnnnnnnnnnnnnnnnnnnnnnnnnnnnnnnnnnnnnnnnnnnnnnnnnnnnnnnnnnnnnnnnnnnnnnnnnnnnnnnnnnnnnnnnnnnnnnnnnnnnnnnnnnnnnnnnnnnnnnnnnnnnnnnnnnnnnnnnnnnnnnnnnnnnnnnnnnnnnnnnnnnnnnnnnnnnnnnnnnnnnnnnnnnnnnnnnnnnnnnnnnnnnnnnnnnnnnnnnnnnnnnnnnnnnnnnnnnnnnnnnnnnnnnnnnnnnnnnnnnnnnnnnnnnnnnnnnnnnnnnnnnnnnnnnnnnnnnnnnnnnnnnnnnnnnnnnnnnnnnnnnnnnnnnnnnnnnnnnnnnnnnnnnnnnnnnnnnnnnnnnnnnnnnnnnnnnnnnnnnnnnnnnnnnnnnnnnnnnnnnnnnnnnnnnnnnnnnnnnnnnnnnnnnnnnnnnnnnnnnnnnnnnnnnnnnnnnnnnnnnnnnnnnnnnnnnnnnnnnnnnnnnnnnnnnnnnnnnnnnnnnnnnnnnnnnnnnnnnnnnnnnnnnnnnnnnnnnnnnnnnnnnnnnnnnnnnnnnnnnnnnnnnnnnnnnnnnnnnnnnnnnnnnnnnnnnnnnnnnnnnnnnnnnnnnnnnnnnnnnnnnnnnnnnnnnnnnnnnnnnnnnnnnnnnnnnnnnnnnnnnnnnnnnnnnnnnnnnnnnnnnnnnnnnnnnnnnnnnnnnnnnnnnnnnnnnnnnnnnnnnnnnnnnnnnnnnnnnnnnnnnnnnnnnnnnnnnnnnnnnnnnnnnnnnnnnnnnnnnnnnnnnnnnnnnnnnnnnnnnnnnnnnnnnnnnnnnnnnnnnnnnnnnnnnnnnnnnnnnnnnnnnnnnnnnnnnnnnnnnnnnnnnnnnnnnnnnnnnnnnnnnnnnnnnnnnnnnnnnnnnnnnnnnnnnnnnnnnnnnnnnnnnnnnnnnnnnnnnnnnnnnnnnnnnnnnnnnnnnnnnnnnnnnnnnnnnnnnnnnnnnnnnnnnnnnnnnnnnnnnnnnnnnnnnnnnnnnnnnnnnnnnnnnnnnnnnnnnnnnnnnnnnnnnnnnnnnnnnnnnnnnnnnnnnnnnnnnnnnnnnnnnnnnnnnnnnnnnnnnnnnnnnnnnnnnnnnnnnnnnnnnnnnnnnnnnnnnnnnnnnnnnnnnnnnnnnnnnnnnnnnnnnnnnnnnnnnnnnnnnnnnnnnnnnnnnnnnnnnnnnnnnnnnnnnnnnnnnnnnnnnnnnnnnnnnnnnnnnnnnnnnnnnnnnnnnnnnnnnnnnnnnnnnnnnnnnnnnnnnnnnnnnnnnnnnnnnnnnnnnnnnnnnnnnnnnnnnnnnnnnnnnnnnnnnnnnnnnnnnnnnnnnnnnnnnnnnnnnnnnnnnnnnnnnnnnnnnnnnnnnnnnnnnnnnnnnnnnnnnnnnnnnnnnnnnnnnnnnnnnnnnnnnnnnnnnnnnnnnnnnnnnnnnnnnnnnnnnnnnnnnnnnnnnnnnnnnnnnnnnnnnnnnnnnnnnnnnnnnnnnnnnnnnnnnnnnnnnnnnnnnnnnnnnnnnnnnnnnnnnnnnnnnnnnnnnnnnnnnnnnnnnnnnnnnnnnnnnnnnnnnnnnnnnnnnnnnnnnnnnnnnnnnnnnnnnnnnnnnnnnnnnnnnnnnnnnnnnnnnnnnnnnnnnnnnnnnnnnnnnnnnnnnnnnnnnnnnnnnnnnnnnnnnnnnnnnnnnnnnnnnnnnnnnnnnnnnnnnnnnnnnnnnnnnnnnnnnnnnnnnnnnnnnnnnnnnnnnnnnnnnnnnnnnnnnnnnnnnnnnnnnnnnnnnnnnnnnnnnnnnnnnnnnnnnnnnnnnnnnnnnnnnnnnnnnnnnnnnnnnnnnnnnnnnnnnnnnnnnnnnnnnnnnnnnnnnnnnnnnnnnnnnnnnnnnnnnnnnnnnnnnnnnnnnnnnnnnnnnnnnnnnnnnnnnnnnnnnnnnnnnnnnnnnnnnnnnnnnnnnnnnnnnnnnnnnnnnnnnnnnnnnnnnnnnnnnnnnnnnnnnnnnnnnnnnnnnnnnnnnnnnnnnnnnnnnnnnnnnnnnnnnnnnnnnnnnnnnnnnnnnnnnnnnnnnnnnnnnnnnnnnnnnnnnnnnnnnnnnnnnnnnnnnnnnnnnnnnnnnnnnnnnnnnnnnnnnnnnnnnnnnnnnnnnnnnnnnnnnnnnnnnnnnnnnnnnnnnnnnnnnnnnnnnnnnnnnnnnnnnnnnnnnnnnnnnnnnnnnnnnnnnnnnnnnnnnnnnnnnnnnnnnnnnnnnnnnnnnnnnnnnnnnnnnnnnnnnnnnnnnnnnnnnnnnnnnnnnnnnnnnnnnnnnnnnnnnnnnnnnnnnnnnnnnnnnnnnnnnnnnnnnnnnnnnnnnnnnnnnnnnnnnnnnnnnnnnnnnnnnnnnnnnnnnnnnnnnnnnnnnnnnnnnnnnnnnnnnnnnnnnnnnnnnnnnnnnnnnnnnnnnnnnnnnnnnnnnnnnnnnnnnnnnnnnnnnnnnnnnnnnnnnnnnnnnnnnnnnnnnnnnnnnnnnnnnnnnnnnnnnnnnnnnnnnnnnnnnnnnnnnnnnnnnnnnnnnnnnnnnnnnnnnnnnnnnnnnnnnnnnnnnnnnnnnnnnnnnnnnnnnnnnnnnnnnnnnnnnnnnnnnnnnnnnnnnnnnnnnnnnnnnnnnnnnnnnnnnnnnnnnnnnnnnnnnnnnnnnnnnnnnnnnnnnnnnnnnnnnnnnnnnnnnnnnnnnnnnnnnnnnnnnnnnnnnnnnnnnnnnnnnnnnnnnnnnnnnnnnnnnnnnnnnnnnnnnnnnnnnnnnnnnnnnnnnnnnnnnnnnnnnnnnnnnnnnnnnnnnnnnnnnnnnnnnnnnnnnnnnnnnnnnnnnnnnnnnnnnnnnnnnnnnnnnnnnnnnnnnnnnnnnnnnnnnnnnnnnnnnnnnnnnnnnnnnnnnnnnnnnnnnnnnnnnnnnnnnnnnnnnnnnnnnnnnnnnnnnnnnnnnnnnnnnnnnnnnnnnnnnnnnnnnnnnnnnnnnnnnnnnnnnnnnnnnnnnnnnnnnnnnnnnnnnnnnnnnnnnnnnnnnnnnnnnnnnnnnnnnnnnnnnnnnnnnnnnnnnnnnnnnnnnnnnnnnnnnnnnnnnnnnnnnnnnnnnnnnnnnnnnnnnnnnnnnnnnnnnnnnnnnnnnnnnnnnnnnnnnnnnnnnnnnnnnnnnnnnnnnnnnnnnnnnnnnnnnnnnnnnnnnnnnnnnnnnnnnnnnnnnnnnnnnnnnnnnnnnnnnnnnnnnnnnnnnnnnnnnnnnnnnnnnnnnnnnnnnnnnnnnnnnnnnnnnnnnnnnnnnnnnnnnnnnnnnnnnnnnnnnnnnnnnnnnnnnnnnnnnnnnnnnnnnnnnnnnnnnnnnnnnnnnnnnnnnnnnnnnnnnnnnnnnnnnnnnnnnnnnnnnnnnnnnnnnnnnnnnnnnnnnnnnnnnnnnnnnnnnnnnnnnnnnnnnnnnnnnnnnnnnnnnnnnnnnnnnnnnnnnnnnnnnnnnnnnnnnnnnnnnnnnnnnnnnnnnnnnnnnnnnnnnnnnnnnnnnnnnnnnnnnnnnnnnnnnnnnnnnnnnnnnnnnnnnnnnnnnnnnnnnnnnnnnnnnnnnnnnnnnnnnnnnnnnnnnnnnnnnnnnnnnnnnnnnnnnnnnnnnnnnnnnnnnnnnnnnnnnnnnnnnnnnnnnnnnnnnnnnnnnnnnnnnnnnnnnnnnnnnnnnnnnnnnnnnnnnnnnnnnnnnnnnnnnnnnnnnnnnnnnnnnnnnnnnnnnnnnnnnnnnnnnnnnnnnnnnnnnnnnnnnnnnnnnnnnnnnnnnnnnnnnnnnnnnnnnnnnnnnnnnnnnnnnnnnnnnnnnnnnnnnnnnnnnnnnnnnnnnnnnnnnnnnnnnnnnnnnnnnnnnnnnnnnnnnnnnnnnnnnnnnnnnnnnnnnnnnnnnnnnnnnnnnnnnnnnnnnnnnnnnnnnnnnnnnnnnnnnnnnnnnnnnnnnnnnnnnnnnnnnnnnnnnnnnnnnnnnnnnnnnnnnnnnnnnnnnnnnnnnnnnnnnnnnnnnnnnnnnnnnnnnnnnnnnnnnnnnnnnnnnnnnnnnnnnnnnnnnnnnnnnnnnnnnnnnnnnnnnnnnnnnnnnnnnnnnnnnnnnnnnnnnnnnnnnnnnnnnnnnnnnnnnnnnnnnnnnnnnnnnnnnnnnnnnnnnnnnnnnnnnnnnnnnnnnnnnnnnnnnnnnnnnnnnnnnnnnnnnnnnnnnnnnnnnnnnnnnnnnnnnnnnnnnnnnnnnnnnnnnnnnnnnnnnnnnnnnnnnnnnnnnnnnnnnnnnnnnnnnnnnnnnnnnnnnnnnnnnnnnnnnnnnnnnnnnnnnnnnnnnnnnnnnnnnnnnnnnnnnnnnnnnnnnnnnnnnnnnnnnnnnnnnnnnnnnnnnnnnnnnnnnnnnnnnnnnnnnnnnnnnnnnnnnnnnnnnnnnnnnnnnnnnnnnnnnnnnnnnnnnnnnnnnnnnnnnnnnnnnnnnnnnnnnnnnnnnnnnnnnnnnnnnnnnnnnnnnnnnnnnnnnnnnnnnnnnnnnnnnnnnnnnnnnnnnnnnnnnnnnnnnnnnnnnnnnnnnnnnnnnnnnnnnnnnnnnnnnnnnnnnnnnnnnnnnnnnnnnnnnnnnnnnnnnnnnnnnnnnnnnnnnnnnnnnnnnnnnnnnnnnnnnnnnnnnnnnnnnnnnnnnnnnnnnnnnnnnnnnnnnnnnnnnnnnnnnnnnnnnnnnnnnnnnnnnnnnnnnnnnnnnnnnnnnnnnnnnnnnnnnnnnnnnnnnnnnnnnnnnnnnnnnnnnnnnnnnnnnnnnnnnnnnnnnnnnnnnnnnnnnnnnnnnnnnnnnnnnnnnnnnnnnnnnnnnnnnnnnnnnnnnnnnnnnnnnnnnnnnnnnnnnnnnnnnnnnnnnnnnnnnnnnnnnnnnnnnnnnnnnnnnnnnnnnnnnnnnnnnnnnnnnnnnnnnnnnnnnnnnnnnnnnnnnnnnnnnnnnnnnnnnnnnnnnnnnnnnnnnnnnnnnnnnnnnnnnnnnnnnnnnnnnnnnnnnnnnnnnnnnnnnnnnnnnnnnnnnnnnnnnnnnnnnnnnnnnnnnnnnnnnnnnnnnnnnnnnnnnnnnnnnnnnnnnnnnnnnnnnnnnnnnnnnnnnnnnnnnnnnnnnnnnnnnnnnnnnnnnnnnnnnnnnnnnnnnnnnnnnnnnnnnnnnnnnnnnnnnnnnnnnnnnnnnnnnnnnnnnnnnnnnnnnnnnnnnnnnnnnnnnnnnnnnnnnnnnnnnnnnnnnnnnnnnnnnnnnnnnnnnnnnnnnnnnnnnnnnnnnnnnnnnnnnnnnnnnnnnnnnnnnnnnnnnnnnnnnnnnnnnnnnnnnnnnnnnnnnnnnnnnnnnnnnnnnnnnnnnnnnnnnnnnnnnnnnnnnnnnnnnnnnnnnnnnnnnnnnnnnnnnnnnnnnnnnnnnnnnnnnnnnnnnnnnnnnnnnnnnnnnnnnnnnnnnnnnnnnnnnnnnnnnnnnnnnnnnnnnnnnnnnnnnnnnnnnnnnnnnnnnnnnnnnnnnnnnnnnnnnnnnnnnnnnnnnnnnnnnnnnnnnnnnnnnnnnnnnnnnnnnnnnnnnnnnnnnnnnnnnnnnnnnnnnnnnnnnnnnnnnnnnnnnnnnnnnnnnnnnnnnnnnnnnnnnnnnnnnnnnnnnnnnnnnnnnnnnnnnnnnnnnnnnnnnnnnnnnnnnnnnnnnnnnnnnnnnnnnnnnnnnnnnnnnnnnnnnnnnnnnnnnnnnnnnnnnnnnnnnnnnnnnnnnnnnnnnnnnnnnnnnnnnnnnnnnnnnnnnnnnnnnnnnnnnnnnnnnnnnnnnnnnnnnnnnnnnnnnnnnnnnnnnnnnnnnnnnnnnnnnnnnnnnnnnnnnnnnnnnnnnnnnnnnnnnnnnnnnnnnnnnnnnnnnnnnnnnnnnnnnnnnnnnnnnnnnnnnnnnnnnnnnnnnnnnnnnnnnnnnnnnnnnnnnnnnnnnnnnnnnnnnnnnnnnnnnnnnnnnnnnnnnnnnnnnnnnnnnnnnnnnnnnnnnnnnnnnnnnnnnnnnnnnnnnnnnnnnnnnnnnnnnnnnnnnnnnnnnnnnnnnnnnnnnnnnnnnnnnnnnnnnnnnnnnnnnnnnnnnnnnnnnnnnnnnnnnnnnnnnnnnnnnnnnnnnnnnnnnnnnnnnnnnnnnnnnnnnnnnnnnnnnnnnnnnnnnnnnnnnnnnnnnnnnnnnnnnnnnnnnnnnnnnnnnnnnnnnnnnnnnnnnnnnnnnnnnnnnnnnnnnnnnnnnnnnnnnnnnnnnnnnnnnnnnnnnnnnnnnnnnnnnnnnnnnnnnnnnnnnnnnnnnnnnnnnnnnnnnnnnnnnnnnnnnnnnnnnnnnnnnnnnnnnnnnnnnnnnnnnnnnnnnnnnnnnnnnnnnnnnnnnnnnnnnnnnnnnnnnnnnnnnnnnnnnnnnnnnnnnnnnnnnnnnnnnnnnnnnnnnnnnnnnnnnnnnnnnnnnnnnnnnnnnnnnnnnnnnnnnnnnnnnnnnnnnnnnnnnnnnnnnnnnnnnnnnnnnnnnnnnnnnnnnnnnnnnnnnnnnnnnnnnnnnnnnnnnnnnnnnnnnnnnnnnnnnnnnnnnnnnnnnnnnnnnnnnnnnnnnnnnnnnnnnnnnnnnnnnnnnnnnnnnnnnnnnnnnnnnnnnnnnnnnnnnnnnnnnnnnnnnnnnnnnnnnnnnnnnnnnnnnnnnnnnnnnnnnnnnnnnnnnnnnnnnnnnnnnnnnnnnnnnnnnnnnnnnnnnnnnnnnnnnnnnnnnnnnnnnnnnnnnnnnnnnnnnnnnnnnnnnnnnnnnnnnnnnnnnnnnnnnnnnnnnnnnnnnnnnnnnnnnnnnnnnnnnnnnnnnnnnnnnnnnnnnnnnnnnnnnnnnnnnnnnnnnnnnnnnnnnnnnnnnnnnnnnnnnnnnnnnnnnnnnnnnnnnnnnnnnnnnnnnnnnnnnnnnnnnnnnnnnnnnnnnnnnnnnnnnnnnnnnnnnnnnnnnnnnnnnnnnnnnnnnnnnnnnnnnnnnnnnnnnnnnnnnnnnnnnnnnnnnnnnnnnnnnnnnnnnnnnnnnnnnnnnnnnnnnnnnnnnnnnnnnnnnnnnnnnnnnnnnnnnnnnnnnnnnnnnnnnnnnnnnnnnnnnnnnnnnnnnnnnnnnnnnnnnnnnnnnnnnnnnnnnnnnnnnnnnnnnnnnnnnnnnnnnnnnnnnnnnnnnnnnnnnnnnnnnnnnnnnnnnnnnnnnnnnnnnnnnnnnnnnnnnnnnnnnnnnnnnnnnnnnnnnnnnnnnnnnnnnnnnnnnnnnnnnnnnnnnnnnnnnnnnnnnnnnnnnnnnnnnnnnnnnnnnnnnnnnnnnnnnnnnnnnnnnnnnnnnnnnnnnnnnnnnnnnnnnnnnnnnnnnnnnnnnnnnnnnnnnnnnnnnnnnnnnnnnnnnnnnnnnnnnnnnnnnnnnnnnnnnnnnnnnnnnnnnnnnnnnnnnnnnnnnnnnnnnnnnnnnnnnnnnnnnnnnnnnnnnnnnnnnnnnnnnnnnnnnnnnnnnnnnnnnnnnnnnnnnnnnnnnnnnnnnnnnnnnnnnnnnnnnnnnnnnnnnnnnnnnnnnnnnnnnnnnnnnnnnnnnnnnnnnnnnnnnnnnnnnnnnnnnnnnnnnnnnnnnnnnnnnnnnnnnnnnnnnnnnnnnnnnnnnnnnnnnnnnnnnnnnnnnnnnnnnnnnnnnnnnnnnnnnnnnnnnnnnnnnnnnnnnnnnnnnnnnnnnnnnnnnnnnnnnnnnnnnnnnnnnnnnnnnnnnnnnnnnnnnnnnnnnnnnnnnnnnnnnnnnnnnnnnnnnnnnnnnnnnnnnnnnnnnnnnnnnnnnnnnnnnnnnnnnnnnnnnnnnnnnnnnnnnnnnnnnnnnnnnnnnnnnnnnnnnnnnnnnnnnnnnnnnnnnnnnnnnnnnnnnnnnnnnnnnnnnnnnnnnnnnnnnnnnnnnnnnnnnnnnnnnnnnnnnnnnnnnnnnnnnnnnnnnnnnnnnnnnnnnnnnnnnnnnnnnnnnnnnnnnnnnnnnnnnnnnnnnnnnnnnnnnnnnnnnnnnnnnnnnnnnnnnnnnnnnnnnnnnnnnnnnnnnnnnnnnnnnnnnnnnnnnnnnnnnnnnnnnnnnnnnnnnnnnnnnnnnnnnnnnnnnnnnnnnnnnnnnnnnnnnnnnnnnnnnnnnnnnnnnnnnnnnnnnnnnnnnnnnnnnnnnnnnnnnnnnnnnnnnnnnnnnnnnnnnnnnnnnnnnnnnnnnnnnnnnnnnnnnnnnnnnnnnnnnnnnnnnnnnnnnnnnnnnnnnnnnnnnnnnnnnnnnnnnnnnnnnnnnnnnnnnnnnnnnnnnnnnnnnnnnnnnnnnnnnnnnnnnnnnnnnnnnnnnnnnnnnnnnnnnnnnnnnnnnnnnnnnnnnnnnnnnnnnnnnnnnnnnnnnnnnnnnnnnnnnnnnnnnnnnnnnnnnnnnnnnnnnnnnnnnnnnnnnnnnnnnnnnnnnnnnnnnnnnnnnnnnnnnnnnnnnnnnnnnnnnnnnnnnnnnnnnnnnnnnnnnnnnnnnnnnnnnnnnnnnnnnnnnnnnnnnnnnnnnnnnnnnnnnnnnnnnnnnnnnnnnnnnnnnnnnnnnnnnnnnnnnnnnnnnnnnnnnnnnnnnnnnnnnnnnnnnnnnnnnnnnnnnnnnnnnnnnnnnnnnnnnnnnnnnnnnnnnnnnnnnnnnnnnnnnnnnnnnnnnnnnnnnnnnnnnnnnnnnnnnnnnnnnnnnnnnnnnnnnnnnnnnnnnnnnnnnnnnnnnnnnnnnnnnnnnnnnnnnnnnnnnnnnnnnnnnnnnnnnnnnnnnnnnnnnnnnnnnnnnnnnnnnnnnnnnnnnnnnnnnnnnnnnnnnnnnnnnnnnnnnnnnnnnnnnnnnnnnnnnnnnnnnnnnnnnnnnnnnnnnnnnnnnnnnnnnnnnnnnnnnnnnnnnnnnnnnnnnnnnnnnnnnnnnnnnnnnnnnnnnnnnnnnnnnnnnnnnnnnnnnnnnnnnnnnnnnnnnnnnnnnnnnnnnnnnnnnnnnnnnnnnnnnnnnnnnnnnnnnnnnnnnnnnnnnnnnnnnnnnnnnnnnnnnnnnnnnnnnnnnnnnnnnnnnnnnnnnnnnnnnnnnnnnnnnnnnnnnnnnnnnnnnnnnnnnnnnnnnnnnnnnnnnnnnnnnnnnnnnnnnnnnnnnnnnnnnnnnnnnnnnnnnnnnnnnnnnnnnnnnnnnnnnnnnnnnnnnnnnnnnnnnnnnnnnnnnnnnnnnnnnnnnnnnnnnnnnnnnnnnnnnnnnnnnnnnnnnnnnnnnnnnnnnnnnnnnnnnnnnnnnnnnnnnnnnnnnnnnnnnnnnnnnnnnnnnnnnnnnnnnnnnnnnnnnnnnnnnnnnnnnnnnnnnnnnnnnnnnnnnnnnnnnnnnnnnnnnnnnnnnnnnnnnnnnnnnnnnnnnnnnnnnnnnnnnnnnnnnnnnnnnnnnnnnnnnnnnnnnnnnnnnnnnnnnnnnnnnnnnnnnnnnnnnnnnnnnnnnnnnnnnnnnnnnnnnnnnnnnnnnnnnnnnnnnnnnnnnnnnnnnnnnnnnnnnnnnnnnnnnnnnnnnnnnnnnnnnnnnnnnnnnnnnnnnnnnnnnnnnnnnnnnnnnnnnnnnnnnnnnnnnnnnnnnnnnnnnnnnnnnnnnnnnnnnnnnnnnnnnnnnnnnnnnnnnnnnnnnnnnnnnnnnnnnnnnnnnnnnnnnnnnnnnnnnnnnnnnnnnnnnnnnnnnnnnnnnnnnnnnnnnnnnnnnnnnnnnnnnnnnnnnnnnnnnnnnnnnnnnnnnnnnnnnnnnnnnnnnnnnnnnnnnnnnnnnnnnnnnnnnnnnnnnnnnnnnnnnnnnnnnnnnnnnnnnnnnnnnnnnnnnnnnnnnnnnnnnnnnnnnnnnnnnnnnnnnnnnnnnnnnnnnnnnnnnnnnnnnnnnnnnnnnnnnnnnnnnnnnnnnnnnnnnnnnnnnnnnnnnnnnnnnnnnnnnnnnnnnnnnnnnnnnnnnnnnnnnnnnnnnnnnnnnnnnnnnnnnnnnnnnnnnnnnnnnnnnnnnnnnnnnnnnnnnnnnnnnnnnnnnnnnnnnnnnnnnnnnnnnnnnnnnnnnnnnnnnnnnnnnnnnnnnnnnnnnnnnnnnnnnnnnnnnnnnnnnnnnnnnnnnnnnnnnnnnnnnnnnnnnnnnnnnnnnnnnnnnnnnnnnnnnnnnnnnnnnnnnnnnnnnnnnnnnnnnnnnnnnnnnnnnnnnnnnnnnnnnnnnnnnnnnnnnnnnnnnnnnnnnnnnnnnnnnnnnnnnnnnnnnnnnnnnnnnnnnnnnnnnnnnnnnnnnnnnnnnnnnnnnnnnnnnnnnnnnnnnnnnnnnnnnnnnnnnnnnnnnnnnnnnnnnnnnnnnnnnnnnnnnnnnnnnnnnnnnnnnnnnnnnnnnnnnnnnnnnnnnnnnnnnnnnnnnnnnnnnnnnnnnnnnnnnnnnnnnnnnnnnnnnnnnnnnnnnnnnnnnnnnnnnnnnnnnnnnnnnnnnnnnnnnnnnnnnnnnnnnnnnnnnnnnnnnnnnnnnnnnnnnnnnnnnnnnnnnnnnnnnnnnnnnnnnnnnnnnnnnnnnnnnnnnnnnnnnnnnnnnnnnnnnnnnnnnnnnnnnnnnnnnnnnnnnnnnnnnnnnnnnnnnnnnnnnnnnnnnnnnnnnnnnnnnnnnnnnnnnnnnnnnnnnnnnnnnnnnnnnnnnnnnnnnnnnnnnnnnnnnnnnnnnnnnnnnnnnnnnnnnnnnnnnnnnnnnnnnnnnnnnnnnnnnnnnnnnnnnnnnnnnnnnnnnnnnnnnnnnnnnnnnnnnnnnnnnnnnnnnnnnnnnnnnnnnnnnnnnnnnnnnnnnnnnnnnnnnnnnnnnnnnnnnnnnnnnnnnnnnnnnnnnnnnnnnnnnnnnnnnnnnnnnnnnnnnnnnnnnnnnnnnnnnnnnnnnnnnnnnnnnnnnnnnnnnnnnnnnnnnnnnnnnnnnnnnnnnnnnnnnnnnnnnnnnnnnnnnnnnnnnnnnnnnnnnnnnnnnnnnnnnnnnnnnnnnnnnnnnnnnnnnnnnnnnnnnnnnnnnnnnnnnnnnnnnnnnnnnnnnnnnnnnnnnnnnnnnnnnnnnnnnnnnnnnnnnnnnnnnnnnnnnnnnnnnnnnnnnnnnnnnnnnnnnnnnnnnnnnnnnnnnnnnnnnnnnnnnnnnnnnnnnnnnnnnnnnnnnnnnnnnnnnnnnnnnnnnnnnnnnnnnnnnnnnnnnnnnnnnnnnnnnnnnnnnnnnnnnnnnnnnnnnnnnnnnnnnnnnnnnnnnnnnnnnnnnnnnnnnnnnnnnnnnnnnnnnnnnnnnnnnnnnnnnnnnnnnnnnnnnnnnnnnnnnnnnnnnnnnnnnnnnnnnnnnnnnnnnnnnnnnnnnnnnnnnnnnnnnnnnnnnnnnnnnnnnnnnnnnnnnnnnnnnnnnnnnnnnnnnnnnnnnnnnnnnnnnnnnnnnnnnnnnnnnnnnnnnnnnnnnnnnnnnnnnnnnnnnnnnnnnnnnnnnnnnnnnnnnnnnnnnnnnnnnnnnnnnnnnnnnnnnnnnnnnnnnnnnnnnnnnnnnnnnnnnnnnnnnnnnnnnnnnnnnnnnnnnnnnnnnnnnnnnnnnnnnnnnnnnnnnnnnnnnnnnnnnnnnnnnnnnnnnnnnnnnnnnnnnnnnnnnnnnnnnnnnnnnnnnnnnnnnnnnnnnnnnnnnnnnnnnnnnnnnnnnnnnnnnnnnnnnnnnnnnnnnnnnnnnnnnnnnnnnnnnnnnnnnnnnnnnnnnnnnnnnnnnnnnnnnnnnnnnnnnnnnnnnnnnnnnnnnnnnnnnnnnnnnnnnnnnnnnnnnnnnnnnnnnnnnnnnnnnnnnnnnnnnnnnnnnnnnnnnnnnnnnnnnnnnnnnnnnnnnnnnnnnnnnnnnnnnnnnnnnnnnnnnnnnnnnnnnnnnnnnnnnnnnnnnnnnnnnnnnnnnnnnnnnnnnnnnnnnnnnnnnnnnnnnnnnnnnnnnnnnnnnnnnnnnnnnnnnnnnnnnnnnnnnnnnnnnnnnnnnnnnnnnnnnnnnnnnnnnnnnnnnnnnnnnnnnnnnnnnnnnnnnnnnnnnnnnnnnnnnnnnnnnnnnnnnnnnnnnnnnnnnnnnnnnnnnnnnnnnnnnnnnnnnnnnnnnnnnnnnnnnnnnnnnnnnnnnnnnnnnnnnnnnnnnnnnnnnnnnnnnnnnnnnnnnnnnnnnnnnnnnnnnnnnnnnnnnnnnnnnnnnnnnnnnnnnnnnnnnnnnnnnnnnnnnnnnnnnnnnnnnnnnnnnnnnnnnnnnnnnnnnnnnnnnnnnnnnnnnnnnnnnnnnnnnnnnnnnnnnnnnnnnnnnnnnnnnnnnnnnnnnnnnnnnnnnnnnnnnnnnnnnnnnnnnnnnnnnnnnnnnnnnnnnnnnnnnnnnnnnnnnnnnnnnnnnnnnnnnnnnnnnnnnnnnnnnnnnnnnnnnnnnnnnnnnnnnnnnnnnnnnnnnnnnnnnnnnnnnnnnnnnnnnnnnnnnnnnnnnnnnnnnnnnnnnnnnnnnnnnnnnnnnnnnnnnnnnnnnnnnnnnnnnnnnnnnnnnnnnnnnnnnnnnnnnnnnnnnnnnnnnnnnnnnnnnnnnnnnnnnnnnnnnnnnnnnnnnnnnnnnnnnnnnnnnnnnnnnnnnnnnnnnnnnnnnnnnnnnnnnnnnnnnnnnnnnnnnnnnnnnnnnnnnnnnnnnnnnnnnnnnnnnnnnnnnnnnnnnnnnnnnnnnnnnnnnnnnnnnnnnnnnnnnnnnnnnnnnnnnnnnnnnnnnnnnnnnnnnnnnnnnnnnnnnnnnnnnnnnnnnnnnnnnnnnnnnnnnnnnnnnnnnnnnnnnnnnnnnnnnnnnnnnnnnnnnnnnnnnnnnnnnnnnnnnnnnnnnnnnnnnnnnnnnnnnnnnnnnnnnnnnnnnnnnnnnnnnnnnnnnnnnnnnnnnnnnnnnnnnnnnnnnnnnnnnnnnnnnnnnnnnnnnnnnnnnnnnnnnnnnnnnnnnnnnnnnnnnnnnnnnnnnnnnnnnnnnnnnnnnnnnnnnnnnnnnnnnnnnnnnnnnnnnnnnnnnnnnnnnnnnnnnnnnnnnnnnnnnnnnnnnnnnnnnnnnnnnnnnnnnnnnnnnnnnnnnnnnnnnnnnnnnnnnnnnnnnnnnnnnnnnnnnnnnnnnnnnnnnnnnnnnnnnnnnnnnnnnnnnnnnnnnnnnnnnnnnnnnnnnnnnnnnnnnnnnnnnnnnnnnnnnnnnnnnnnnnnnnnnnnnnnnnnnnnnnnnnnnnnnnnnnnnnnnnnnnnnnnnnnnnnnnnnnnnnnnnnnnnnnnnnnnnnnnnnnnnnnnnnnnnnnnnnnnnnnnnnnnnnnnnnnnnnnnnnnnnnnnnnnnnnnnnnnnnnnnnnnnnnnnnnnnnnnnnnnnnnnnnnnnnnnnnnnnnnnnnnnnnnnnnnnnnnnnnnnnnnnnnnnnnnnnnnnnnnnnnnnnnnnnnnnnnnnnnnnnnnnnnnnnnnnnnnnnnnnnnnnnnnnnnnnnnnnnnnnnnnnnnnnnnnnnnnnnnnnnnnnnnnnnnnnnnnnnnnnnnnnnnnnnnnnnnnnnnnnnnnnnnnnnnnnnnnnnnnnnnnnnnnnnnnnnnnnnnnnnnnnnnnnnnnnnnnnnnnnnnnnnnnnnnnnnnnnnnnnnnnnnnnnnnnnnnnnnnnnnnnnnnnnnnnnnnnnnnnnnnnnnnnnnnnnnnnnnnnnnnnnnnnnnnnnnnnnnnnnnnnnnnnnnnnnnnnnnnnnnnnnnnnnnnnnnnnnnnnnnnnnnnnnnnnnnnnnnnnnnnnnnnnnnnnnnnnnnnnnnnnnnnnnnnnnnnnnnnnnnnnnnnnnnnnnnnnnnnnnnnnnnnnnnnnnnnnnnnnnnnnnnnnnnnnnnnnnnnnnnnnnnnnnnnnnnnnnnnnnnnnnnnnnnnnnnnnnnnnnnnnnnnnnnnnnnnnnnnnnnnnnnnnnnnnnnnnnnnnnnnnnnnnnnnnnnnnnnnnnnnnnnnnnnnnnnnnnnnnnnnnnnnnnnnnnnnnnnnnnnnnnnnnnnnnnnnnnnnnnnnnnnnnnnnnnnnnnnnnnnnnnnnnnnnnnnnnnnnnnnnnnnnnnnnnnnnnnnnnnnnnnnnnnnnnnnnnnnnnnnnnnnnnnnnnnnnnnnnnnnnnnnnnnnnnnnnnnnnnnnnnnnnnnnnnnnnnnnnnnnnnnnnnnnnnnnnnnnnnnnnnnnnnnnnnnnnnnnnnnnnnnnnnnnnnnnnnnnnnnnnnnnnnnnnnnnnnnnnnnnnnnnnnnnnnnnnnnnnnnnnnnnnnnnnnnnnnnnnnnnnnnnnnnnnnnnnnnnnnnnnnnnnnnnnnnnnnnnnnnnnnnnnnnnnnnnnnnnnnnnnnnnnnnnnnnnnnnnnnnnnnnnnnnnnnnnnnnnnnnnnnnnnnnnnnnnnnnnnnnnnnnnnnnnnnnnnnnnnnnnnnnnnnnnnnnnnnnnnnnnnnnnnnnnnnnnnnnnnnnnnnnnnnnnnnnnnnnnnnnnnnnnnnnnnnnnnnnnnnnnnnnnnnnnnnnnnnnnnnnnnnnnnnnnnnnnnnnnnnnnnnnnnnnnnnnnnnnnnnnnnnnnnnnnnnnnnnnnnnnnnnnnnnnnnnnnnnnnnnnnnnnnnnnnnnnnnnnnnnnnnnnnnnnnnnnnnnnnnnnnnnnnnnnnnnnnnnnnnnnnnnnnnnnnnnnnnnnnnnnnnnnnnnnnnnnnnnnnnnnnnnnnnnnnnnnnnnnnnnnnnnnnnnnnnnnnnnnnnnnnnnnnnnnnnnnnnnnnnnnnnnnnnnnnnnnnnnnnnnnnnnnnnnnnnnnnnnnnnnnnnnnnnnnnnnnnnnnnnnnnnnnnnnnnnnnnnnnnnnnnnnnnnnnnnnnnnnnnnnnnnnnnnnnnnnnnnnnnnnnnnnnnnnnnnnnnnnnnnnnnnnnnnnnnnnnnnnnnnnnnnnnnnnnnnnnnnnnnnnnnnnnnnnnnnnnnnnnnnnnnnnnnnnnnnnnnnnnnnnnnnnnnnnnnnnnnnnnnnnnnnnnnnnnnnnnnnnnnnnnnnnnnnnnnnnnnnnnnnnnnnnnnnnnnnnnnnnnnnnnnnnnnnnnnnnnnnnnnnnnnnnnnnnnnnnnnnnnnnnnnnnnnnnnnnnnnnnnnnnnnnnnnnnnnnnnnnnnnnnnnnnnnnnnnnnnnnnnnnnnnnnnnnnnnnnnnnnnnnnnnnnnnnnnnnnnnnnnnnnnnnnnnnnnnnnnnnnnnnnnnnnnnnnnnnnnnnnnnnnnnnnnnnnnnnnnnnnnnnnnnnnnnnnnnnnnnnnnnnnnnnnnnnnnnnnnnnnnnnnnnnnnnnnnnnnnnnnnnnnnnnnnnnnnnnnnnnnnnnnnnnnnnnnnnnnnnnnnnnnnnnnnnnnnnnnnnnnnnnnnnnnnnnnnnnnnnnnnnnnnnnnnnnnnnnnnnnnnnnnnnnnnnnnnnnnnnnnnnnnnnnnnnnnnnnnnnnnnnnnnnnnnnnnnnnnnnnnnnnnnnnnnnnnnnnnnnnnnnnnnnnnnnnnnnnnnnnnnnnnnnnnnnnnnnnnnnnnnnnnnnnnnnnnnnnnnnnnnnnnnnnnnnnnnnnnnnnnnnnnnnnnnnnnnnnnnnnnnnnnnnnnnnnnnnnnnnnnnnnnnnnnnnnnnnnnnnnnnnnnnnnnnnnnnnnnnnnnnnnnnnnnnnnnnnnnnnnnnnnnnnnnnnnnnnnnnnnnnnnnnnnnnnnnnnnnnnnnnnnnnnnnnnnnnnnnnnnnnnnnnnnnnnnnnnnnnnnnnnnnnnnnnnnnnnnnnnnnnnnnnnnnnnnnnnnnnnnnnnnnnnnnnnnnnnnnnnnnnnnnnnnnnnnnnnnnnnnnnnnnnnnnnnnnnnnnnnnnnnnnnnnnnnnnnnnnnnnnnnnnnnnnnnnnnnnnnnnnnnnnnnnnnnnnnnnnnnnnnnnnnnnnnnnnnnnnnnnnnnnnnnnnnnnnnnnnnnnnnnnnnnnnnnnnnnnnnnnnnnnnnnnnnnnnnnnnnnnnnnnnnnnnnnnnnnnnnnnnnnnnnnnnnnnnnnnnnnnnnnnnnnnnnnnnnnnnnnnnnnnnnnnnnnnnnnnnnnnnnnnnnnnnnnnnnnnnnnnnnnnnnnnnnnnnnnnnnnnnnnnnnnnnnnnnnnnnnnnnnnnnnnnnnnnnnnnnnnnnnnnnnnnnnnnnnnnnnnnnnnnnnnnnnnnnnnnnnnnnnnnnnnnnnnnnnnnnnnnnnnnnnnnnnnnnnnnnnnnnnnnnnnnnnnnnnnnnnnnnnnnnnnnnnnnnnnnnnnnnnnnnnnnnnnnnnnnnnnnnnnnnnnnnnnnnnnnnnnnnnnnnnnnnnnnnnnnnnnnnnnnnnnnnnnnnnnnnnnnnnnnnnnnnnnnnnnnnnnnnnnnnnnnnnnnnnnnnnnnnnnnnnnnnnnnnnnnnnnnnnnnnnnnnnnnnnnnnnnnnnnnnnnnnnnnnnnnnnnnnnnnnnnnnnnnnnnnnnnnnnnnnnnnnnnnnnnnnnnnnnnnnnnnnnnnnnnnnnnnnnnnnnnnnnnnnnnnnnnnnnnnnnnnnnnnnnnnnnnnnnnnnnnnnnnnnnnnnnnnnnnnnnnnnnnnnnnnnnnnnnnnnnnnnnnnnnnnnnnnnnnnnnnnnnnnnnnnnnnnnnnnnnnnnnnnnnnnnnnnnnnnnnnnnnnnnnnnnnnnnnnnnnnnnnnnnnnnnnnnnnnnnnnnnnnnnnnnnnnnnnnnnnnnnnnnnnnnnnnnnnnnnnnnnnnnnnnnnnnnnnnnnnnnnnnnnnnnnnnnnnnnnnnnnnnnnnnnnnnnnnnnnnnnnnnnnnnnnnnnnnnnnnnnnnnnnnnnnnnnnnnnnnnnnnnnnnnnnnnnnnnnnnnnnnnnnnnnnnnnnnnnnnnnnnnnnnnnnnnnnnnnnnnnnnnnnnnnnnnnnnnnnnnnnnnnnnnnnnnnnnnnnnnnnnnnnnnnnnnnnnnnnnnnnnnnnnnnnnnnnnnnnnnnnnnnnnnnnnnnnnnnnnnnnnnnnnnnnnnnnnnnnnnnnnnnnnnnnnnnnnnnnnnnnnnnnnnnnnnnnnnnnnnnnnnnnnnnnnnnnnnnnnnnnnnnnnnnnnnnnnnnnnnnnnnnnnnnnnnnnnnnnnnnnnnnnnnnnnnnnnnnnnnnnnnnnnnnnnnnnnnnnnnnnnnnnnnnnnnnnnnnnnnnnnnnnnnnnnnnnnnnnnnnnnnnnnnnnnnnnnnnnnnnnnnnnnnnnnnnnnnnnnnnnnnnnnnnnnnnnnnnnnnnnnnnnnnnnnnnnnnnnnnnnnnnnnnnnnnnnnnnnnnnnnnnnnnnnnnnnnnnnnnnnnnnnnnnnnnnnnnnnnnnnnnnnnnnnnnnnnnnnnnnnnnnnnnnnnnnnnnnnnnnnnnnnnnnnnnnnnnnnnnnnnnnnnnnnnnnnnnnnnnnnnnnnnnnnnnnnnnnnnnnnnnnnnnnnnnnnnnnnnnnnnnnnnnnnnnnnnnnnnnnnnnnnnnnnnnnnnnnnnnnnnnnnnnnnnnnnnnnnnnnnnnnnnnnnnnnnnnnnnnnnnnnnnnnnnnnnnnnnnnnnnnnnnnnnnnnnnnnnnnnnnnnnnnnnnnnnnnnnnnnnnnnnnnnnnnnnnnnnnnnnnnnnnnnnnnnnnnnnnnnnnnnnnnnnnnnnnnnnnnnnnnnnnnnnnnnnnnnnnnnnnnnnnnnnnnnnnnnnnnnnnnnnnnnnnnnnnnnnnnnnnnnnnnnnnnnnnnnnnnnnnnnnnnnnnnnnnnnnnnnnnnnnnnnnnnnnnnnnnnnnnnnnnnnnnnnnnnnnnnnnnnnnnnnnnnnnnnnnnnnnnnnnnnnnnnnnnnnnnnnnnnnnnnnnnnnnnnnnnnnnnnnnnnnnnnnnnnnnnnnnnnnnnnnnnnnnnnnnnnnnnnnnnnnnnnnnnnnnnnnnnnnnnnnnnnnnnnnnnnnnnnnnnnnnnnnnnnnnnnnnnnnnnnnnnnnnnnnnnnnnnnnnnnnnnnnnnnnnnnnnnnnnnnnnnnnnnnnnnnnnnnnnnnnnnnnnnnnnnnnnnnnnnnnnnnnnnnnnnnnnnnnnnnnnnnnnnnnnnnnnnnnnnnnnnnnnnnnnnnnnnnnnnnnnnnnnnnnnnnnnnnnnnnnnnnnnnnnnnnnnnnnnnnnnnnnnnnnnnnnnnnnnnnnnnnnnnnnnnnnnnnnnnnnnnnnnnnnnnnnnnnnnnnnnnnnnnnnnnnnnnnnnnnnnnnnnnnnnnnnnnnnnnnnnnnnnnnnnnnnnnnnnnnnnnnnnnnnnnnnnnnnnnnnnnnnnnnnnnnnnnnnnnnnnnnnnnnnnnnnnnnnnnnnnnnnnnnnnnnnnnnnnnnnnnnnnnnnnnnnnnnnnnnnnnnnnnnnnnnnnnnnnnnnnnnnnnnnnnnnnnnnnnnnnnnnnnnnnnnnnnnnnnnnnnnnnnnnnnnnnnnnnnnnnnnnnnnnnnnnnnnnnnnnnnnnnnnnnnnnnnnnnnnnnnnnnnnnnnnnnnnnnnnnnnnnnnnnnnnnnnnnnnnnnnnnnnnnnnnnnnnnnnnnnnnnnnnnnnnnnnnnnnnnnnnnnnnnnnnnnnnnnnnnnnnnnnnnnnnnnnnnnnnnnnnnnnnnnnnnnnnnnnnnnnnnnnnnnnnnnnnnnnnnnnnnnnnnnnnnnnnnnnnnnnnnnnnnnnnnnnnnnnnnnnnnnnnnnnnnnnnnnnnnnnnnnnnnnnnnnnnnnnnnnnnnnnnnnnnnnnnnnnnnnnnnnnnnnnnnnnnnnnnnnnnnnnnnnnnnnnnnnnnnnnnnnnnnnnnnnnnnnnnnnnnnnnnnnnnnnnnnnnnnnnnnnnnnnnnnnnnnnnnnnnnnnnnnnnnnnnnnnnnnnnnnnnnnnnnnnnnnnnnnnnnnnnnnnnnnnnnnnnnnnnnnnnnnnnnnnnnnnnnnnnnnnnnnnnnnnnnnnnnnnnnnnnnnnnnnnnnnnnnnnnnnnnnnnnnnnnnnnnnnnnnnnnnnnnnnnnnnnnnnnnnnnnnnnnnnnnnnnnnnnnnnnnnnnnnnnnnnnnnnnnnnnnnnnnnnnnnnnnnnnnnnnnnnnnnnnnnnnnnnnnnnnnnnnnnnnnnnnnnnnnnnnnnnnnnnnnnnnnnnnnnnnnnnnnnnnnnnnnnnnnnnnnnnnnnnnnnnnnnnnnnnnnnnnnnnnnnnnnnnnnnnnnnnnnnnnnnnnnnnnnnnnnnnnnnnnnnnnnnnnnnnnnnnnnnnnnnnnnnnnnnnnnnnnnnnnnnnnnnnnnnnnnnnnnnnnnnnnnnnnnnnnnnnnnnnnnnnnnnnnnnnnnnnnnnnnnnnnnnnnnnnnnnnnnnnnnnnnnnnnnnnnnnnnnnnnnnnnnnnnnnnnnnnnnnnnnnnnnnnnnnnnnnnnnnnnnnnnnnnnnnnnnnnnnnnnnnnnnnnnnnnnnnnnnnnnnnnnnnnnnnnnnnnnnnnnnnnnnnnnnnnnnnnnnnnnnnnnnnnnnnnnnnnnnnnnnnnnnnnnnnnnnnnnnnnnnnnnnnnnnnnnnnnnnnnnnnnnnnnnnnnnnnnnnnnnnnnnnnnnnnnnnnnnnnnnnnnnnnnnnnnnnnnnnnnnnnnnnnnnnnnnnnnnnnnnnnnnnnnnnnnnnnnnnnnnnnnnnnnnnnnnnnnnnnnnnnnnnnnnnnnnnnnnnnnnnnnnnnnnnnnnnnnnnnnnnnnnnnnnnnnnnnnnnnnnnnnnnnnnnnnnnnnnnnnnnnnnnnnnnnnnnnnnnnnnnnnnnnnnnnnnnnnnnnnnnnnnnnnnnnnnnnnnnnnnnnnnnnnnnnnnnnnnnnnnnnnnnnnnnnnnnnnnnnnnnnnnnnnnnnnnnnnnnnnnnnnnnnnnnnnnnnnnnnnnnnnnnnnnnnnnnnnnnnnnnnnnnnnnnnnnnnnnnnnnnnnnnnnnnnnnnnnnnnnnnnnnnnnnnnnnnnnnnnnnnnnnnnnnnnnnnnnnnnnnnnnnnnnnnnnnnnnnnnnnnnnnnnnnnnnnnnnnnnnnnnnnnnnnnnnnnnnnnnnnnnnnnnnnnnnnnnnnnnnnnnnnnnnnnnnnnnnnnnnnnnnnnnnnnnnnnnnnnnnnnnnnnnnnnnnnnnnnnnnnnnnnnnnnnnnnnnnnnnnnnnnnnnnnnnnnnnnnnnnnnnnnnnnnnnnnnnnnnnnnnnnnnnnnnnnnnnnnnnnnnnnnnnnnnnnnnnnnnnnnnnnnnnnnnnnnnnnnnnnnnnnnnnnnnnnnnnnnnnnnnnnnnnnnnnnnnnnnnnnnnnnnnnnnnnnnnnnnnnnnnnnnnnnnnnnnnnnnnnnnnnnnnnnnnnnnnnnnnnnnnnnnnnnnnnnnnnnnnnnnnnnnnnnnnnnnnnnnnnnnnnnnnnnnnnnnnnnnnnnnnnnnnnnnnnnnnnnnnnnnnnnnnnnnnnnnnnnnnnnnnnnnnnnnnnnnnnnnnnnnnnnnnnnnnnnnnnnnnnnnnnnnnnnnnnnnnnnnnnnnnnnnnnnnnnnnnnnnnnnnnnnnnnnnnnnnnnnnnnnnnnnnnnnnnnnnnnnnnnnnnnnnnnnnnnnnnnnnnnnnnnnnnnnnnnnnnnnnnnnnnnnnnnnnnnnnnnnnnnnnnnnnnnnnnnnnnnnnnnnnnnnnnnnnnnnnnnnnnnnnnnnnnnnnnnnnnnnnnnnnnnnnnnnnnnnnnnnnnnnnnnnnnnnnnnnnnnnnnnnnnnnnnnnnnnnnnnnnnnnnnnnnnnnnnnnnnnnnnnnnnnnnnnnnnnnnnnnnnnnnnnnnnnnnnnnnnnnnnnnnnnnnnnnnnnnnnnnnnnnnnnnnnnnnnnnnnnnnnnnnnnnnnnnnnnnnnnnnnnnnnnnnnnnnnnnnnnnnnnnnnnnnnnnnnnnnnnnnnnnnnnnnnnnnnnnnnnnnnnnnnnnnnnnnnnnnnnnnnnnnnnnnnnnnnnnnnnnnnnnnnnnnnnnnnnnnnnnnnnnnnnnnnnnnnnnnnnnnnnnnnnnnnnnnnnnnnnnnnnnnnnnnnnnnnnnnnnnnnnnnnnnnnnnnnnnnnnnnnnnnnnnnnnnnnnnnnnnnnnnnnnnnnnnnnnnnnnnnnnnnnnnnnnnnnnnnnnnnnnnnnnnnnnnnnnnnnnnnnnnnnnnnnnnnnnnnnnnnnnnnnnnnnnnnnnnnnnnnnnnnnnnnnnnnnnnnnnnnnnnnnnnnnnnnnnnnnnnnnnnnnnnnnnnnnnnnnnnnnnnnnnnnnnnnnnnnnnnnnnnnnnnnnnnnnnnnnnnnnnnnnnnnnnnnnnnnnnnnnnnnnnnnnnnnnnnnnnnnnnnnnnnnnnnnnnnnnnnnnnnnnnnnnnnnnnnnnnnnnnnnnnnnnnnnnnnnnnnnnnnnnnnnnnnnnnnnnnnnnnnnnnnnnnnnnnnnnnnnnnnnnnnnnnnnnnnnnnnnnnnnnnnnnnnnnnnnnnnnnnnnnnnnnnnnnnnnnnnnnnnnnnnnnnnnnnnnnnnnnnnnnnnnnnnnnnnnnnnnnnnnnnnnnnnnnnnnnnnnnnnnnnnnnnnnnnnnnnnnnnnnnnnnnnnnnnnnnnnnnnnnnnnnnnnnnnnnnnnnnnnnnnnnnnnnnnnnnnnnnnnnnnnnnnnnnnnnnnnnnnnnnnnnnnnnnnnnnnnnnnnnnnnnnnnnnnnnnnnnnnnnnnnnnnnnnnnnnnnnnnnnnnnnnnnnnnnnnnnnnnnnnnnnnnnnnnnnnnnnnnnnnnnnnnnnnnnnnnnnnnnnnnnnnnnnnnnnnnnnnnnnnnnnnnnnnnnnnnnnnnnnnnnnnnnnnnnnnnnnnnnnnnnnnnnnnnnnnnnnnnnnnnnnnnnnnnnnnnnnnnnnnnnnnnnnnnnnnnnnnnnnnnnnnnnnnnnnnnnnnnnnnnnnnnnnnnnnnnnnnnnnnnnnnnnnnnnnnnnnnnnnnnnnnnnnnnnnnnnnnnnnnnnnnnnnnnnnnnnnnnnnnnnnnnnnnnnnnnnnnnnnnnnnnnnnnnnnnnnnnnnnnnnnnnnnnnnnnnnnnnnnnnnnnnnnnnnnnnnnnnnnnnnnnnnnnnnnnnnnnnnnnnnnnnnnnnnnnnnnnnnnnnnnnnnnnnnnnnnnnnnnnnnnnnnnnnnnnnnnnnnnnnnnnnnnnnnnnnnnnnnnnnnnnnnnnnnnnnnnnnnnnnnnnnnnnnnnnnnnnnnnnnnnnnnnnnnnnnnnnnnnnnnnnnnnnnnnnnnnnnnnnnnnnnnnnnnnnnnnnnnnnnnnnnnnnnnnnnnnnnnnnnnnnnnnnnnnnnnnnnnnnnnnnnnnnnnnnnnnnnnnnnnnnnnnnnnnnnnnnnnnnnnnnnnnnnnnnnnnnnnnnnnnnnnnnnnnnnnnnnnnnnnnnnnnnnnnnnnnnnnnnnnnnnnnnnnnnnnnnnnnnnnnnnnnnnnnnnnnnnnnnnnnnnnnnnnnnnnnnnnnnnnnnnnnnnnnnnnnnnnnnnnnnnnnnnnnnnnnnnnnnnnnnnnnnnnnnnnnnnnnnnnnnnnnnnnnnnnnnnnnnnnnnnnnnnnnnnnnnnnnnnnnnnnnnnnnnnnnnnnnnnnnnnnnnnnnnnnnnnnnnnnnnnnnnnnnnnnnnnnnnnnnnnnnnnnnnnnnnnnnnnnnnnnnnnnnnnnnnnnnnnnnnnnnnnnnnnnnnnnnnnnnnnnnnnnnnnnnnnnnnnnnnnnnnnnnnnnnnnnnnnnnnnnnnnnnnnnnnnnnnnnnnnnnnnnnnnnnnnnnnnnnnnnnnnnnnnnnnnnnnnnnnnnnnnnnnnnnnnnnnnnnnnnnnnnnnnnnnnnnnnnnnnnnnnnnnnnnnnnnnnnnnnnnnnnnnnnnnnnnnnnnnnnnnnnnnnnnnnnnnnnnnnnnnnnnnnnnnnnnnnnnnnnnnnnnnnnnnnnnnnnnnnnnnnnnnnnnnnnnnnnnnnnnnnnnnnnnnnnnnnnnnnnnnnnnnnnnnnnnnnnnnnnnnnnnnnnnnnnnnnnnnnnnnnnnnnnnnnnnnnnnnnnnnnnnnnnnnnnnnnnnnnnnnnnnnnnnnnnnnnnnnnnnnnnnnnnnnnnnnnnnnnnnnnnnnnnnnnnnnnnnnnnnnnnnnnnnnnnnnnnnnnnnnnnnnnnnnnnnnnnnnnnnnnnnnnnnnnnnnnnnnnnnnnnnnnnnnnnnnnnnnnnnnnnnnnnnnnnnnnnnnnnnnnnnnnnnnnnnnnnnnnnnnnnnnnnnnnnnnnnnnnnnnnnnnnnnnnnnnnnnnnnnnnnnnnnnnnnnnnnnnnnnnnnnnnnnnnnnnnnnnnnnnnnnnnnnnnnnnnnnnnnnnnnnnnnnnnnnnnnnnnnnnnnnnnnnnnnnnnnnnnnnnnnnnnnnnnnnnnnnnnnnnnnnnnnnnnnnnnnnnnnnnnnnnnnnnnnnnnnnnnnnnnnnnnnnnnnnnnnnnnnnnnnnnnnnnnnnnnnnnnnnnnnnnnnnnnnnnnnnnnnnnnnnnnnnnnnnnnnnnnnnnnnnnnnnnnnnnnnnnnnnnnnnnnnnnnnnnnnnnnnnnnnnnnnnnnnnnnnnnnnnnnnnnnnnnnnnnnnnnnnnnnnnnnnnnnnnnnnnnnnnnnnnnnnnnnnnnnnnnnnnnnnnnnnnnnnnnnnnnnnnnnnnnnnnnnnnnnnnnnnnnnnnnnnnnnnnnnnnnnnnnnnnnnnnnnnnnnnnnnnnnnnnnnnnnnnnnnnnnnnnnnnnnnnnnnnnnnnnnnnnnnnnnnnnnnnnnnnnnnnnnnnnnnnnnnnnnnnnnnnnnnnnnnnnnnnnnnnnnnnnnnnnnnnnnnnnnnnnnnnnnnnnnnnnnnnnnnnnnnnnnnnnnnnnnnnnnnnnnnnnnnnnnnnnnnnnnnnnnnnnnnnnnnnnnnnnnnnnnnnnnnnnnnnnnnnnnnnnnnnnnnnnnnnnnnnnnnnnnnnnnnnnnnnnnnnnnnnnnnnnnnnnnnnnnnnnnnnnnnnnnnnnnnnnnnnnnnnnnnnnnnnnnnnnnnnnnnnnnnnnnnnnnnnnnnnnnnnnnnnnnnnnnnnnnnnnnnnnnnnnnnnnnnnnnnnnnnnnnnnnnnnnnnnnnnnnnnnnnnnnnnnnnnnnnnnnnnnnnnnnnnnnnnnnnnnnnnnnnnnnnnnnnnnnnnnnnnnnnnnnnnnnnnnnnnnnnnnnnnnnnnnnnnnnnnnnnnnnnnnnnnnnnnnnnnnnnnnnnnnnnnnnnnnnnnnnnnnnnnnnnnnnnnnnnnnnnnnnnnnnnnnnnnnnnnnnnnnnnnnnnnnnnnnnnnnnnnnnnnnnnnnnnnnnnnnnnnnnnnnnnnnnnnnnnnnnnnnnnnnnnnnnnnnnnnnnnnnnnnnnnnnnnnnnnnnnnnnnnnnnnnnnnnnnnnnnnnnnnnnnnnnnnnnnnnnnnnnnnnnnnnnnnnnnnnnnnnnnnnnnnnnnnnnnnnnnnnnnnnnnnnnnnnnnnnnnnnnnnnnnnnnnnnnnnnnnnnnnnnnnnnnnnnnnnnnnnnnnnnnnnnnnnnnnnnnnnnnnnnnnnnnnnnnnnnnnnnnnnnnnnnnnnnnnnnnnnnnnnnnnnnnnnnnnnnnnnnnnnnnnnnnnnnnnnnnnnnnnnnnnnnnnnnnnnnnnnnnnnnnnnnnnnnnnnnnnnnnnnnnnnnnnnnnnnnnnnnnnnnnnnnnnnnnnnnnnnnnnnnnnnnnnnnnnnnnnnnnnnnnnnnnnnnnnnnnnnnnnnnnnnnnnnnnnnnnnnnnnnnnnnnnnnnnnnnnnnnnnnnnnnnnnnnnnnnnnnnnnnnnnnnnnnnnnnnnnnnnnnnnnnnnnnnnnnnnnnnnnnnnnnnnnnnnnnnnnnnnnnnnnnnnnnnnnnnnnnnnnnnnnnnnnnnnnnnnnnnnnnnnnnnnnnnnnnnnnnnnnnnnnnnnnnnnnnnnnnnnnnnnnnnnnnnnnnnnnnnnnnnnnnnnnnnnnnnnnnnnnnnnnnnnnnnnnnnnnnnnnnnnnnnnnnnnnnnnnnnnnnnnnnnnnnnnnnnnnnnnnnnnnnnnnnnnnnnnnnnnnnnnnnnnnnnnnnnnnnnnnnnnnnnnnnnnnnnnnnnnnnnnnnnnnnnnnnnnnnnnnnnnnnnnnnnnnnnnnnnnnnnnnnnnnnnnnnnnnnnnnnnnnnnnnnnnnnnnnnnnnnnnnnnnnnnnnnnnnnnnnnnnnnnnnnnnnnnnnnnnnnnnnnnnnnnnnnnnnnnnnnnnnnnnnnnnnnnnnnnnnnnnnnnnnnnnnnnnnnnnnnnnnnnnnnnnnnnnnnnnnnnnnnnnnnnnnnnnnnnnnnnnnnnnnnnnnnnnnnnnnnnnnnnnnnnnnnnnnnnnnnnnnnnnnnnnnnnnnnnnnnnnnnnnnnnnnnnnnnnnnnnnnnnnnnnnnnnnnnnnnnnnnnnnnnnnnnnnnnnnnnnnnnnnnnnnnnnnnnnnnnnnnnnnnnnnnnnnnnnnnnnnnnnnnnnnnnnnnnnnnnnnnnnnnnnnnnnnnnnnnnnnnnnnnnnnnnnnnnnnnnnnnnnnnnnnnnnnnnnnnnnnnnnnnnnnnnnnnnnnnnnnnnnnnnnnnnnnnnnnnnnnnnnnnnnnnnnnnnnnnnnnnnnnnnnnnnnnnnnnnnnnnnnnnnnnnnnnnnnnnnnnnnnnnnnnnnnnnnnnnnnnnnnnnnnnnnnnnnnnnnnnnnnnnnnnnnnnnnnnnnnnnnnnnnnnnnnnnnnnnnnnnnnnnnnnnnnnnnnnnnnnnnnnnnnnnnnnnnnnnnnnnnnnnnnnnnnnnnnnnnnnnnnnnnnnnnnnnnnnnnnnnnnnnnnnnnnnnnnnnnnnnnnnnnnnnnnnnnnnnnnnnnnnnnnnnnnnnnnnnnnnnnnnnnnnnnnnnnnnnnnnnnnnnnnnnnnnnnnnnnnnnnnnnnnnnnnnnnnnnnnnnnnnnnnnnnnnnnnnnnnnnnnnnnnnnnnnnnnnnnnnnnnnnnnnnnnnnnnnnnnnnnnnnnnnnnnnnnnnnnnnnnnnnnnnnnnnnnnnnnnnnnnnnnnnnnnnnnnnnnnnnnnnnnnnnnnnnnnnnnnnnnnnnnnnnnnnnnnnnnnnnnnnnnnnnnnnnnnnnnnnnnnnnnnnnnnnnnnnnnnnnnnnnnnnnnnnnnnnnnnnnnnnnnnnnnnnnnnnnnnnnnnnnnnnnnnnnnnnnnnnnnnnnnnnnnnnnnnnnnnnnnnnnnnnnnnnnnnnnnnnnnnnnnnnnnnnnnnnnnnnnnnnnnnnnnnnnnnnnnnnnnnnnnnnnnnnnnnnnnnnnnnnnnnnnnnnnnnnnnnnnnnnnnnnnnnnnnnnnnnnnnnnnnnnnnnnnnnnnnnnnnnnnnnnnnnnnnnnnnnnnnnnnnnnnnnnnnnnnnnnnnnnnnnnnnnnnnnnnnnnnnnnnnnnnnnnnnnnnnnnnnnnnnnnnnnnnnnnnnnnnnnnnnnnnnnnnnnnnnnnnnnnnnnnnnnnnnnnnnnnnnnnnnnnnnnnnnnnnnnnnnnnnnnnnnnnnnnnnnnnnnnnnnnnnnnnnnnnnnnnnnnnnnnnnnnnnnnnnnnnnnnnnnnnnnnnnnnnnnnnnnnnnnnnnnnnnnnnnnnnnnnnnnnnnnnnnnnnnnnnnnnnnnnnnnnnnnnnnnnnnnnnnnnnnnnnnnnnnnnnnnnnnnnnnnnnnnnnnnnnnnnnnnnnnnnnnnnnnnnnnnnnnnnnnnnnnnnnnnnnnnnnnnnnnnnnnnnnnnnnnnnnnnnnnnnnnnnnnnnnnnnnnnnnnnnnnnnnnnnnnnnnnnnnnnnnnnnnnnnnnnnnnnnnnnnnnnnnnnnnnnnnnnnnnnnnnnnnnnnnnnnnnnnnnnnnnnnnnnnnnnnnnnnnnnnnnnnnnnnnnnnnnnnnnnnnnnnnnnnnnnnnnnnnnnnnnnnnnnnnnnnnnnnnnnnnnnnnnnnnnnnnnnnnnnnnnnnnnnnnnnnnnnnnnnnnnnnnnnnnnnnnnnnnnnnnnnnnnnnnnnnnnnnnnnnnnnnnnnnnnnnnnnnnnnnnnnnnnnnnnnnnnnnnnnnnnnnnnnnnnnnnnnnnnnnnnnnnnnnnnnnnnnnnnnnnnnnnnnnnnnnnnnnnnnnnnnnnnnnnnnnnnnnnnnnnnnnnnnnnnnnnnnnnnnnnnnnnnnnnnnnnnnnnnnnnnnnnnnnnnnnnnnnnnnnnnnnnnnnnnnnnnnnnnnnnnnnnnnnnnnnnnnnnnnnnnnnnnnnnnnnnnnnnnnnnnnnnnnnnnnnnnnnnnnnnnnnnnnnnnnnnnnnnnnnnnnnnnnnnnnnnnnnnnnnnnnnnnnnnnnnnnnnnnnnnnnnnnnnnnnnnnnnnnnnnnnnnnnnnnnnnnnnnnnnnnnnnnnnnnnnnnnnnnnnnnnnnnnnnnnnnnnnnnnnnnnnnnnnnnnnnnnnnnnnnnnnnnnnnnnnnnnnnnnnnnnnnnnnnnnnnnnnnnnnnnnnnnnnnnnnnnnnnnnnnnnnnnnnnnnnnnnnnnnnnnnnnnnnnnnnnnnnnnnnnnnnnnnnnnnnnnnnnnnnnnnnnnnnnnnnnnnnnnnnnnnnnnnnnnnnnnnnnnnnnnnnnnnnnnnnnnnnnnnnnnnnnnnnnnnnnnnnnnnnnnnnnnnnnnnnnnnnnnnnnnnnnnnnnnnnnnnnnnnnnnnnnnnnnnnnnnnnnnnnnnnnnnnnnnnnnnnnnnnnnnnnnnnnnnnnnnnnnnnnnnnnnnnnnnnnnnnnnnnnnnnnnnnnnnnnnnnnnnnnnnnnnnnnnnnnnnnnnnnnnnnnnnnnnnnnnnnnnnnnnnnnnnnnnnnnnnnnnnnnnnnnnnnnnnnnnnnnnnnnnnnnnnnnnnnnnnnnnnnnnnnnnnnnnnnnnnnnnnnnnnnnnnnnnnnnnnnnnnnnnnnnnnnnnnnnnnnnnnnnnnnnnnnnnnnnnnnnnnnnnnnnnnnnnnnnnnnnnnnnnnnnnnnnnnnnnnnnnnnnnnnnnnnnnnnnnnnnnnnnnnnnnnnnnnnnnnnnnnnnnnnnnnnnnnnnnnnnnnnnnnnnnnnnnnnnnnnnnnnnnnnnnnnnnnnnnnnnnnnnnnnnnnnnnnnnnnnnnnnnnnnnnnnnnnnnnnnnnnnnnnnnnnnnnnnnnnnnnnnnnnnnnnnnnnnnnnnnnnnnnnnnnnnnnnnnnnnnnnnnnnnnnnnnnnnnnnnnnnnnnnnnnnnnnnnnnnnnnnnnnnnnnnnnnnnnnnnnnnnnnnnnnnnnnnnnnnnnnnnnnnnnnnnnnnnnnnnnnnnnnnnnnnnnnnnnnnnnnnnnnnnnnnnnnnnnnnnnnnnnnnnnnnnnnnnnnnnnnnnnnnnnnnnnnnnnnnnnnnnnnnnnnnnnnnnnnnnnnnnnnnnnnnnnnnnnnnnnnnnnnnnnnnnnnnnnnnnnnnnnnnnnnnnnnnnnnnnnnnnnnnnnnnnnnnnnnnnnnnnnnnnnnnnnnnnnnnnnnnnnnnnnnnnnnnnnnnnnnnnnnnnnnnnnnnnnnnnnnnnnnnnnnnnnnnnnnnnnnnnnnnnnnnnnnnnnnnnnnnnnnnnnnnnnnnnnnnnnnnnnnnnnnnnnnnnnnnnnnnnnnnnnnnnnnnnnnnnnnnnnnnnnnnnnnnnnnnnnnnnnnnnnnnnnnnnnnnnnnnnnnnnnnnnnnnnnnnnnnnnnnnnnnnnnnnnnnnnnnnnnnnnnnnnnnnnnnnnnnnnnnnnnnnnnnnnnnnnnnnnnnnnnnnnnnnnnnnnnnnnnnnnnnnnnnnnnnnnnnnnnnnnnnnnnnnnnnnnnnnnnnnnnnnnnnnnnnnnnnnnnnnnnnnnnnnnnnnnnnnnnnnnnnnnnnnnnnnnnnnnnnnnnnnnnnnnnnnnnnnnnnnnnnnnnnnnnnnnnnnnnnnnnnnnnnnnnnnnnnnnnnnnnnnnnnnnnnnnnnnnnnnnnnnnnnnnnnnnnnnnnnnnnnnnnnnnnnnnnnnnnnnnnnnnnnnnnnnnnnnnnnnnnnnnnnnnnnnnnnnnnnnnnnnnnnnnnnnnnnnnnnnnnnnnnnnnnnnnnnnnnnnnnnnnnnnnnnnnnnnnnnnnnnnnnnnnnnnnnnnnnnnnnnnnnnnnnnnnnnnnnnnnnnnnnnnnnnnnnnnnnnnnnnnnnnnnnnnnnnnnnnnnnnnnnnnnnnnnnnnnnnnnnnnnnnnnnnnnnnnnnnnnnnnnnnnnnnnnnnnnnnnnnnnnnnnnnnnnnnnnnnnnnnnnnnnnnnnnnnnnnnnnnnnnnnnnnnnnnnnnnnnnnnnnnnnnnnnnnnnnnnnnnnnnnnnnnnnnnnnnnnnnnnnnnnnnnnnnnnnnnnnnnnnnnnnnnnnnnnnnnnnnnnnnnnnnnnnnnnnnnnnnnnnnnnnnnnnnnnnnnnnnnnnnnnnnnnnnnnnnnnnnnnnnnnnnnnnnnnnnnnnnnnnnnnnnnnnnnnnnnnnnnnnnnnnnnnnnnnnnnnnnnnnnnnnnnnnnnnnnnnnnnnnnnnnnnnnnnnnnnnnnnnnnnnnnnnnnnnnnnnnnnnnnnnnnnnnnnnnnnnnnnnnnnnnnnnnnnnnnnnnnnnnnnnnnnnnnnnnnnnnnnnnnnnnnnnnnnnnnnnnnnnnnnnnnnnnnnnnnnnnnnnnnnnnnnnnnnnnnnnnnnnnnnnnnnnnnnnnnnnnnnnnnnnnnnnnnnnnnnnnnnnnnnnnnnnnnnnnnnnnnnnnnnnnnnnnnnnnnnnnnnnnnnnnnnnnnnnnnnnnnnnnnnnnnnnnnnnnnnnnnnnnnnnnnnnnnnnnnnnnnnnnnnnnnnnnnnnnnnnnnnnnnnnnnnnnnnnnnnnnnnnnnnnnnnnnnnnnnnnnnnnnnnnnnnnnnnnnnnnnnnnnnnnnnnnnnnnnnnnnnnnnnnnnnnnnnnnnnnnnnnnnnnnnnnnnnnnnnnnnnnnnnnnnnnnnnnnnnnnnnnnnnnnnnnnnnnnnnnnnnnnnnnnnnnnnnnnnnnnnnnnnnnnnnnnnnnnnnnnnnnnnnnnnnnnnnnnnnnnnnnnnnnnnnnnnnnnnnnnnnnnnnnnnnnnnnnnnnnnnnnnnnnnnnnnnnnnnnnnnnnnnnnnnnnnnnnnnnnnnnnnnnnnnnnnnnnnnnnnnnnnnnnnnnnnnnnnnnnnnnnnnnnnnnnnnnnnnnnnnnnnnnnnnnnnnnnnnnnnnnnnnnnnnnnnnnnnnnnnnnnnnnnnnnnnnnnnnnnnnnnnnnnnnnnnnnnnnnnnnnnnnnnnnnnnnnnnnnnnnnnnnnnnnnnnnnnnnnnnnnnnnnnnnnnnnnnnnnnnnnnnnnnnnnnnnnnnnnnnnnnnnnnnnnnnnnnnnnnnnnnnnnnnnnnnnnnnnnnnnnnnnnnnnnnnnnnnnnnnnnnnnnnnnnnnnnnnnnnnnnnnnnnnnnnnnnnnnnnnnnnnnnnnnnnnnnnnnnnnnnnnnnnnnnnnnnnnnnnnnnnnnnnnnnnnnnnnnnnnnnnnnnnnnnnnnnnnnnnnnnnnnnnnnnnnnnnnnnnnnnnnnnnnnnnnnnnnnnnnnnnnnnnnnnnnnnnnnnnnnnnnnnnnnnnnnnnnnnnnnnnnnnnnnnnnnnnnnnnnnnnnnnnnnnnnnnnnnnnnnnnnnnnnnnnnnnnnnnnnnnnnnnnnnnnnnnnnnnnnnnnnnnnnnnnnnnnnnnnnnnnnnnnnnnnnnnnnnnnnnnnnnnnnnnnnnnnnnnnnnnnnnnnnnnnnnnnnnnnnnnnnnnnnnnnnnnnnnnnnnnnnnnnnnnnnnnnnnnnnnnnnnnnnnnnnnnnnnnnnnnnnnnnnnnnnnnnnnnnnnnnnnnnnnnnnnnnnnnnnnnnnnnnnnnnnnnnnnnnnnnnnnnnnnnnnnnnnnnnnnnnnnnnnnnnnnnnnnnnnnnnnnnnnnnnnnnnnnnnnnnnnnnnnnnnnnnnnnnnnnnnnnnnnnnnnnnnnnnnnnnnnnnnnnnnnnnnnnnnnnnnnnnnnnnnnnnnnnnnnnnnnnnnnnnnnnnnnnnnnnnnnnnnnnnnnnnnnnnnnnnnnnnnnnnnnnnnnnnnnnnnnnnnnnnnnnnnnnnnnnnnnnnnnnnnnnnnnnnnnnnnnnnnnnnnnnnnnnnnnnnnnnnnnnnnnnnnnnnnnnnnnnnnnnnnnnnnnnnnnnnnnnnnnnnnnnnnnnnnnnnnnnnnnnnnnnnnnnnnnnnnnnnnnnnnnnnnnnnnnnnnnnnnnnnnnnnnnnnnnnnnnnnnnnnnnnnnnnnnnnnnnnnnnnnnnnnnnnnnnnnnnnnnnnnnnnnnnnnnnnnnnnnnnnnnnnnnnnnnnnnnnnnnnnnnnnnnnnnnnnnnnnnnnnnnnnnnnnnnnnnnnnnnnnnnnnnnnnnnnnnnnnnnnnnnnnnnnnnnnnnnnnnnnnnnnnnnnnnnnnnnnnnnnnnnnnnnnnnnnnnnnnnnnnnnnnnnnnnnnnnnnnnnnnnnnnnnnnnnnnnnnnnnnnnnnnnnnnnnnnnnnnnnnnnnnnnnnnnnnnnnnnnnnnnnnnnnnnnnnnnnnnnnnnnnnnnnnnnnnnnnnnnnnnnnnnnnnnnnnnnnnnnnnnnnnnnnnnnnnnnnnnnnnnnnnnnnnnnnnnnnnnnnnnnnnnnnnnnnnnnnnnnnnnnnnnnnnnnnnnnnnnnnnnnnnnnnnnnnnnnnnnnnnnnnnnnnnnnnnnnnnnnnnnnnnnnnnnnnnnnnnnnnnnnnnnnnnnnnnnnnnnnnnnnnnnnnnnnnnnnnnnnnnnnnnnnnnnnnnnnnnnnnnnnnnnnnnnnnnnnnnnnnnnnnnnnnnnnnnnnnnnnnnnnnnnnnnnnnnnnnnnnnnnnnnnnnnnnnnnnnnnnnnnnnnnnnnnnnnnnnnnnnnnnnnnnnnnnnnnnnnnnnnnnnnnnnnnnnnnnnnnnnnnnnnnnnnnnnnnnnnnnnnnnnnnnnnnnnnnnnnnnnnnnnnnnnnnnnnnnnnnnnnnnnnnnnnnnnnnnnnnnnnnnnnnnnnnnnnnnnnnnnnnnnnnnnnnnnnnnnnnnnnnnnnnnnnnnnnnnnnnnnnnnnnnnnnnnnnnnnnnnnnnnnnnnnnnnnnnnnnnnnnnnnnnnnnnnnnnnnnnnnnnnnnnnnnnnnnnnnnnnnnnnnnnnnnnnnnnnnnnnnnnnnnnnnnnnnnnnnnnnnnnnnnnnnnnnnnnnnnnnnnnnnnnnnnnnnnnnnnnnnnnnnnnnnnnnnnnnnnnnnnnnnnnnnnnnnnnnnnnnnnnnnnnnnnnnnnnnnnnnnnnnnnnnnnnnnnnnnnnnnnnnnnnnnnnnnnnnnnnnnnnnnnnnnnnnnnnnnnnnnnnnnnnnnnnnnnnnnnnnnnnnnnnnnnnnnnnnnnnnnnnnnnnnnnnnnnnnnnnnnnnnnnnnnnnnnnnnnnnnnnnnnnnnnnnnnnnnnnnnnnnnnnnnnnnnnnnnnnnnnnnnnnnnnnnnnnnnnnnnnnnnnnnnnnnnnnnnnnnnnnnnnnnnnnnnnnnnnnnnnnnnnnnnnnnnnnnnnnnnnnnnnnnnnnnnnnnnnnnnnnnnnnnnnnnnnnnnnnnnnnnnnnnnnnnnnnnnnnnnnnnnnnnnnnnnnnnnnnnnnnnnnnnnnnnnnnnnnnnnnnnnnnnnnnnnnnnnnnnnnnnnnnnnnnnnnnnnnnnnnnnnnnnnnnnnnnnnnnnnnnnnnnnnnnnnnnnnnnnnnnnnnnnnnnnnnnnnnnnnnnnnnnnnnnnnnnnnnnnnnnnnnnnnnnnnnnnnnnnnnnnnnnnnnnnnnnnnnnnnnnnnnnnnnnnnnnnnnnnnnnnnnnnnnnnnnnnnnnnnnnnnnnnnnnnnnnnnnnnnnnnnnnnnnnnnnnnnnnnnnnnnnnnnnnnnnnnnnnnnnnnnnnnnnnnnnnnnnnnnnnnnnnnnnnnnnnnnnnnnnnnnnnnnnnnnnnnnnnnnnnnnnnnnnnnnnnnnnnnnnnnnnnnnnnnnnnnnnnnnnnnnnnnnnnnnnnnnnnnnnnnnnnnnnnnnnnnnnnnnnnnnnnnnnnnnnnnnnnnnnnnnnnnnnnnnnnnnnnnnnnnnnnnnnnnnnnnnnnnnnnnnnnnnnnnnnnnnnnnnnnnnnnnnnnnnnnnnnnnnnnnnnnnnnnnnnnnnnnnnnnnnnnnnnnnnnnnnnnnnnnnnnnnnnnnnnnnnnnnnnnnnnnnnnnnnnnnnnnnnnnnnnnnnnnnnnnnnnnnnnnnnnnnnnnnnnnnnnnnnnnnnnnnnnnnnnnnnnnnnnnnnnnnnnnnnnnnnnnnnnnnnnnnnnnnnnnnnnnnnnnnnnnnnnnnnnnnnnnnnnnnnnnnnnnnnnnnnnnnnnnnnnnnnnnnnnnnnnnnnnnnnnnnnnnnnnnnnnnnnnnnnnnnnnnnnnnnnnnnnnnnnnnnnnnnnnnnnnnnnnnnnnnnnnnnnnnnnnnnnnnnnnnnnnnnnnnnnnnnnnnnnnnnnnnnnnnnnnnnnnnnnnnnnnnnnnnnnnnnnnnnnnnnnnnnnnnnnnnnnnnnnnnnnnnnnnnnnnnnnnnnnnnnnnnnnnnnnnnnnnnnnnnnnnnnnnnnnnnnnnnnnnnnnnnnnnnnnnnnnnnnnnnnnnnnnnnnnnnnnnnnnnnnnnnnnnnnnnnnnnnnnnnnnnnnnnnnnnnnnnnnnnnnnnnnnnnnnnnnnnnnnnnnnnnnnnnnnnnnnnnnnnnnnnnnnnnnnnnnnnnnnnnnnnnnnnnnnnnnnnnnnnnnnnnnnnnnnnnnnnnnnnnnnnnnnnnnnnnnnnnnnnnnnnnnnnnnnnnnnnnnnnnnnnnnnnnnnnnnnnnnnnnnnnnnnnnnnnnnnnnnnnnnnnnnnnnnnnnnnnnnnnnnnnnnnnnnnnnnnnnnnnnnnnnnnnnnnnnnnnnnnnnnnnnnnnnnnnnnnnnnnnnnnnnnnnnnnnnnnnnnnnnnnnnnnnnnnnnnnnnnnnnnnnnnnnnnnnnnnnnnnnnnnnnnnnnnnnnnnnnnnnnnnnnnnnnnnnnnnnnnnnnnnnnnnnnnnnnnnnnnnnnnnnnnnnnnnnnnnnnnnnnnnnnnnnnnnnnnnnnnnnnnnnnnnnnnnnnnnnnnnnnnnnnnnnnnnnnnnnnnnnnnnnnnnnnnnnnnnnnnnnnnnnnnnnnnnnnnnnnnnnnnnnnnnnnnnnnnnnnnnnnnnnnnnnnnnnnnnnnnnnnnnnnnnnnnnnnnnnnnnnnnnnnnnnnnnnnnnnnnnnnnnnnnnnnnnnnnnnnnnnnnnnnnnnnnnnnnnnnnnnnnnnnnnnnnnnnnnnnnnnnnnnnnnnnnnnnnnnnnnnnnnnnnnnnnnnnnnnnnnnnnnnnnnnnnnnnnnnnnnnnnnnnnnnnnnnnnnnnnnnnnnnnnnnnnnnnnnnnnnnnnnnnnnnnnnnnnnnnnnnnnnnnnnnnnnnnnnnnnnnnnnnnnnnnnnnnnnnnnnnnnnnnnnnnnnnnnnnnnnnnnnnnnnnnnnnnnnnnnnnnnnnnnnnnnnnnnnnnnnnnnnnnnnnnnnnnnnnnnnnnnnnnnnnnnnnnnnnnnnnnnnnnnnnnnnnnnnnnnnnnnnnnnnnnnnnnnnnnnnnnnnnnnnnnnnnnnnnnnnnnnnnnnnnnnnnnnnnnnnnnnnnnnnnnnnnnnnnnnnnnnnnnnnnnnnnnnnnnnnnnnnnnnnnnnnnnnnnnnnnnnnnnnnnnnnnnnnnnnnnnnnnnnnnnnnnnnnnnnnnnnnnnnnnnnnnnnnnnnnnnnnnnnnnnnnnnnnnnnnnnnnnnnnnnnnnnnnnnnnnnnnnnnnnnnnnnnnnnnnnnnnnnnnnnnnnnnnnnnnnnnnnnnnnnnnnnnnnnnnnnnnnnnnnnnnnnnnnnnnnnnnnnnnnnnnnnnnnnnnnnnnnnnnnnnnnnnnnnnnnnnnnnnnnnnnnnnnnnnnnnnnnnnnnnnnnnnnnnnnnnnnnnnnnnnnnnnnnnnnnnnnnnnnnnnnnnnnnnnnnnnnnnnnnnnnnnnnnnnnnnnnnnnnnnnnnnnnnnnnnnnnnnnnnnnnnnnnnnnnnnnnnnnnnnnnnnnnnnnnnnnnnnnnnnnnnnnnnnnnnnnnnnnnnnnnnnnnnnnnnnnnnnnnnnnnnnnnnnnnnnnnnnnnnnnnnnnnnnnnnnnnnnnnnnnnnnnnnnnnnnnnnnnnnnnnnnnnnnnnnnnnnnnnnnnnnnnnnnnnnnnnnnnnnnnnnnnnnnnnnnnnnnnnnnnnnnnnnnnnnnnnnnnnnnnnnnnnnnnnnnnnnnnnnnnnnnnnnnnnnnnnnnnnnnnnnnnnnnnnnnnnnnnnnnnnnnnnnnnnnnnnnnnnnnnnnnnnnnnnnnnnnnnnnnnnnnnnnnnnnnnnnnnnnnnnnnnnnnnnnnnnnnnnnnnnnnnnnnnnnnnnnnnnnnnnnnnnnnnnnnnnnnnnnnnnnnnnnnnnnnnnnnnnnnnnnnnnnnnnnnnnnnnnnnnnnnnnnnnnnnnnnnnnnnnnnnnnnnnnnnnnnnnnnnnnnnnnnnnnnnnnnnnnnnnnnnnnnnnnnnnnnnnnnnnnnnnnnnnnnnnnnnnnnnnnnnnnnnnnnnnnnnnnnnnnnnnnnnnnnnnnnnnnnnnnnnnnnnnnnnnnnnnnnnnnnnnnnnnnnnnnnnnnnnnnnnnnnnnnnnnnnnnnnnnnnnnnnnnnnnnnnnnnnnnnnnnnnnnnnnnnnnnnnnnnnnnnnnnnnnnnnnnnnnnnnnnnnnnnnnnnnnnnnnnnnnnnnnnnnnnnnnnnnnnnnnnnnnnnnnnnnnnnnnnnnnnnnnnnnnnnnnnnnnnnnnnnnnnnnnnnnnnnnnnnnnnnnnnnnnnnnnnnnnnnnnnnnnnnnnnnnnnnnnnnnnnnnnnnnnnnnnnnnnnnnnnnnnnnnnnnnnnnnnnnnnnnnnnnnnnnnnnnnnnnnnnnnnnnnnnnnnnnnnnnnnnnnnnnnnnnnnnnnnnnnnnnnnnnnnnnnnnnnnnnnnnnnnnnnnnnnnnnnnnnnnnnnnnnnnnnnnnnnnnnnnnnnnnnnnnnnnnnnnnnnnnnnnnnnnnnnnnnnnnnnnnnnnnnnnnnnnnnnnnnnnnnnnnnnnnnnnnnnnnnnnnnnnnnnnnnnnnnnnnnnnnnnnnnnnnnnnnnnnnnnnnnnnnnnnnnnnnnnnnnnnnnnnnnnnnnnnnnnnnnnnnnnnnnnnnnnnnnnnnnnnnnnnnnnnnnnnnnnnnnnnnnnnnnnnnnnnnnnnnnnnnnnnnnnnnnnnnnnnnnnnnnnnnnnnnnnnnnnnnnnnnnnnnnnnnnnnnnnnnnnnnnnnnnnnnnnnnnnnnnnnnnnnnnnnnnnnnnnnnnnnnnnnnnnnnnnnnnnnnnnnnnnnnnnnnnnnnnnnnnnnnnnnnnnnnnnnnnnnnnnnnnnnnnnnnnnnnnnnnnnnnnnnnnnnnnnnnnnnnnnnnnnnnnnnnnnnnnnnnnnnnnnnnnnnnnnnnnnnnnnnnnnnnnnnnnnnnnnnnnnnnnnnnnnnnnnnnnnnnnnnnnnnnnnnnnnnnnnnnnnnnnnnnnnnnnnnnnnnnnnnnnnnnnnnnnnnnnnnnnnnnnnnnnnnnnnnnnnnnnnnnnnnnnnnnnnnnnnnnnnnnnnnnnnnnnnnnnnnnnnnnnnnnnnnnnnnnnnnnnnnnnnnnnnnnnnnnnnnnnnnnnnnnnnnnnnnnnnnnnnnnnnnnnnnnnnnnnnnnnnnnnnnnnnnnnnnnnnnnnnnnnnnnnnnnnnnnnnnnnnnnnnnnnnnnnnnnnnnnnnnnnnnnnnnnnnnnnnnnnnnnnnnnnnnnnnnnnnnnnnnnnnnnnnnnnnnnnnnnnnnnnnnnnnnnnnnnnnnnnnnnnnnnnnnnnnnnnnnnnnnnnnnnnnnnnnnnnnnnnnnnnnnnnnnnnnnnnnnnnnnnnnnnnnnnnnnnnnnnnnnnnnnnnnnnnnnnnnnnnnnnnnnnnnnnnnnnnnnnnnnnnnnnnnnnnnnnnnnnnnnnnnnnnnnnnnnnnnnnnnnnnnnnnnnnnnnnnnnnnnnnnnnnnnnnnnnnnnnnnnnnnnnnnnnnnnnnnnnnnnnnnnnnnnnnnnnnnnnnnnnnnnnnnnnnnnnnnnnnnnnnnnnnnnnnnnnnnnnnnnnnnnnnnnnnnnnnnnnnnnnnnnnnnnnnnnnnnnnnnnnnnnnnnnnnnnnnnnnnnnnnnnnnnnnnnnnnnnnnnnnnnnnnnnnnnnnnnnnnnnnnnnnnnnnnnnnnnnnnnnnnnnnnnnnnnnnnnnnnnnnnnnnnnnnnnnnnnnnnnnnnnnnnnnnnnnnnnnnnnnnnnnnnnnnnnnnnnnnnnnnnnnnnnnnnnnnnnnnnnnnnnnnnnnnnnnnnnnnnnnnnnnnnnnnnnnnnnnnnnnnnnnnnnnnnnnnnnnnnnnnnnnnnnnnnnnnnnnnnnnnnnnnnnnnnnnnnnnnnnnnnnnnnnnnnnnnnnnnnnnnnnnnnnnnnnnnnnnnnnnnnnnnnnnnnnnnnnnnnnnnnnnnnnnnnnnnnnnnnnnnnnnnnnnnnnnnnnnnnnnnnnnnnnnnnnnnnnnnnnnnnnnnnnnnnnnnnnnnnnnnnnnnnnnnnnnnnnnnnnnnnnnnnnnnnnnnnnnnnnnnnnnnnnnnnnnnnnnnnnnnnnnnnnnnnnnnnnnnnnnnnnnnnnnnnnnnnnnnnnnnnnnnnnnnnnnnnnnnnnnnnnnnnnnnnnnnnnnnnnnnnnnnnnnnnnnnnnnnnnnnnnnnnnnnnnnnnnnnnnnnnnnnnnnnnnnnnnnnnnnnnnnnnnnnnnnnnnnnnnnnnnnnnnnnnnnnnnnnnnnnnnnnnnnnnnnnnnnnnnnnnnnnnnnnnnnnnnnnnnnnnnnnnnnnnnnnnnnnnnnnnnnnnnnnnnnnnnnnnnnnnnnnnnnnnnnnnnnnnnnnnnnnnnnnnnnnnnnnnnnnnnnnnnnnnnnnnnnnnnnnnnnnnnnnnnnnnnnnnnnnnnnnnnnnnnnnnnnnnnnnnnnnnnnnnnnnnnnnnnnnnnnnnnnnnnnnnnnnnnnnnnnnnnnnnnnnnnnnnnnnnnnnnnnnnnnnnnnnnnnnnnnnnnnnnnnnnnnnnnnnnnnnnnnnnnnnnnnnnnnnnnnnnnnnnnnnnnnnnnnnnnnnnnnnnnnnnnnnnnnnnnnnnnnnnnnnnnnnnnnnnnnnnnnnnnnnnnnnnnnnnnnnnnnnnnnnnnnnnnnnnnnnnnnnnnnnnnnnnnnnnnnnnnnnnnnnnnnnnnnnnnnnnnnnnnnnnnnnnnnnnnnnnnnnnnnnnnnnnnnnnnnnnnnnnnnnnnnnnnnnnnnnnnnnnnnnnnnnnnnnnnnnnnnnnnnnnnnnnnnnnnnnnnnnnnnnnnnnnnnnnnnnnnnnnnnnnnnnnnnnnnnnnnnnnnnnnnnnnnnnnnnnnnnnnnnnnnnnnnnnnnnnnnnnnnnnnnnnnnnnnnnnnnnnnnnnnnnnnnnnnnnnnnnnnnnnnnnnnnnnnnnnnnnnnnnnnnnnnnnnnnnnnnnnnnnnnnnnnnnnnnnnnnnnnnnnnnnnnnnnnnnnnnnnnnnnnnnnnnnnnnnnnnnnnnnnnnnnnnnnnnnnnnnnnnnnnnnnnnnnnnnnnnnnnnnnnnnnnnnnnnnnnnnnnnnnnnnnnnnnnnnnnnnnnnnnnnnnnnnnnnnnnnnnnnnnnnnnnnnnnnnnnnnnnnnnnnnnnnnnnnnnnnnnnnnnnnnnnnnnnnnnnnnnnnnnnnnnnnnnnnnnnnnnnnnnnnnnnnnnnnnnnnnnnnnnnnnnnnnnnnnnnnnnnnnnnnnnnnnnnnnnnnnnnnnnnnnnnnnnnnnnnnnnnnnnnnnnnnnnnnnnnnnnnnnnnnnnnnnnnnnnnnnnnnnnnnnnnnnnnnnnnnnnnnnnnnnnnnnnnnnnnnnnnnnnnnnnnnnnnnnnnnnnnnnnnnnnnnnnnnnnnnnnnnnnnnnnnnnnnnnnnnnnnnnnnnnnnnnnnnnnnnnnnnnnnnnnnnnnnnnnnnnnnnnnnnnnnnnnnnnnnnnnnnnnnnnnnnnnnnnnnnnnnnnnnnnnnnnnnnnnnnnnnnnnnnnnnnnnnnnnnnnnnnnnnnnnnnnnnnnnnnnnnnnnnnnnnnnnnnnnnnnnnnnnnnnnnnnnnnnnnnnnnnnnnnnnnnnnnnnnnnnnnnnnnnnnnnnnnnnnnnnnnnnnnnnnnnnnnnnnnnnnnnnnnnnnnnnnnnnnnnnnnnnnnnnnnnnnnnnnnnnnnnnnnnnnnnnnnnnnnnnnnnnnnnnnnnnnnnnnnnnnnnnnnnnnnnnnnnnnnnnnnnnnnnnnnnnnnnnnnnnnnnnnnnnnnnnnnnnnnnnnnnnnnnnnnnnnnnnnnnnnnnnnnnnnnnnnnnnnnnnnnnnnnnnnnnnnnnnnnnnnnnnnnnnnnnnnnnnnnnnnnnnnnnnnnnnnnnnnnnnnnnnnnnnnnnnnnnnnnnnnnnnnnnnnnnnnnnnnnnnnnnnnnnnnnnnnnnnnnnnnnnnnnnnnnnnnnnnnnnnnnnnnnnnnnnnnnnnnnnnnnnnnnnnnnnnnnnnnnnnnnnnnnnnnnnnnnnnnnnnnnnnnnnnnnnnnnnnnnnnnnnnnnnnnnnnnnnnnnnnnnnnnnnnnnnnnnnnnnnnnnnnnnnnnnnnnnnnnnnnnnnnnnnnnnnnnnnnnnnnnnnnnnnnnnnnnnnnnnnnnnnnnnnnnnnnnnnnnnnnnnnnnnnnnnnnnnnnnnnnnnnnnnnnnnnnnnnnnnnnnnnnnnnnnnnnnnnnnnnnnnnnnnnnnnnnnnnnnnnnnnnnnnnnnnnnnnnnnnnnnnnnnnnnnnnnnnnnnnnnnnnnnnnnnnnnnnnnnnnnnnnnnnnnnnnnnnnnnnnnnnnnnnnnnnnnnnnnnnnnnnnnnnnnnnnnnnnnnnnnnnnnnnnnnnnnnnnnnnnnnnnnnnnnnnnnnnnnnnnnnnnnnnnnnnnnnnnnnnnnnnnnnnnnnnnnnnnnnnnnnnnnnnnnnnnnnnnnnnnnnnnnnnnnnnnnnnnnnnnnnnnnnnnnnnnnnnnnnnnnnnnnnnnnnnnnnnnnnnnnnnnnnnnnnnnnnnnnnnnnnnnnnnnnnnnnnnnnnnnnnnnnnnnnnnnnnnnnnnnnnnnnnnnnnnnnnnnnnnnnnnnnnnnnnnnnnnnnnnnnnnnnnnnnnnnnnnnnnnnnnnnnnnnnnnnnnnnnnnnnnnnnnnnnnnnnnnnnnnnnnnnnnnnnnnnnnnnnnnnnnnnnnnnnnnnnnnnnnnnnnnnnnnnnnnnnnnnnnnnnnnnnnnnnnnnnnnnnnnnnnnnnnnnnnnnnnnnnnnnnnnnnnnnnnnnnnnnnnnnnnnnnnnnnnnnnnnnnnnnnnnnnnnnnnnnnnnnnnnnnnnnnnnnnnnnnnnnnnnnnnnnnnnnnnnnnnnnnnnnnnnnnnnnnnnnnnnnnnnnnnnnnnnnnnnnnnnnnnnnnnnnnnnnnnnnnnnnnnnnnnnnnnnnnnnnnnnnnnnnnnnnnnnnnnnnnnnnnnnnnnnnnnnnnnnnnnnnnnnnnnnnnnnnnnnnnnnnnnnnnnnnnnnnnnnnnnnnnnnnnnnnnnnnnnnnnnnnnnnnnnnnnnnnnnnnnnnnnnnnnnnnnnnnnnnnnnnnnnnnnnnnnnnnnnnnnnnnnnnnnnnnnnnnnnnnnnnnnnnnnnnnnnnnnnnnnnnnnnnnnnnnnnnnnnnnnnnnnnnnnnnnnnnnnnnnnnnnnnnnnnnnnnnnnnnnnnnnnnnnnnnnnnnnnnnnnnnnnnnnnnnnnnnnnnnnnnnnnnnnnnnnnnnnnnnnnnnnnnnnnnnnnnnnnnnnnnnnnnnnnnnnnnnnnnnnnnnnnnnnnnnnnnnnnnnnnnnnnnnnnnnnnnnnnnnnnnnnnnnnnnnnnnnnnnnnnnnnnnnnnnnnnnnnnnnnnnnnnnnnnnnnnnnnnnnnnnnnnnnnnnnnnnnnnnnnnnnnnnnnnnnnnnnnnnnnnnnnnnnnnnnnnnnnnnnnnnnnnnnnnnnnnnnnnnnnnnnnnnnnnnnnnnnnnnnnnnnnnnnnnnnnnnnnnnnnnnnnnnnnnnnnnnnnnnnnnnnnnnnnnnnnnnnnnnnnnnnnnnnnnnnnnnnnnnnnnnnnnnnnnnnnnnnnnnnnnnnnnnnnnnnnnnnnnnnnnnnnnnnnnnnnnnnnnnnnnnnnnnnnnnnnnnnnnnnnnnnnnnnnnnnnnnnnnnnnnnnnnnnnnnnnnnnnnnnnnnnnnnnnnnnnnnnnnnnnnnnnnnnnnnnnnnnnnnnnnnnnnnnnnnnnnnnnnnnnnnnnnnnnnnnnnnnnnnnnnnnnnnnnnnnnnnnnnnnnnnnnnnnnnnnnnnnnnnnnnnnnnnnnnnnnnnnnnnnnnnnnnnnnnnnnnnnnnnnnnnnnnnnnnnnnnnnnnnnnnnnnnnnnnnnnnnnnnnnnnnnnnnnnnnnnnnnnnnnnnnnnnnnnnnnnnnnnnnnnnnnnnnnnnnnnnnnnnnnnnnnnnnnnnnnnnnnnnnnnnnnnnnnnnnnnnnnnnnnnnnnnnnnnnnnnnnnnnnnnnnnnnnnnnnnnnnnnnnnnnnnnnnnnnnnnnnnnnnnnnnnnnnnnnnnnnnnnnnnnnnnnnnnnnnnnnnnnnnnnnnnnnnnnnnnnnnnnnnnnnnnnnnnnnnnnnnnnnnnnnnnnnnnnnnnnnnnnnnnnnnnnnnnnnnnnnnnnnnnnnnnnnnnnnnnnnnnnnnnnnnnnnnnnnnnnnnnnnnnnnnnnnnnnnnnnnnnnnnnnnnnnnnnnnnnnnnnnnnnnnnnnnnnnnnnnnnnnnnnnnnnnnnnnnnnnnnnnnnnnnnnnnnnnnnnnnnnnnnnnnnnnnnnnnnnnnnnnnnnnnnnnnnnnnnnnnnnnnnnnnnnnnnnnnnnnnnnnnnnnnnnnnnnnnnnnnnnnnnnnnnnnnnnnnnnnnnnnnnnnnnnnnnnnnnnnnnnnnnnnnnnnnnnnnnnnnnnnnnnnnnnnnnnnnnnnnnnnnnnnnnnnnnnnnnnnnnnnnnnnnnnnnnnnnnnnnnnnnnnnnnnnnnnnnnnnnnnnnnnnnnnnnnnnnnnnnnnnnnnnnnnnnnnnnnnnnnnnnnnnnnnnnnnnnnnnnnnnnnnnnnnnnnnnnnnnnnnnnnnnnnnnnnnnnnnnnnnnnnnnnnnnnnnnnnnnnnnnnnnnnnnnnnnnnnnnnnnnnnnnnnnnnnnnnnnnnnnnnnnnnnnnnnnnnnnnnnnnnnnnnnnnnnnnnnnnnnnnnnnnnnnnnnnnnnnnnnnnnnnnnnnnnnnnnnnnnnnnnnnnnnnnnnnnnnnnnnnnnnnnnnnnnnnnnnnnnnnnnnnnnnnnnnnnnnnnnnnnnnnnnnnnnnnnnnnnnnnnnnnnnnnnnnnnnnnnnnnnnnnnnnnnnnnnnnnnnnnnnnnnnnnnnnnnnnnnnnnnnnnnnnnnnnnnnnnnnnnnnnnnnnnnnnnnnnnnnnnnnnnnnnnnnnnnnnnnnnnnnnnnnnnnnnnnnnnnnnnnnnnnnnnnnnnnnnnnnnnnnnnnnnnnnnnnnnnnnnnnnnnnnnnnnnnnnnnnnnnnnnnnnnnnnnnnnnnnnnnnnnnnnnnnnnnnnnnnnnnnnnnnnnnnnnnnnnnnnnnnnnnnnnnnnnnnnnnnnnnnnnnnnnnnnnnnnnnnnnnnnnnnnnnnnnnnnnnnnnnnnnnnnnnnnnnnnnnnnnnnnnnnnnnnnnnnnnnnnnnnnnnnnnnnnnnnnnnnnnnnnnnnnnnnnnnnnnnnnnnnnnnnnnnnnnnnnnnnnnnnnnnnnnnnnnnnnnnnnnnnnnnnnnnnnnnnnnnnnnnnnnnnnnnnnnnnnnnnnnnnnnnnnnnnnnnnnnnnnnnnnnnnnnnnnnnnnnnnnnnnnnnnnnnnnnnnnnnnnnnnnnnnnnnnnnnnnnnnnnnnnnnnnnnnnnnnnnnnnnnnnnnnnnnnnnnnnnnnnnnnnnnnnnnnnnnnnnnnnnnnnnnnnnnnnnnnnnnnnnnnnnnnnnnnnnnnnnnnnnnnnnnnnnnnnnnnnnnnnnnnnnnnnnnnnnnnnnnnnnnnnnnnnnnnnnnnnnnnnnnnnnnnnnnnnnnnnnnnnnnnnnnnnnnnnnnnnnnnnnnnnnnnnnnnnnnnnnnnnnnnnnnnnnnnnnnnnnnnnnnnnnnnnnnnnnnnnnnnnnnnnnnnnnnnnnnnnnnnnnnnnnnnnnnnnnnnnnnnnnnnnnnnnnnnnnnnnnnnnnnnnnnnnnnnnnnnnnnnnnnnnnnnnnnnnnnnnnnnnnnnnnnnnnnnnnnnnnnnnnnnnnnnnnnnnnnnnnnnnnnnnnnnnnnnnnnnnnnnnnnnnnnnnnnnnnnnnnnnnnnnnnnnnnnnnnnnnnnnnnnnnnnnnnnnnnnnnnnnnnnnnnnnnnnnnnnnnnnnnnnnnnnnnnnnnnnnnnnnnnnnnnnnnnnnnnnnnnnnnnnnnnnnnnnnnnnnnnnnnnnnnnnnnnnnnnnnnnnnnnnnnnnnnnnnnnnnnnnnnnnnnnnnnnnnnnnnnnnnnnnnnnnnnnnnnnnnnnnnnnnnnnnnnnnnnnnnnnnnnnnnnnnnnnnnnnnnnnnnnnnnnnnnnnnnnnnnnnnnnnnnnnnnnnnnnnnnnnnnnnnnnnnnnnnnnnnnnnnnnnnnnnnnnnnnnnnnnnnnnnnnnnnnnnnnnnnnnnnnnnnnnnnnnnnnnnnnnnnnnnnnnnnnnnnnnnnnnnnnnnnnnnnnnnnnnnnnnnnnnnnnnnnnnnnnnnnnnnnnnnnnnnnnnnnnnnnnnnnnnnnnnnnnnnnnnnnnnnnnnnnnnnnnnnnnnnnnnnnnnnnnnnnnnnnnnnnnnnnnnnnnnnnnnnnnnnnnnnnnnnnnnnnnnnnnnnnnnnnnnnnnnnnnnnnnnnnnnnnnnnnnnnnnnnnnnnnnnnnnnnnnnnnnnnnnnnnnnnnnnnnnnnnnnnnnnnnnnnnnnnnnnnnnnnnnnnnnnnnnnnnnnnnnnnnnnnnnnnnnnnnnnnnnnnnnnnnnnnnnnnnnnnnnnnnnnnnnnnnnnnnnnnnnnnnnnnnnnnnnnnnnnnnnnnnnnnnnnnnnnnnnnnnnnnnnnnnnnnnnnnnnnnnnnnnnnnnnnnnnnnnnnnnnnnnnnnnnnnnnnnnnnnnnnnnnnnnnnnnnnnnnnnnnnnnnnnnnnnnnnnnnnnnnnnnnnnnnnnnnnnnnnnnnnnnnnnnnnnnnnnnnnnnnnnnnnnnnnnnnnnnnnnnnnnnnnnnnnnnnnnnnnnnnnnnnnnnnnnnnnnnnnnnnnnnnnnnnnnnnnnnnnnnnnnnnnnnnnnnnnnnnnnnnnnnnnnnnnnnnnnnnnnnnnnnnnnnnnnnnnnnnnnnnnnnnnnnnnnnnnnnnnnnnnnnnnnnnnnnnnnnnnnnnnnnnnnnnnnnnnnnnnnnnnnnnnnnnnnnnnnnnnnnnnnnnnnnnnnnnnnnnnnnnnnnnnnnnnnnnnnnnnnnnnnnnnnnnnnnnnnnnnnnnnnnnnnnnnnnnnnnnnnnnnnnnnnnnnnnnnnnnnnnnnnnnnnnnnnnnnnnnnnnnnnnnnnnnnnnnnnnnnnnnnnnnnnnnnnnnnnnnnnnnnnnnnnnnnnnnnnnnnnnnnnnnnnnnnnnnnnnnnnnnnnnnnnnnnnnnnnnnnnnnnnnnnnnnnnnnnnnnnnnnnnnnnnnnnnnnnnnnnnnnnnnnnnnnnnnnnnnnnnnnnnnnnnnnnnnnnnnnnnnnnnnnnnnnnnnnnnnnnnnnnnnnnnnnnnnnnnnnnnnnnnnnnnnnnnnnnnnnnnnnnnnnnnnnnnnnnnnnnnnnnnnnnnnnnnnnnnnnnnnnnnnnnnnnnnnnnnnnnnnnnnnnnnnnnnnnnnnnnnnnnnnnnnnnnnnnnnnnnnnnnnnnnnnnnnnnnnnnnnnnnnnnnnnnnnnnnnnnnnnnnnnnnnnnnnnnnnnnnnnnnnnnnnnnnnnnnnnnnnnnnnnnnnnnnnnnnnnnnnnnnnnnnnnnnnnnnnnnnnnnnnnnnnnnnnnnnnnnnnnnnnnnnnnnnnnnnnnnnnnnnnnnnnnnnnnnnnnnnnnnnnnnnnnnnnnnnnnnnnnnnnnnnnnnnnnnnnnnnnnnnnnnnnnnnnnnnnnnnnnnnnnnnnnnnnnnnnnnnnnnnnnnnnnnnnnnnnnnnnnnnnnnnnnnnnnnnnnnnnnnnnnnnnnnnnnnnnnnnnnnnnnnnnnnnnnnnnnnnnnnnnnnnnnnnnnnnnnnnnnnnnnnnnnnnnnnnnnnnnnnnnnnnnnnnnnnnnnnnnnnnnnnnnnnnnnnnnnnnnnnnnnnnnnnnnnnnnnnnnnnnnnnnnnnnnnnnnnnnnnnnnnnnnnnnnnnnnnnnnnnnnnnnnnnnnnnnnnnnnnnnnnnnnnnnnnnnnnnnnnnnnnnnnnnnnnnnnnnnnnnnnnnnnnnnnnnnnnnnnnnnnnnnnnnnnnnnnnnnnnnnnnnnnnnnnnnnnnnnnnnnnnnnnnnnnnnnnnnnnnnnnnnnnnnnnnnnnnnnnnnnnnnnnnnnnnnnnnnnnnnnnnnnnnnnnnnnnnnnnnnnnnnnnnnnnnnnnnnnnnnnnnnnnnnnnnnnnnnnnnnnnnnnnnnnnnnnnnnnnnnnnnnnnnnnnnnnnnnnnnnnnnnnnnnnnnnnnnnnnnnnnnnnnnnnnnnnnnnnnnnnnnnnnnnnnnnnnnnnnnnnnnnnnnnnnnnnnnnnnnnnnnnnnnnnnnnnnnnnnnnnnnnnnnnnnnnnnnnnnnnnnnnnnnnnnnnnnnnnnnnnnnnnnnnnnnnnnnnnnnnnnnnnnnnnnnnnnnnnnnnnnnnnnnnnnnnnnnnnnnnnnnnnnnnnnnnnnnnnnnnnnnnnnnnnnnnnnnnnnnnnnnnnnnnnnnnnnnnnnnnnnnnnnnnnnnnnnnnnnnnnnnnnnnnnnnnnnnnnnnnnnnnnnnnnnnnnnnnnnnnnnnnnnnnnnnnnnnnnnnnnnnnnnnnnnnnnnnnnnnnnnnnnnnnnnnnnnnnnnnnnnnnnnnnnnnnnnnnnnnnnnnnnnnnnnnnnnnnnnnnnnnnnnnnnnnnnnnnnnnnnnnnnnnnnnnnnnnnnnnnnnnnnnnnnnnnnnnnnnnnnnnnnnnnnnnnnnnnnnnnnnnnnnnnnnnnnnnnnnnnnnnnnnnnnnnnnnnnnnnnnnnnnnnnnnnnnnnnnnnnnnnnnnnnnnnnnnnnnnnnnnnnnnnnnnnnnnnnnnnnnnnnnnnnnnnnnnnnnnnnnnnnnnnnnnnnnnnnnnnnnnnnnnnnnnnnnnnnnnnnnnnnnnnnnnnnnnnnnnnnnnnnnnnnnnnnnnnnnnnnnnnnnnnnnnnnnnnnnnnnnnnnnnnnnnnnnnnnnnnnnnnnnnnnnnnnnnnnnnnnnnnnnnnnnnnnnnnnnnnnnnnnnnnnnnnnnnnnnnnnnnnnnnnnnnnnnnnnnnnnnnnnnnnnnnnnnnnnnnnnnnnnnnnnnnnnnnnnnnnnnnnnnnnnnnnnnnnnnnnnnnnnnnnnnnnnnnnnnnnnnnnnnnnnnnnnnnnnnnnnnnnnnnnnnnnnnnnnnnnnnnnnnnnnnnnnnnnnnnnnnnnnnnnnnnnnnnnnnnnnnnnnnnnnnnnnnnnnnnnnnnnnnnnnnnnnnnnnnnnnnnnnnnnnnnnnnnnnnnnnnnnnnnnnnnnnnnnnnnnnnnnnnnnnnnnnnnnnnnnnnnnnnnnnnnnnnnnnnnnnnnnnnnnnnnnnnnnnnnnnnnnnnnnnnnnnnnnnnnnnnnnnnnnnnnnnnnnnnnnnnnnnnnnnnnnnnnnnnnnnnnnnnnnnnnnnnnnnnnnnnnnnnnnnnnnnnnnnnnnnnnnnnnnnnnnnnnnnnnnnnnnnnnnnnnnnnnnnnnnnnnnnnnnnnnnnnnnnnnnnnnnnnnnnnnnnnnnnnnnnnnnnnnnnnnnnnnnnnnnnnnnnnnnnnnnnnnnnnnnnnnnnnnnnnnnnnnnnnnnnnnnnnnnnnnnnnnnnnnnnnnnnnnnnnnnnnnnnnnnnnnnnnnnnnnnnnnnnnnnnnnnnnnnnnnnnnnnnnnnnnnnnnnnnnnnnnnnnnnnnnnnnnnnnnnnnnnnnnnnnnnnnnnnnnnnnnnnnnnnnnnnnnnnnnnnnnnnnnnnnnnnnnnnnnnnnnnnnnnnnnnnnnnnnnnnnnnnnnnnnnnnnnnnnnnnnnnnnnnnnnnnnnnnnnnnnnnnnnnnnnnnnnnnnnnnnnnnnnnnnnnnnnnnnnnnnnnnnnnnnnnnnnnnnnnnnnnnnnnnnnnnnnnnnnnnnnnnnnnnnnnnnnnnnnnnnnnnnnnnnnnnnnnnnnnnnnnnnnnnnnnnnnnnnnnnnnnnnnnnnnnnnnnnnnnnnnnnnnnnnnnnnnnnnnnnnnnnnnnnnnnnnnnnnnnnnnnnnnnnnnnnnnnnnnnnnnnnnnnnnnnnnnnnnnnnnnnnnnnnnnnnnnnnnnnnnnnnnnnnnnnnnnnnnnnnnnnnnnnnnnnnnnnnnnnnnnnnnnnnnnnnnnnnnnnnnnnnnnnnnnnnnnnnnnnnnnnnnnnnnnnnnnnnnnnnnnnnnnnnnnnnnnnnnnnnnnnnnnnnnnnnnnnnnnnnnnnnnnnnnnnnnnnnnnnnnnnnnnnnnnnnnnnnnnnnnnnnnnnnnnnnnnnnnnnnnnnnnnnnnnnnnnnnnnnnnnnnnnnnnnnnnnnnnnnnnnnnnnnnnnnnnnnnnnnnnnnnnnnnnnnnnnnnnnnnnnnnnnnnnnnnnnnnnnnnnnnnnnnnnnnnnnnnnnnnnnnnnnnnnnnnnnnnnnnnnnnnnnnnnnnnnnnnnnnnnnnnnnnnnnnnnnnnnnnnnnnnnnnnnnnnnnnnnnnnnnnnnnnnnnnnnnnnnnnnnnnnnnnnnnnnnnnnnnnnnnnnnnnnnnnnnnnnnnnnnnnnnnnnnnnnnnnnnnnnnnnnnnnnnnnnnnnnnnnnnnnnnnnnnnnnnnnnnnnnnnnnnnnnnnnnnnnnnnnnnnnnnnnnnnnnnnnnnnnnnnnnnnnnnnnnnnnnnnnnnnnnnnnnnnnnnnnnnnnnnnnnnnnnnnnnnnnnnnnnnnnnnnnnnnnnnnnnnnnnnnnnnnnnnnnnnnnnnnnnnnnnnnnnnnnnnnnnnnnnnnnnnnnnnnnnnnnnnnnnnnnnnnnnnnnnnnnnnnnnnnnnnnnnnnnnnnnnnnnnnnnnnnnnnnnnnnnnnnnnnnnnnnnnnnnnnnnnnnnnnnnnnnnnnnnnnnnnnnnnnnnnnnnnnnnnnnnnnnnnnnnnnnnnnnnnnnnnnnnnnnnnnnnnnnnnnnnnnnnnnnnnnnnnnnnnnnnnnnnnnnnnnnnnnnnnnnnnnnnnnnnnnnnnnnnnnnnnnnnnnnnnnnnnnnnnnnnnnnnnnnnnnnnnnnnnnnnnnnnnnnnnnnnnnnnnnnnnnnnnnnnnnnnnnnnnnnnnnnnnnnnnnnnnnnnnnnnnnnnnnnnnnnnnnnnnnnnnnnnnnnnnnnnnnnnnnnnnnnnnnnnnnnnnnnnnnnnnnnnnnnnnnnnnnnnnnnnnnnnnnnnnnnnnnnnnnnnnnnnnnnnnnnnnnnnnnnnnnnnnnnnnnnnnnnnnnnnnnnnnnnnnnnnnnnnnnnnnnnnnnnnnnnnnnnnnnnnnnnnnnnnnnnnnnnnnnnnnnnnnnnnnnnnnnnnnnnnnnnnnnnnnnnnnnnnnnnnnnnnnnnnnnnnnnnnnnnnnnnnnnnnnnnnnnnnnnnnnnnnnnnnnnnnnnnnnnnnnnnnnnnnnnnnnnnnnnnnnnnnnnnnnnnnnnnnnnnnnnnnnnnnnnnnnnnnnnnnnnnnnnnnnnnnnnnnnnnnnnnnnnnnnnnnnnnnnnnnnnnnnnnnnnnnnnnnnnnnnnnnnnnnnnnnnnnnnnnnnnnnnnnnnnnnnnnnnnnnnnnnnnnnnnnnnnnnnnnnnnnnnnnnnnnnnnnnnnnnnnnnnnnnnnnnnnnnnnnnnnnnnnnnnnnnnnnnnnnnnnnnnnnnnnnnnnnnnnnnnnnnnnnnnnnnnnnnnnnnnnnnnnnnnnnnnnnnnnnnnnnnnnnnnnnnnnnnnnnnnnnnnnnnnnnnnnnnnnnnnnnnnnnnnnnnnnnnnnnnnnnnnnnnnnnnnnnnnnnnnnnnnnnnnnnnnnnnnnnnnnnnnnnnnnnnnnnnnnnnnnnnnnnnnnnnnnnnnnnnnnnnnnnnnnnnnnnnnnnnnnnnnnnnnnnnnnnnnnnnnnnnnnnnnnnnnnnnnnnnnnnnnnnnnnnnnnnnnnnnnnnnnnnnnnnnnnnnnnnnnnnnnnnnnnnnnnnnnnnnnnnnnnnnnnnnnnnnnnnnnnnnnnnnnnnnnnnnnnnnnnnnnnnnnnnnnnnnnnnnnnnnnnnnnnnnnnnnnnnnnnnnnnnnnnnnnnnnnnnnnnnnnnnnnnnnnnnnnnnnnnnnnnnnnnnnnnnnnnnnnnnnnnnnnnnnnnnnnnnnnnnnnnnnnnnnnnnnnnnnnnnnnnnnnnnnnnnnnnnnnnnnnnnnnnnnnnnnnnnnnnnnnnnnnnnnnnnnnnnnnnnnnnnnnnnnnnnnnnnnnnnnnnnnnnnnnnnnnnnnnnnnnnnnnnnnnnnnnnnnnnnnnnnnnnnnnnnnnnnnnnnnnnnnnnnnnnnnnnnnnnnnnnnnnnnnnnnnnnnnnnnnnnnnnnnnnnnnnnnnnnnnnnnnnnnnnnnnnnnnnnnnnnnnnnnnnnnnnnnnnnnnnnnnnnnnnnnnnnnnnnnnnnnnnnnnnnnnnnnnnnnnnnnnnnnnnnnnnnnnnnnnnnnnnnnnnnnnnnnnnnnnnnnnnnnnnnnnnnnnnnnnnnnnnnnnnnnnnnnnnnnnnnnnnnnnnnnnnnnnnnnnnnnnnnnnnnnnnnnnnnnnnnnnnnnnnnnnnnnnnnnnnnnnnnnnnnnnnnnnnnnnnnnnnnnnnnnnnnnnnnnnnnnnnnnnnnnnnnnnnnnnnnnnnnnnnnnnnnnnnnnnnnnnnnnnnnnnnnnnnnnnnnnnnnnnnnnnnnnnnnnnnnnnnnnnnnnnnnnnnnnnnnnnnnnnnnnnnnnnnnnnnnnnnnnnnnnnnnnnnnnnnnnnnnnnnnnnnnnnnnnnnnnnnnnnnnnnnnnnnnnnnnnnnnnnnnnnnnnnnnnnnnnnnnnnnnnnnnnnnnnnnnnnnnnnnnnnnnnnnnnnnnnnnnnnnnnnnnnnnnnnnnnnnnnnnnnnnnnnnnnnnnnnnnnnnnnnnnnnnnnnnnnnnnnnnnnnnnnnnnnnnnnnnnnnnnnnnnnnnnnnnnnnnnnnnnnnnnnnnnnnnnnnnnnnnnnnnnnnnnnnnnnnnnnnnnnnnnnnnnnnnnnnnnnnnnnnnnnnnnnnnnnnnnnnnnnnnnnnnnnnnnnnnnnnnnnnnnnnnnnnnnnnnnnnnnnnnnnnnnnnnnnnnnnnnnnnnnnnnnnnnnnnnnnnnnnnnnnnnnnnnnnnnnnnnnnnnnnnnnnnnnnnnnnnnnnnnnnnnnnnnnnnnnnnnnnnnnnnnnnnnnnnnnnnnnnnnnnnnnnnnnnnnnnnnnnnnnnnnnnnnnnnnnnnnnnnnnnnnnnnnnnnnnnnnnnnnnnnnnnnnnnnnnnnnnnnnnnnnnnnnnnnnnnnnnnnnnnnnnnnnnnnnnnnnnnnnnnnnnnnnnnnnnnnnnnnnnnnnnnnnnnnnnnnnnnnnnnnnnnnnnnnnnnnnnnnnnnnnnnnnnnnnnnnnnnnnnnnnnnnnnnnnnnnnnnnnnnnnnnnnnnnnnnnnnnnnnnnnnnnnnnnnnnnnnnnnnnnnnnnnnnnnnnnnnnnnnnnnnnnnnnnnnnnnnnnnnnnnnnnnnnnnnnnnnnnnnnnnnnnnnnnnnnnnnnnnnnnnnnnnnnnnnnnnnnnnnnnnnnnnnnnnnnnnnnnnnnnnnnnnnnnnnnnnnnnnnnnnnnnnnnnnnnnnnnnnnnnnnnnnnnnnnnnnnnnnnnnnnnnnnnnnnnnnnnnnnnnnnnnnnnnnnnnnnnnnnnnnnnnnnnnnnnnnnnnnnnnnnnnnnnnnnnnnnnnnnnnnnnnnnnnnnnnnnnnnnnnnnnnnnnnnnnnnnnnnnnnnnnnnnnnnnnnnnnnnnnnnnnnnnnnnnnnnnnnnnnnnnnnnnnnnnnnnnnnnnnnnnnnnnnnnnnnnnnnnnnnnnnnnnnnnnnnnnnnnnnnnnnnnnnnnnnnnnnnnnnnnnnnnnnnnnnnnnnnnnnnnnnnnnnnnnnnnnnnnnnnnnnnnnnnnnnnnnnnnnnnnnnnnnnnnnnnnnnnnnnnnnnnnnnnnnnnnnnnnnnnnnnnnnnnnnnnnnnnnnnnnnnnnnnnnnnnnnnnnnnnnnnnnnnnnnnnnnnnnnnnnnnnnnnnnnnnnnnnnnnnnnnnnnnnnnnnnnnnnnnnnnnnnnnnnnnnnnnnnnnnnnnnnnnnnnnnnnnnnnnnnnnnnnnnnnnnnnnnnnnnnnnnnnnnnnnnnnnnnnnnnnnnnnnnnnnnnnnnnnnnnnnnnnnnnnnnnnnnnnnnnnnnnnnnnnnnnnnnnnnnnnnnnnnnnnnnnnnnnnnnnnnnnnnnnnnnnnnnnnnnnnnnnnnnnnnnnnnnnnnnnnnnnnnnnnnnnnnnnnnnnnnnnnnnnnnnnnnnnnnnnnnnnnnnnnnnnnnnnnnnnnnnnnnnnnnnnnnnnnnnnnnnnnnnnnnnnnnnnnnnnnnnnnnnnnnnnnnnnnnnnnnnnnnnnnnnnnnnnnnnnnnnnnnnnnnnnnnnnnnnnnnnnnnnnnnnnnnnnnnnnnnnnnnnnnnnnnnnnnnnnnnnnnnnnnnnnnnnnnnnnnnnnnnnnnnnnnnnnnnnnnnnnnnnnnnnnnnnnnnnnnnnnnnnnnnnnnnnnnnnnnnnnnnnnnnnnnnnnnnnnnnnnnnnnnnnnnnnnnnnnnnnnnnnnnnnnnnnnnnnnnnnnnnnnnnnnnnnnnnnnnnnnnnnnnnnnnnnnnnnnnnnnnnnnnnnnnnnnnnnnnnnnnnnnnnnnnnnnnnnnnnnnnnnnnnnnnnnnnnnnnnnnnnnnnnnnnnnnnnnnnnnnnnnnnnnnnnnnnnnnnnnnnnnnnnnnnnnnnnnnnnnnnnnnnnnnnnnnnnnnnnnnnnnnnnnnnnnnnnnnnnnnnnnnnnnnnnnnnnnnnnnnnnnnnnnnnnnnnnnnnnnnnnnnnnnnnnnnnnnnnnnnnnnnnnnnnnnnnnnnnnnnnnnnnnnnnnnnnnnnnnnnnnnnnnnnnnnnnnnnnnnnnnnnnnnnnnnnnnnnnnnnnnnnnnnnnnnnnnnnnnnnnnnnnnnnnnnnnnnnnnnnnnnnnnnnnnnnnnnnnnnnnnnnnnnnnnnnnnnnnnnnnnnnnnnnnnnnnnnnnnnnnnnnnnnnnnnnnnnnnnnnnnnnnnnnnnnnnnnnnnnnnnnnnnnnnnnnnnnnnnnnnnnnnnnnnnnnnnnnnnnnnnnnnnnnnnnnnnnnnnnnnnnnnnnnnnnnnnnnnnnnnnnnnnnnnnnnnnnnnnnnnnnnnnnnnnnnnnnnnnnnnnnnnnnnnnnnnnnnnnnnnnnnnnnnnnnnnnnnnnnnnnnnnnnnnnnnnnnnnnnnnnnnnnnnnnnnnnnnnnnnnnnnnnnnnnnnnnnnnnnnnnnnnnnnnnnnnnnnnnnnnnnnnnnnnnnnnnnnnnnnnnnnnnnnnnnnnnnnnnnnnnnnnnnnnnnnnnnnnnnnnnnnnnnnnnnnnnnnnnnnnnnnnnnnnnnnnnnnnnnnnnnnnnnnnnnnnnnnnnnnnnnnnnnnnnnnnnnnnnnnnnnnnnnnnnnnnnnnnnnnnnnnnnnnnnnnnnnnnnnnnnnnnnnnnnnnnnnnnnnnnnnnnnnnnnnnnnnnnnnnnnnnnnnnnnnnnnnnnnnnnnnnnnnnnnnnnnnnnnnnnnnnnnnnnnnnnnnnnnnnnnnnnnnnnnnnnnnnnnnnnnnnnnnnnnnnnnnnnnnnnnnnnnnnnnnnnnnnnnnnnnnnnnnnnnnnnnnnnnnnnnnnnnnnnnnnnnnnnnnnnnnnnnnnnnnnnnnnnnnnnnnnnnnnnnnnnnnnnnnnnnnnnnnnnnnnnnnnnnnnnnnnnnnnnnnnnnnnnnnnnnnnnnnnnnnnnnnnnnnnnnnnnnnnnnnnnnnnnnnnnnnnnnnnnnnnnnnnnnnnnnnnnnnnnnnnnnnnnnnnnnnnnnnnnnnnnnnnnnnnnnnnnnnnnnnnnnnnnnnnnnnnnnnnnnnnnnnnnnnnnnnnnnnnnnnnnnnnnnnnnnnnnnnnnnnnnnnnnnnnnnnnnnnnnnnnnnnnnnnnnnnnnnnnnnnnnnnnnnnnnnnnnnnnnnnnnnnnnnnnnnnnnnnnnnnnnnnnnnnnnnnnnnnnnnnnnnnnnnnnnnnnnnnnnnnnnnnnnnnnnnnnnnnnnnnnnnnnnnnnnnnnnnnnnnnnnnnnnnnnnnnnnnnnnnnnnnnnnnnnnnnnnnnnnnnnnnnnnnnnnnnnnnnnnnnnnnnnnnnnnnnnnnnnnnnnnnnnnnnnnnnnnnnnnnnnnnnnnnnnnnnnnnnnnnnnnnnnnnnnnnnnnnnnnnnnnnnnnnnnnnnnnnnnnnnnnnnnnnnnnnnnnnnnnnnnnnnnnnnnnnnnnnnnnnnnnnnnnnnnnnnnnnnnnnnnnnnnnnnnnnnnnnnnnnnnnnnnnnnnnnnnnnnnnnnnnnnnnnnnnnnnnnnnnnnnnnnnnnnnnnnnnnnnnnnnnnnnnnnnnnnnnnnnnnnnnnnnnnnnnnnnnnnnnnnnnnnnnnnnnnnnnnnnnnnnnnnnnnnnnnnnnnnnnnnnnnnnnnnnnnnnnnnnnnnnnnnnnnnnnnnnnnnnnnnnnnnnnnnnnnnnnnnnnnnnnnnnnnnnnnnnnnnnnnnnnnnnnnnnnnnnnnnnnnnnnnnnnnnnnnnnnnnnnnnnnnnnnnnnnnnnnnnnnnnnnnnnnnnnnnnnnnnnnnnnnnnnnnnnnnnnnnnnnnnnnnnnnnnnnnnnnnnnnnnnnnnnnnnnnnnnnnnnnnnnnnnnnnnnnnnnnnnnnnnnnnnnnnnnnnnnnnnnnnnnnnnnnnnnnnnnnnnnnnnnnnnnnnnnnnnnnnnnnnnnnnnnnnnnnnnnnnnnnnnnnnnnnnnnnnnnnnnnnnnnnnnnnnnnnnnnnnnnnnnnnnnnnnnnnnnnnnnnnnnnnnnnnnnnnnnnnnnnnnnnnnnnnnnnnnnnnnnnnnnnnnnnnnnnnnnnnnnnnnnnnnnnnnnnnnnnnnnnnnnnnnnnnnnnnnnnnnnnnnnnnnnnnnnnnnnnnnnnnnnnnnnnnnnnnnnnnnnnnnnnnnnnnnnnnnnnnnnnnnnnnnnnnnnnnnnnnnnnnnnnnnnnnnnnnnnnnnnnnnnnnnnnnnnnnnnnnnnnnnnnnnnnnnnnnnnnnnnnnnnnnnnnnnnnnnnnnnnnnnnnnnnnnnnnnnnnnnnnnnnnnnnnnnnnnnnnnnnnnnnnnnnnnnnnnnnnnnnnnnnnnnnnnnnnnnnnnnnnnnnnnnnnnnnnnnnnnnnnnnnnnnnnnnnnnnnnnnnnnnnnnnnnnnnnnnnnnnnnnnnnnnnnnnnnnnnnnnnnnnnnnnnnnnnnnnnnnnnnnnnnnnnnnnnnnnnnnnnnnnnnnnnnnnnnnnnnnnnnnnnnnnnnnnnnnnnnnnnnnnnnnnnnnnnnnnnnnnnnnnnnnnnnnnnnnnnnnnnnnnnnnnnnnnnnnnnnnnnnnnnnnnnnnnnnnnnnnnnnnnnnnnnnnnnnnnnnnnnnnnnnnnnnnnnnnnnnnnnnnnnnnnnnnnnnnnnnnnnnnnnnnnnnnnnnnnnnnnnnnnnnnnnnnnnnnnnnnnnnnnnnnnnnnnnnnnnnnnnnnnnnnnnnnnnnnnnnnnnnnnnnnnnnnnnnnnnnnnnnnnnnnnnnnnnnnnnnnnnnnnnnnnnnnnnnnnnnnnnnnnnnnnnnnnnnnnnnnnnnnnnnnnnnnnnnnnnnnnnnnnnnnnnnnnnnnnnnnnnnnnnnnnnnnnnnnnnnnnnnnnnnnnnnnnnnnnnnnnnnnnnnnnnnnnnnnnnnnnnnnnnnnnnnnnnnnnnnnnnnnnnnnnnnnnnnnnnnnnnnnnnnnnnnnnnnnnnnnnnnnnnnnnnnnnnnnnnnnnnnnnnnnnnnnnnnnnnnnnnnnnnnnnnnnnnnnnnnnnnnnnnnnnnnnnnnnnnnnnnnnnnnnnnnnnnnnnnnnnnnnnnnnnnnnnnnnnnnnnnnnnnnnnnnnnnnnnnnnnnnnnnnnnnnnnnnnnnnnnnnnnnnnnnnnnnnnnnnnnnnnnnnnnnnnnnnnnnnnnnnnnnnnnnnnnnnnnnnnnnnnnnnnnnnnnnnnnnnnnnnnnnnnnnnnnnnnnnnnnnnnnnnnnnnnnnnnnnnnnnnnnnnnnnnnnnnnnnnnnnnnnnnnnnnnnnnnnnnnnnnnnnnnnnnnnnnnnnnnnnnnnnnnnnnnnnnnnnnnnnnnnnnnnnnnnnnnnnnnnnnnnnnnnnnnnnnnnnnnnnnnnnnnnnnnnnnnnnnnnnnnnnnnnnnnnnnnnnnnnnnnnnnnnnnnnnnnnnnnnnnnnnnnnnnnnnnnnnnnnnnnnnnnnnnnnnnnnnnnnnnnnnnnnnnnnnnnnnnnnnnnnnnnnnnnnnnnnnnnnnnnnnnnnnnnnnnnnnnnnnnnnnnnnnnnnnnnnnnnnnnnnnnnnnnnnnnnnnnnnnnnnnnnnnnnnnnnnnnnnnnnnnnnnnnnnnnnnnnnnnnnnnnnnnnnnnnnnnnnnnnnnnnnnnnnnnnnnnnnnnnnnnnnnnnnnnnnnnnnnnnnnnnnnnnnnnnnnnnnnnnnnnnnnnnnnnnnnnnnnnnnnnnnnnnnnnnnnnnnnnnnnnnnnnnnnnnnnnnnnnnnnnnnnnnnnnnnnnnnnnnnnnnnnnnnnnnnnnnnnnnnnnnnnnnnnnnnnnnnnnnnnnnnnnnnnnnnnnnnnnnnnnnnnnnnnnnnnnnnnnnnnnnnnnnnnnnnnnnnnnnnnnnnnnnnnnnnnnnnnnnnnnnnnnnnnnnnnnnnnnnnnnnnnnnnnnnnnnnnnnnnnnnnnnnnnnnnnnnnnnnnnnnnnnnnnnnnnnnnnnnnnnnnnnnnnnnnnnnnnnnnnnnnnnnnnnnnnnnnnnnnnnnnnnnnnnnnnnnnnnnnnnnnnnnnnnnnnnnnnnnnnnnnnnnnnnnnnnnnnnnnnnnnnnnnnnnnnnnnnnnnnnnnnnnnnnnnnnnnnnnnnnnnnnnnnnnnnnnnnnnnnnnnnnnnnnnnnnnnnnnnnnnnnnnnnnnnnnnnnnnnnnnnnnnnnnnnnnnnnnnnnnnnnnnnnnnnnnnnnnnnnnnnnnnnnnnnnnnnnnnnnnnnnnnnnnnnnnnnnnnnnnnnnnnnnnnnnnnnnnnnnnnnnnnnnnnnnnnnnnnnnnnnnnnnnnnnnnnnnnnnnnnnnnnnnnnnnnnnnnnnnnnnnnnnnnnnnnnnnnnnnnnnnnnnnnnnnnnnnnnnnnnnnnnnnnnnnnnnnnnnnnnnnnnnnnnnnnnnnnnnnnnnnnnnnnnnnnnnnnnnnnnnnnnnnnnnnnnnnnnnnnnnnnnnnnnnnnnnnnnnnnnnnnnnnnnnnnnnnnnnnnnnnnnnnnnnnnnnnnnnnnnnnnnnnnnnnnnnnnnnnnnnnnnnnnnnnnnnnnnnnnnnnnnnnnnnnnnnnnnnnnnnnnnnnnnnnnnnnnnnnnnnnnnnnnnnnnnnnnnnnnnnnnnnnnnnnnnnnnnnnnnnnnnnnnnnnnnnnnnnnnnnnnnnnnnnnnnnnnnnnnnnnnnnnnnnnnnnnnnnnnnnnnnnnnnnnnnnnnnnnnnnnnnnnnnnnnnnnnnnnnnnnnnnnnnnnnnnnnnnnnnnnnnnnnnnnnnnnnnnnnnnnnnnnnnnnnnnnnnnnnnnnnnnnnnnnnnnnnnnnnnnnnnnnnnnnnnnnnnnnnnnnnnnnnnnnnnnnnnnnnnnnnnnnnnnnnnnnnnnnnnnnnnnnnnnnnnnnnnnnnnnnnnnnnnnnnnnnnnnnnnnnnnnnnnnnnnnnnnnnnnnnnnnnnnnnnnnnnnnnnnnnnnnnnnnnnnnnnnnnnnnnnnnnnnnnnnnnnnnnnnnnnnnnnnnnnnnnnnnnnnnnnnnnnnnnnnnnnnnnnnnnnnnnnnnnnnnnnnnnnnnnnnnnnnnnnnnnnnnnnnnnnnnnnnnnnnnnnnnnnnnnnnnnnnnnnnnnnnnnnnnnnnnnnnnnnnnnnnnnnnnnnnnnnnnnnnnnnnnnnnnnnnnnnnnnnnnnnnnnnnnnnnnnnnnnnnnnnnnnnnnnnnnnnnnnnnnnnnnnnnnnnnnnnnnnnnnnnnnnnnnnnnnnnnnnnnnnnnnnnnnnnnnnnnnnnnnnnnnnnnnnnnnnnnnnnnnnnnnnnnnnnnnnnnnnnnnnnnnnnnnnnnnnnnnnnnnnnnnnnnnnnnnnnnnnnnnnnnnnnnnnnnnnnnnnnnnnnnnnnnnnnnnnnnnnnnnnnnnnnnnnnnnnnnnnnnnnnnnnnnnnnnnnnnnnnnnnnnnnnnnnnnnnnnnnnnnnnnnnnnnnnnnnnnnnnnnnnnnnnnnnnnnnnnnnnnnnnnnnnnnnnnnnnnnnnnnnnnnnnnnnnnnnnnnnnnnnnnnnnnnnnnnnnnnnnnnnnnnnnnnnnnnnnnnnnnnnnnnnnnnnnnnnnnnnnnnnnnnnnnnnnnnnnnnnnnnnnnnnnnnnnnnnnnnnnnnnnnnnnnnnnnnnnnnnnnnnnnnnnnnnnnnnnnnnnnnnnnnnnnnnnnnnnnnnnnnnnnnnnnnnnnnnnnnnnnnnnnnnnnnnnnnnnnnnnnnnnnnnnnnnnnnnnnnnnnnnnnnnnnnnnnnnnnnnnnnnnnnnnnnnnnnnnnnnnnnnnnnnnnnnnnnnnnnnnnnnnnnnnnnnnnnnnnnnnnnnnnnnnnnnnnnnnnnnnnnnnnnnnnnnnnnnnnnnnnnnnnnnnnnnnnnnnnnnnnnnnnnnnnnnnnnnnnnnnnnnnnnnnnnnnnnnnnnnnnnnnnnnnnnnnnnnnnnnnnnnnnnnnnnnnnnnnnnnnnnnnnnnnnnnnnnnnnnnnnnnnnnnnnnnnnnnnnnnnnnnnnnnnnnnnnnnnnnnnnnnnnnnnnnnnnnnnnnnnnnnnnnnnnnnnnnnnnnnnnnnnnnnnnnnnnnnnnnnnnnnnnnnnnnnnnnnnnnnnnnnnnnnnnnnnnnnnnnnnnnnnnnnnnnnnnnnnnnnnnnnnnnnnnnnnnnnnnnnnnnnnnnnnnnnnnnnnnnnnnnnnnnnnnnnnnnnnnnnnnnnnnnnnnnnnnnnnnnnnnnnnnnnnnnnnnnnnnnnnnnnnnnnnnnnnnnnnnnnnnnnnnnnnnnnnnnnnnnnnnnnnnnnnnnnnnnnnnnnnnnnnnnnnnnnnnnnnnnnnnnnnnnnnnnnnnnnnnnnnnnnnnnnnnnnnnnnnnnnnnnnnnnnnnnnnnnnnnnnnnnnnnnnnnnnnnnnnnnnnnnnnnnnnnnnnnnnnnnnnnnnnnnnnnnnnnnnnnnnnnnnnnnnnnnnnnnnnnnnnnnnnnnnnnnnnnnnnnnnnnnnnnnnnnnnnnnnnnnnnnnnnnnnnnnnnnnnnnnnnnnnnnnnnnnnnnnnnnnnnnnnnnnnnnnnnnnnnnnnnnnnnnnnnnnnnnnnnnnnnnnnnnnnnnnnnnnnnnnnnnnnnnnnnnnnnnnnnnnnnnnnnnnnnnnnnnnnnnnnnnnnnnnnnnnnnnnnnnnnnnnnnnnnnnnnnnnnnnnnnnnnnnnnnnnnnnnnnnnnnnnnnnnnnnnnnnnnnnnnnnnnnnnnnnnnnnnnnnnnnnnnnnnnnnnnnnnnnnnnnnnnnnnnnnnnnnnnnnnnnnnnnnnnnnnnnnnnnnnnnnnnnnnnnnnnnnnnnnnnnnnnnnnnnnnnnnnnnnnnnnnnnnnnnnnnnnnnnnnnnnnnnnnnnnnnnnnnnnnnnnnnnnnnnnnnnnnnnnnnnnnnnnnnnnnnnnnnnnnnnnnnnnnnnnnnnnnnnnnnnnnnnnnnnnnnnnnnnnnnnnnnnnnnnnnnnnnnnnnnnnnnnnnnnnnnnnnnnnnnnnnnnnnnnnnnnnnnnnnnnnnnnnnnnnnnnnnnnnnnnnnnnnnnnnnnnnnnnnnnnnnnnnnnnnnnnnnnnnnnnnnnnnnnnnnnnnnnnnnnnnnnnnnnnnnnnnnnnnnnnnnnnnnnnnnnnnnnnnnnnnnnnnnnnnnnnnnnnnnnnnnnnnnnnnnnnnnnnnnnnnnnnnnnnnnnnnnnnnnnnnnnnnnnnnnnnnnnnnnnnnnnnnnnnnnnnnnnnnnnnnnnnnnnnnnnnnnnnnnnnnnnnnnnnnnnnnnnnnnnnnnnnnnnnnnnnnnnnnnnnnnnnnnnnnnnnnnnnnnnnnnnnnnnnnnnnnnnnnnnnnnnnnnnnnnnnnnnnnnnnnnnnnnnnnnnnnnnnnnnnnnnnnnnnnnnnnnnnnnnnnnnnnnnnnnnnnnnnnnnnnnnnnnnnnnnnnnnnnnnnnnnnnnnnnnnnnnnnnnnnnnnnnnnnnnnnnnnnnnnnnnnnnnnnnnnnnnnnnnnnnnnnnnnnnnnnnnnnnnnnnnnnnnnnnnnnnnnnnnnnnnnnnnnnnnnnnnnnnnnnnnnnnnnnnnnnnnnnnnnnnnnnnnnnnnnnnnnnnnnnnnnnnnnnnnnnnnnnnnnnnnnnnnnnnnnnnnnnnnnnnnnnnnnnnnnnnnnnnnnnnnnnnnnnnnnnnnnnnnnnnnnnnnnnnnnnnnnnnnnnnnnnnnnnnnnnnnnnnnnnnnnnnnnnnnnnnnnnnnnnnnnnnnnnnnnnnnnnnnnnnnnnnnnnnnnnnnnnnnnnnnnnnnnnnnnnnnnnnnnnnnnnnnnnnnnnnnnnnnnnnnnnnnnnnnnnnnnnnnnnnnnnnnnnnnnnnnnnnnnnnnnnnnnnnnnnnnnnnnnnnnnnnnnnnnnnnnnnnnnnnnnnnnnnnnnnnnnnnnnnnnnnnnnnnnnnnnnnnnnnnnnnnnnnnnnnnnnnnnnnnnnnnnnnnnnnnnnnnnnnnnnnnnnnnnnnnnnnnnnnnnnnnnnnnnnnnnnnnnnnnnnnnnnnnnnnnnnnnnnnnnnnnnnnnnnnnnnnnnnnnnnnnnnnnnnnnnnnnnnnnnnnnnnnnnnnnnnnnnnnnnnnnnnnnnnnnnnnnnnnnnnnnnnnnnnnnnnnnnnnnnnnnnnnnnnnnnnnnnnnnnnnnnnnnnnnnnnnnnnnnnnnnnnnnnnnnnnnnnnnnnnnnnnnnnnnnnnnnnnnnnnnnnnnnnnnnnnnnnnnnnnnnnnnnnnnnnnnnnnnnnnnnnnnnnnnnnnnnnnnnnnnnnnnnnnnnnnnnnnnnnnnnnnnnnnnnnnnnnnnnnnnnnnnnnnnnnnnnnnnnnnnnnnnnnnnnnnnnnnnnnnnnnnnnnnnnnnnnnnnnnnnnnnnnnnnnnnnnnnnnnnnnnnnnnnnnnnnnnnnnnnnnnnnnnnnnnnnnnnnnnnnnnnnnnnnnnnnnnnnnnnnnnnnnnnnnnnnnnnnnnnnnnnnnnnnnnnnnnnnnnnnnnnnnnnnnnnnnnnnnnnnnnnnnnnnnnnnnnnnnnnnnnnnnnnnnnnnnnnnnnnnnnnnnnnnnnnnnnnnnnnnnnnnnnnnnnnnnnnnnnnnnnnnnnnnnnnnnnnnnnnnnnnnnnnnnnnnnnnnnnnnnnnnnnnnnnnnnnnnnnnnnnnnnnnnnnnnnnnnnnnnnnnnnnnnnnnnnnnnnnnnnnnnnnnnnnnnnnnnnnnnnnnnnnnnnnnnnnnnnnnnnnnnnnnnnnnnnnnnnnnnnnnnnnnnnnnnnnnnnnnnnnnnnnnnnnnnnnnnnnnnnnnnnnnnnnnnnnnnnnnnnnnnnnnnnnnnnnnnnnnnnnnnnnnnnnnnnnnnnnnnnnnnnnnnnnnnnnnnnnnnnnnnnnnnnnnnnnnnnnnnnnnnnnnnnnnnnnnnnnnnnnnnnnnnnnnnnnnnnnnnnnnnnnnnnnnnnnnnnnnnnnnnnnnnnnnnnnnnnnnnnnnnnnnnnnnnnnnnnnnnnnnnnnnnnnnnnnnnnnnnnnnnnnnnnnnnnnnnnnnnnnnnnnnnnnnnnnnnnnnnnnnnnnnnnnnnnnnnnnnnnnnnnnnnnnnnnnnnnnnnnnnnnnnnnnnnnnnnnnnnnnnnnnnnnnnnnnnnnnnnnnnnnnnnnnnnnnnnnnnnnnnnnnnnnnnnnnnnnnnnnnnnnnnnnnnnnnnnnnnnnnnnnnnnnnnnnnnnnnnnnnnnnnnnnnnnnnnnnnnnnnnnnnnnnnnnnnnnnnnnnnnnnnnnnnnnnnnnnnnnnnnnnnnnnnnnnnnnnnnnnnnnnnnnnnnnnnnnnnnnnnnnnnnnnnnnnnnnnnnnnnnnnnnnnnnnnnnnnnnnnnnnnnnnnnnnnnnnnnnnnnnnnnnnnnnnnnnnnnnnnnnnnnnnnnnnnnnnnnnnnnnnnnnnnnnnnnnnnnnnnnnnnnnnnnnnnnnnnnnnnnnnnnnnnnnnnnnnnnnnnnnnnnnnnnnnnnnnnnnnnnnnnnnnnnnnnnnnnnnnnnnnnnnnnnnnnnnnnnnnnnnnnnnnnnnnnnnnnnnnnnnnnnnnnnnnnnnnnnnnnnnnnnnnnnnnnnnnnnnnnnnnnnnnnnnnnnnnnnnnnnnnnnnnnnnnnnnnnnnnnnnnnnnnnnnnnnnnnnnnnnnnnnnnnnnnnnnnnnnnnnnnnnnnnnnnnnnnnnnnnnnnnnnnnnnnnnnnnnnnnnnnnnnnnnnnnnnnnnnnnnnnnnnnnnnnnnnnnnnnnnnnnnnnnnnnnnnnnnnnnnnnnnnnnnnnnnnnnnnnnnnnnnnnnnnnnnnnnnnnnnnnnnnnnnnnnnnnnnnnnnnnnnnnnnnnnnnnnnnnnnnnnnnnnnnnnnnnnnnnnnnnnnnnnnnnnnnnnnnnnnnnnnnnnnnnnnnnnnnnnnnnnnnnnnnnnnnnnnnnnnnnnnnnnnnnnnnnnnnnnnnnnnnnnnnnnnnnnnnnnnnnnnnnnnnnnnnnnnnnnnnnnnnnnnnnnnnnnnnnnnnnnnnnnnnnnnnnnnnnnnnnnnnnnnnnnnnnnnnnnnnnnnnnnnnnnnnnnnnnnnnnnnnnnnnnnnnnnnnnnnnnnnnnnnnnnnnnnnnnnnnnnnnnnnnnnnnnnnnnnnnnnnnnnnnnnnnnnnnnnnnnnnnnnnnnnnnnnnnnnnnnnnnnnnnnnnnnnnnnnnnnnnnnnnnnnnnnnnnnnnnnnnnnnnnnnnnnnnnnnnnnnnnnnnnnnnnnnnnnnnnnnnnnnnnnnnnnnnnnnnnnnnnnnnnnnnnnnnnnnnnnnnnnnnnnnnnnnnnnnnnnnnnnnnnnnnnnnnnnnnnnnnnnnnnnnnnnnnnnnnnnnnnnnnnnnnnnnnnnnnnnnnnnnnnnnnnnnnnnnnnnnnnnnnnnnnnnnnnnnnnnnnnnnnnnnnnnnnnnnnnnnnnnnnnnnnnnnnnnnnnnnnnnnnnnnnnnnnnnnnnnnnnnnnnnnnnnnnnnnnnnnnnnnnnnnnnnnnnnnnnnnnnnnnnnnnnnnnnnnnnnnnnnnnnnnnnnnnnnnnnnnnnnnnnnnnnnnnnnnnnnnnnnnnnnnnnnnnnnnnnnnnnnnnnnnnnnnnnnnnnnnnnnnnnnnnnnnnnnnnnnnnnnnnnnnnnnnnnnnnnnnnnnnnnnnnnnnnnnnnnnnnnnnnnnnnnnnnnnnnnnnnnnnnnnnnnnnnnnnnnnnnnnnnnnnnnnnnnnnnnnnnnnnnnnnnnnnnnnnnnnnnnnnnnnnnnnnnnnnnnnnnnnnnnnnnnnnnnnnnnnnnnnnnnnnnnnnnnnnnnnnnnnnnnnnnnnnnnnnnnnnnnnnnnnnnnnnnnnnnnnnnnnnnnnnnnnnnnnnnnnnnnnnnnnnnnnnnnnnnnnnnnnnnnnnnnnnnnnnnnnnnnnnnnnnnnnnnnnnnnnnnnnnnnnnnnnnnnnnnnnnnnnnnnnnnnnnnnnnnnnnnnnnnnnnnnnnnnnnnnnnnnnnnnnnnnnnnnnnnnnnnnnnnnnnnnnnnnnnnnnnnnnnnnnnnnnnnnnnnnnnnnnnnnnnnnnnnnnnnnnnnnnnnnnnnnnnnnnnnnnnnnnnnnnnnnnnnnnnnnnnnnnnnnnnnnnnnnnnnnnnnnnnnnnnnnnnnnnnnnnnnnnnnnnnnnnnnnnnnnnnnnnnnnnnnnnnnnnnnnnnnnnnnnnnnnnnnnnnnnnnnnnnnnnnnnnnnnnnnnnnnnnnnnnnnnnnnnnnnnnnnnnnnnnnnnnnnnnnnnnnnnnnnnnnnnnnnnnnnnnnnnnnnnnnnnnnnnnnnnnnnnnnnnnnnnnnnnnnnnnnnnnnnnnnnnnnnnnnnnnnnnnnnnnnnnnnnnnnnnnnnnnnnnnnnnnnnnnnnnnnnnnnnnnnnnnnnnnnnnnnnnnnnnnnnnnnnnnnnnnnnnnnnnnnnnnnnnnnnnnnnnnnnnnnnnnnnnnnnnnnnnnnnnnnnnnnnnnnnnnnnnnnnnnnnnnnnnnnnnnnnnnnnnnnnnnnnnnnnnnnnnnnnnnnnnnnnnnnnnnnnnnnnnnnnnnnnnnnnnnnnnnnnnnnnnnnnnnnnnnnnnnnnnnnnnnnnnnnnnnnnnnnnnnnnnnnnnnnnnnnnnnnnnnnnnnnnnnnnnnnnnnnnnnnnnnnnnnnnnnnnnnnnnnnnnnnnnnnnnnnnnnnnnnnnnnnnnnnnnnnnnnnnnnnnnnnnnnnnnnnnnnnnnnnnnnnnnnnnnnnnnnnnnnnnnnnnnnnnnnnnnnnnnnnnnnnnnnnnnnnnnnnnnnnnnnnnnnnnnnnnnnnnnnnnnnnnnnnnnnnnnnnnnnnnnnnnnnnnnnnnnnnnnnnnnnnnnnnnnnnnnnnnnnnnnnnnnnnnnnnnnnnnnnnnnnnnnnnnnnnnnnnnnnnnnnnnnnnnnnnnnnnnnnnnnnnnnnnnnnnnnnnnnnnnnnnnnnnnnnnnnnnnnnnnnnnnnnnnnnnnnnnnnnnnnnnnnnnnnnnnnnnnnnnnnnnnnnnnnnnnnnnnnnnnnnnnnnnnnnnnnnnnnnnnnnnnnnnnnnnnnnnnnnnnnnnnnnnnnnnnnnnnnnnnnnnnnnnnnnnnnnnnnnnnnnnnnnnnnnnnnnnnnnnnnnnnnnnnnnnnnnnnnnnnnnnnnnnnnnnnnnnnnnnnnnnnnnnnnnnnnnnnnnnnnnnnnnnnnnnnnnnnnnnnnnnnnnnnnnnnnnnnnnnnnnnnnnnnnnnnnnnnnnnnnnnnnnnnnnnnnnnnnnnnnnnnnnnnnnnnnnnnnnnnnnnnnnnnnnnnnnnnnnnnnnnnnnnnnnnnnnnnnnnnnnnnnnnnnnnnnnnnnnnnnnnnnnnnnnnnnnnnnnnnnnnnnnnnnnnnnnnnnnnnnnnnnnnnnnnnnnnnnnnnnnnnnnnnnnnnnnnnnnnnnnnnnnnnnnnnnnnnnnnnnnnnnnnnnnnnnnnnnnnnnnnnnnnnnnnnnnnnnnnnnnnnnnnnnnnnnnnnnnnnnnnnnnnnnnnnnnnnnnnnnnnnnnnnnnnnnnnnnnnnnnnnnnnnnnnnnnnnnnnnnnnnnnnnnnnnnnnnnnnnnnnnnnnnnnnnnnnnnnnnnnnnnnnnnnnnnnnnnnnnnnnnnnnnnnnnnnnnnnnnnnnnnnnnnnnnnnnnnnnnnnnnnnnnnnnnnnnnnnnnnnnnnnnnnnnnnnnnnnnnnnnnnnnnnnnnnnnnnnnnnnnnnnnnnnnnnnnnnnnnnnnnnnnnnnnnnnnnnnnnnnnnnnnnnnnnnnnnnnnnnnnnnnnnnnnnnnnnnnnnnnnnnnnnnnnnnnnnnnnnnnnnnnnnnnnnnnnnnnnnnnnnnnnnnnnnnnnnnnnnnnnnnnnnnnnnnnnnnnnnnnnnnnnnnnnnnnnnnnnnnnnnnnnnnnnnnnnnnnnnnnnnnnnnnnnnnnnnnnnnnnnnnnnnnnnnnnnnnnnnnnnnnnnnnnnnnnnnnnnnnnnnnnnnnnnnnnnnnnnnnnnnnnnnnnnnnnnnnnnnnnnnnnnnnnnnnnnnnnnnnnnnnnnnnnnnnnnnnnnnnnnnnnnnnnnnnnnnnnnnnnnnnnnnnnnnnnnnnnnnnnnnnnnnnnnnnnnnnnnnnnnnnnnnnnnnnnnnnnnnnnnnnnnnnnnnnnnnnnnnnnnnnnnnnnnnnnnnnnnnnnnnnnnnnnnnnnnnnnnnnnnnnnnnnnnnnnnnnnnnnnnnnnnnnnnnnnnnnnnnnnnnnnnnnnnnnnnnnnnnnnnnnnnnnnnnnnnnnnnnnnnnnnnnnnnnnnnnnnnnnnnnnnnnnnnnnnnnnnnnnnnnnnnnnnnnnnnnnnnnnnnnnnnnnnnnnnnnnnnnnnnnnnnnnnnnnnnnnnnnnnnnnnnnnnnnnnnnnnnnnnnnnnnnnnnnnnnnnnnnnnnnnnnnnnnnnnnnnnnnnnnnnnnnnnnnnnnnnnnnnnnnnnnnnnnnnnnnnnnnnnnnnnnnnnnnnnnnnnnnnnnnnnnnnnnnnnnnnnnnnnnnnnnnnnnnnnnnnnnnnnnnnnnnnnnnnnnnnnnnnnnnnnnnnnnnnnnnnnnnnnnnnnnnnnnnnnnnnnnnnnnnnnnnnnnnnnnnnnnnnnnnnnnnnnnnnnnnnnnnnnnnnnnnnnnnnnnnnnnnnnnnnnnnnnnnnnnnnnnnnnnnnnnnnnnnnnnnnnnnnnnnnnnnnnnnnnnnnnnnnnnnnnnnnnnnnnnnnnnnnnnnnnnnnnnnnnnnnnnnnnnnnnnnnnnnnnnnnnnnnnnnnnnnnnnnnnnnnnnnnnnnnnnnnnnnnnnnnnnnnnnnnnnnnnnnnnnnnnnnnnnnnnnnnnnnnnnnnnnnnnnnnnnnnnnnnnnnnnnnnnnnnnnnnnnnnnnnnnnnnnnnnnnnnnnnnnnnnnnnnnnnnnnnnnnnnnnnnnnnnnnnnnnnnnnnnnnnnnnnnnnnnnnnnnnnnnnnnnnnnnnnnnnnnnnnnnnnnnnnnnnnnnnnnnnnnnnnnnnnnnnnnnnnnnnnnnnnnnnnnnnnnnnnnnnnnnnnnnnnnnnnnnnnnnnnnnnnnnnnnnnnnnnnnnnnnnnnnnnnnnnnnnnnnnnnnnnnnnnnnnnnnnnnnnnnnnnnnnnnnnnnnnnnnnnnnnnnnnnnnnnnnnnnnnnnnnnnnnnnnnnnnnnnnnnnnnnnnnnnnnnnnnnnnnnnnnnnnnnnnnnnnnnnnnnnnnnnnnnnnnnnnnnnnnnnnnnnnnnnnnnnnnnnnnnnnnnnnnnnnnnnnnnnnnnnnnnnnnnnnnnnnnnnnnnnnnnnnnnnnnnnnnnnnnnnnnnnnnnnnnnnnnnnnnnnnnnnnnnnnnnnnnnnnnnnnnnnnnnnnnnnnnnnnnnnnnnnnnnnnnnnnnnnnnnnnnnnnnnnnnnnnnnnnnnnnnnnnnnnnnnnnnnnnnnnnnnnnnnnnnnnnnnnnnnnnnnnnnnnnnnnnnnnnnnnnnnnnnnnnnnnnnnnnnnnnnnnnnnnnnnnnnnnnnnnnnnnnnnnnnnnnnnnnnnnnnnnnnnnnnnnnnnnnnnnnnnnnnnnnnnnnnnnnnnnnnnnnnnnnnnnnnnnnnnnnnnnnnnnnnnnnnnnnnnnnnnnnnnnnnnnnnnnnnnnnnnnnnnnnnnnnnnnnnnnnnnnnnnnnnnnnnnnnnnnnnnnnnnnnnnnnnnnnnnnnnnnnnnnnnnnnnnnnnnnnnnnnnnnnnnnnnnnnnnnnnnnnnnnnnnnnnnnnnnnnnnnnnnnnnnnnnnnnnnnnnnnnnnnnnnnnnnnnnnnnnnnnnnnnnnnnnnnnnnnnnnnnnnnnnnnnnnnnnnnnnnnnnnnnnnnnnnnnnnnnnnnnnnnnnnnnnnnnnnnnnnnnnnnnnnnnnnnnnnnnnnnnnnnnnnnnnnnnnnnnnnnnnnnnnnnnnnnnnnnnnnnnnnnnnnnnnnnnnnnnnnnnnnnnnnnnnnnnnnnnnnnnnnnnnnnnnnnnnnnnnnnnnnnnnnnnnnnnnnnnnnnnnnnnnnnnnnnnnnnnnnnnnnnnnnnnnnnnnnnnnnnnnnnnnnnnnnnnnnnnnnnnnnnnnnnnnnnnnnnnnnnnnnnnnnnnnnnnnnnnnnnnnnnnnnnnnnnnnnnnnnnnnnnnnnnnnnnnnnnnnnnnnnnnnnnnnnnnnnnnnnnnnnnnnnnnnnnnnnnnnnnnnnnnnnnnnnnnnnnnnnnnnnnnnnnnnnnnnnnnnnnnnnnnnnnnnnnnnnnnnnnnnnnnnnnnnnnnnnnnnnnnnnnnnnnnnnnnnnnnnnnnnnnnnnnnnnnnnnnnnnnnnnnnnnnnnnnnnnnnnnnnnnnnnnnnnnnnnnnnnnnnnnnnnnnnnnnnnnnnnnnnnnnnnnnnnnnnnnnnnnnnnnnnnnnnnnnnnnnnnnnnnnnnnnnnnnnnnnnnnnnnnnnnnnnnnnnnnnnnnnnnnnnnnnnnnnnnnnnnnnnnnnnnnnnnnnnnnnnnnnnnnnnnnnnnnnnnnnnnnnnnnnnnnnnnnnnnnnnnnnnnnnnnnnnnnnnnnnnnnnnnnnnnnnnnnnnnnnnnnnnnnnnnnnnnnnnnnnnnnnnnnnnnnnnnnnnnnnnnnnnnnnnnnnnnnnnnnnnnnnnnnnnnnnnnnnnnnnnnnnnnnnnnnnnnnnnnnnnnnnnnnnnnnnnnnnnnnnnnnnnnnnnnnnnnnnnnnnnnnnnnnnnnnnnnnnnnnnnnnnnnnnnnnnnnnnnnnnnnnnnnnnnnnnnnnnnnnnnnnnnnnnnnnnnnnnnnnnnnnnnnnnnnnnnnnnnnnnnnnnnnnnnnnnnnnnnnnnnnnnnnnnnnnnnnnnnnnnnnnnnnnnnnnnnnnnnnnnnnnnnnnnnnnnnnnnnnnnnnnnnnnnnnnnnnnnnnnnnnnnnnnnnnnnnnnnnnnnnnnnnnnnnnnnnnnnnnnnnnnnnnnnnnnnnnnnnnnnnnnnnnnnnnnnnnnnnnnnnnnnnnnnnnnnnnnnnnnnnnnnnnnnnnnnnnnnnnnnnnnnnnnnnnnnnnnnnnnnnnnnnnnnnnnnnnnnnnnnnnnnnnnnnnnnnnnnnnnnnnnnnnnnnnnnnnnnnnnnnnnnnnnnnnnnnnnnnnnnnnnnnnnnnnnnnnnnnnnnnnnnnnnnnnnnnnnnnnnnnnnnnnnnnnnnnnnnnnnnnnnnnnnnnnnnnnnnnnnnnnnnnnnnnnnnnnnnnnnnnnnnnnnnnnnnnnnnnnnnnnnnnnnnnnnnnnnnnnnnnnnnnnnnnnnnnnnnnnnnnnnnnnnnnnnnnnnnnnnnnnnnnnnnnnnnnnnnnnnnnnnnnnnnnnnnnnnnnnnnnnnnnnnnnnnnnnnnnnnnnnnnnnnnnnnnnnnnnnnnnnnnnnnnnnnnnnnnnnnnnnnnnnnnnnnnnnnnnnnnnnnnnnnnnnnnnnnnnnnnnnnnnnnnnnnnnnnnnnnnnnnnnnnnnnnnnnnnnnnnnnnnnnnnnnnnnnnnnnnnnnnnnnnnnnnnnnnnnnnnnnnnnnnnnnnnnnnnnnnnnnnnnnnnnnnnnnnnnnnnnnnnnnnnnnnnnnnnnnnnnnnnnnnnnnnnnnnnnnnnnnnnnnnnnnnnnnnnnnnnnnnnnnnnnnnnnnnnnnnnnnnnnnnnnnnnnnnnnnnnnnnnnnnnnnnnnnnnnnnnnnnnnnnnnnnnnnnnnnnnnnnnnnnnnnnnnnnnnnnnnnnnnnnnnnnnnnnnnnnnnnnnnnnnnnnnnnnnnnnnnnnnnnnnnnnnnnnnnnnnnnnnnnnnnnnnnnnnnnnnnnnnnnnnnnnnnnnnnnnnnnnnnnnnnnnnnnnnnnnnnnnnnnnnnnnnnnnnnnnnnnnnnnnnnnnnnnnnnnnnnnnnnnnnnnnnnnnnnnnnnnnnnnnnnnnnnnnnnnnnnnnnnnnnnnnnnnnnnnnnnnnnnnnnnnnnnnnnnnnnnnnnnnnnnnnnnnnnnnnnnnnnnnnnnnnnnnnnnnnnnnnnnnnnnnnnnnnnnnnnnnnnnnnnnnnnnnnnnnnnnnnnnnnnnnnnnnnnnnnnnnnnnnnnnnnnnnnnnnnnnnnnnnnnnnnnnnnnnnnnnnnnnnnnnnnnnnnnnnnnnnnnnnnnnnnnnnnnnnnnnnnnnnnnnnnnnnnnnnnnnnnnnnnnnnnnnnnnnnnnnnnnnnnnnnnnnnnnnnnnnnnnnnnnnnnnnnnnnnnnnnnnnnnnnnnnnnnnnnnnnnnnnnnnnnnnnnnnnnnnnnnnnnnnnnnnnnnnnnnnnnnnnnnnnnnnnnnnnnnnnnnnnnnnnnnnnnnnnnnnnnnnnnnnnnnnnnnnnnnnnnnnnnnnnnnnnnnnnnnnnnnnnnnnnnnnnnnnnnnnnnnnnnnnnnnnnnnnnnnnnnnnnnnnnnnnnnnnnnnnnnnnnnnnnnnnnnnnnnnnnnnnnnnnnnnnnnnnnnnnnnnnnnnnnnnnnnnnnnnnnnnnnnnnnnnnnnnnnnnnnnnnnnnnnnnnnnnnnnnnnnnnnnnnnnnnnnnnnnnnnnnnnnnnnnnnnnnnnnnnnnnnnnnnnnnnnnnnnnnnnnnnnnnnnnnnnnnnnnnnnnnnnnnnnnnnnnnnnnnnnnnnnnnnnnnnnnnnnnnnnnnnnnnnnnnnnnnnnnnnnnnnnnnnnnnnnnnnnnnnnnnnnnnnnnnnnnnnnnnnnnnnnnnnnnnnnnnnnnnnnnnnnnnnnnnnnnnnnnnnnnnnnnnnnnnnnnnnnnnnnnnnnnnnnnnnnnnnnnnnnnnnnnnnnnnnnnnnnnnnnnnnnnnnnnnnnnnnnnnnnnnnnnnnnnnnnnnnnnnnnnnnnnnnnnnnnnnnnnnnnnnnnnnnnnnnnnnnnnnnnnnnnnnnnnnnnnnnnnnnnnnnnnnnnnnnnnnnnnnnnnnnnnnnnnnnnnnnnnnnnnnnnnnnnnnnnnnnnnnnnnnnnnnnnnnnnnnnnnnnnnnnnnnnnnnnnnnnnnnnnnnnnnnnnnnnnnnnnnnnnnnnnntctcgcccgggcagttcgtctcagtcagatacaacactttctccacagtaatccgtcaggtctcacgagcagagaattacctgacctttgtggagtctgtatgcgaacgattcaaagagatattcaatcacttgatactgaccttaagatacctctgacgcagaacggagaccggtatgggattactgaaggctacattctgccaccggtttccctctcactttatgaggcaatggtaatatttctggcgtgccgtctagcgctccgtcagaccgatgagaacaacccgcatatcgaaaaagctcttacaaagatttcctccgtattgccttcaccccttgcgatacgtttgaaagagagcgccagttcggttggcgataaaaaggaagacttagagtttatacgtaactttgagaagattgcaatcgcatggacaacacaacgccaggtgagaatgaagtaccagtcttttgaaagcgaaggcatcaaggaatggtttctggaaccttatttcgttgatatgacgggtgttggcttctccgtctacgtcatcgggcatgctgtgagggaaggaaaggaaggcattattaccttcaagcttgaacgtatgaaagatttggaggtcttgaacaagcggttcgagattccccctgatataaatatcgggaagttgttagcatcaagctggggtattttcaccggagatgcaattagcattgttctgaaattttcaccacatgtgacacgccgcgtaaaggaatcagtgtggcatatttcacaattaattgaggaaactcccgatggcggatgccggctctctttacaggtaaacagtgcattggaaataaccccctggatacgtagttgggggccggatgtcgaggtaattgaaccgttgcgtcttaaagagcaattccgagactggagcgaaacactttacagattgtatcacgaataggtgttttgacaacgaaaatagaacaaatgtatgattagctctgccaagaaaagatacattgcaggtataacaacacgcgcggaggataacattgaaatacaacctgcttgaggagcactggattcctgttctcggaaccgatgggaagcttggctacgtgggtatcaaggatacgctgacccatgcagggcgcatccgttgtatctgcttagcaagcccactcgacatgttcgccgtgcaccggttcctgcttactttgctttattggaaagcagacttagcgggtggggtggaagaggttcgggcgtcgttgctgaagagcgaattgccgagcgcggtgctcggcggtatcaacaaggaagaccattgttttgacctcttcgataaagaatcgccattcctgcaggacacgtctgtatccatctccaaggaaaaagaaaagaagtcggtcggctctttgtttgctgaattagctgtggctactaacatagcccactttcatcacggcgacgatgagagtatgcggctatgcctgccgtgcgcaaccatcggcctgctccgtgtggttccgtggagccaatcaggcggccaaggaaagactccctcggtacacaatgcgccgccaattatggcaatggcaactggcgataacttggcggccacgcttggtttgaaccttgtaccgttggatactaaagcgggcaaagcgcagtggtccggctactttacgccgactgattcgacgagtccaatcccctatctcgaggcgctaacttggaatccccggcgcatccttctcccctcagcccaagaaggcacttgctggtactgcggtgaaagcaatgtacccacggtcgggaaaatcgtgtacatgaaaaacgaaaacacaaaaaagcgtgcagacgagaaattgttcgaatggcaggatccggctgccttttatgctctatacgatgtgagtaagaaatatgacaaagtcaagaacgtgccgtataaaacgataaaaagttcccgggagaacttggctaccgatggccgagacttgcagcgcctggcgcatgacgatccgtttcccgaatctaccgtagtcgtgaagaaccccaagcatgagggttggctcctggtcgttccatgcacaaatcccgcgaacaacaaaacctacgatcatcggcaggttgagctggcacaactttcaccagagacgattcgctccttaccgcctgccgtccccccgtccaggagacagggcatcgacggttggaaagaacccgaaagagtcgagcgcaaggacgttgagcattttgtgccggctgcggtgaggcttcttacgcataccgattgggttacgctatcgaacgctgcctacatggatatgcacgattcaccagcggcgttcgatgtttttagcggcttgtattggggacttcgtgacaagaagaccaaaggacttccgtcgcggaatgtggcgtggttgatgctcaaactgatggcatcagtccccgcacgtgcccgcactcttcatcccaacgccgaattctgcccgctgcagagactgccgaaacgacagagcaatgagcgcgacatggcgtccccctaccctgtttctttcccacgcggtcgtcggcttgaggccgcacttagcgccgcacttgttgacaatctgcgcaagagaaatcccgaacctgttgactggacacgtctatgttacggactagaccaattactcgactaattaagagaatcgaaaaaggagaaacattatgtttgtacagattcatatcctccagagcatgccaccaggaaacttaaaccgagatgacgaagggcagccgaaaaagtgtatttttggcggcgtcacgcgcggccgcatcagcagtcagtgcctcaagcgaaatatccgccattctatacaattcaaagaagtgttcggcgatgacctcgcaaccagaacgacatacctgccacgtatggtggccgacgaattgaggaagagcgacccaagcattaccgatgacgaattgaacaaagtcaaggccgcgcttgccagcaaattcaaggctgaaaagcgcggaggcaattcagacgaagcagcagagggtgaggaggcacaagcgcagcccgaaagctcttctgctgtgagcgatggagcagaccggacgggtcaactggtctttttcccaccaccctttgctaaagaaattgctgagcttgtcgtagaactgcgtgggcgcacccctccggcatacaaccggttcattgggaccaaagcaaagctctctaaagctgaagagaaggctctagacaaaacggttgatgagtttgtccagcgagcttccgcggcgagcaagaagctcacggttgacatcggccttttcggcagaatgactaccagtgacctggtcgtgaacgtggaagcagcctgtcaggtggcgcatgccattagcacgcatgagacgctaatcgagagcgactacttcaccgcgatggatgaaaagaagcaggaattcgcatcaactcagaccgagaaaacaggcgctgcctttctcggctctggcgataccgaaacgtttttcaattcagccgtctactacaagtatctcaatctcgacatcgatgccttgaagaagcacctttcctggcaaagcgataaggcagctcttgcagccggggtgcttgtccgcgccgcggcgctatccaatcccacaggcaaacagaacagctttgccgcgcacggcgttcctgaacttatcctcgtcgaagtatcggaagcaaagtgtccaatcagctatgcaaatgccttcctagaacccgttgacggtattaacctcatgcgtgaatcagcggcggcaatgagtaattacatcgacaccgtagtagcagccttctcgccgacagacatgagccgagcgctcctggcagtggggtctgcttcggtagatatcgcaaaagctaaaagagttaacacactcgaagaccttatcaaatccgtggttaaactcgtggagggtaccgcatgagcagtgaccacaatactttgtttctgcgcttggccggtcccatgcaggcgtggggcacctcatcccgttttcagttgcgccgcactgacctttacccgagcaagtccggcatactgggaatgttgctctgtgccatgggtgttaatcgtgaagattcacggcagccgctcaagctgctgacaccactactcatgggagtacgcgtcgaccggactggaaatcttgattgggattaccagacagcgggagccaagttaggcattcgaagcgccgacggcaaaatcaagataaccgcatcgaccggcgaatacgaaaccttgctttcgcgccgtcaatatctttttgatgcctcatttctggttgcgttacatggcgattcaaccataatcgcctcttgcgccaacgccctgagaaatccgacctggcctttgttccttggaagaaagtgctgcgtcccggccgagcctgtttacgccggcaccgaaagttttgacacgctgacccaagcgctttcgtcggtcccctggcgccccagaatcaacgccattgaccgcgagggtagcggggcgtctgtaacactcgatacatatttggagcagccgccagagagacttgtgcccatgggtgcccggctcgtttccgatgtgcccgtagccttcggtttctataattatgctccgcgtttggttatcaagaatcaggttacggtgccaatgggacaggcaacccaaacacagcgactgagcgcacgtcatggcaacccttacagtgaacacttctatacagtcgcgaggccgagtcgtctgaaacttgataacggcctttgcgtcttctgcaagtcccctgctgtggaagtgcatcatgtgtcctacgaaaatgccggacacgagaccgactctgatctccggtcgttatgcaagacctgtcacgatgcgtgtacgatgctggaatacggtcatggccgaaaagaaagagttgacccttgcaacccggctcaacgcacgaccattctcgaacaaatcaatcgtaatctcaaagagcaacatcctggccggcggcgcgaattgcttaaagctgtgcggtcgacctgagaaggtattttttgacatagcgcccggcgcaatgccggataaggagttagggatgtttctttctcttcttaaagttgacttggacattgcccccggacggctctggctccgtaacctttaccgcgttcatcagcgcctgtgcatggcgtttccatcctccgcgcgcaaagagggcgaccctccgttcttggaaccctttcgtcctgatgacttccagcatgttcacggcccgcgcacggaggaacaagcatttcttttccgcattgaccctctacccggcgggaatgctgcgattgtgatgcaatctggaatgaagccggactgggactatgcctttaacaacgctggctatcttcttgccgcgccaccccagttgaagacttatgaaccacaattccagaaccagcagcttctcaggttccgtctgctggcaaaccccacacggaagatagatacgaagacccgccaggatggcaccaaaagcaacggtaagcgagtccccgtggacaaggctaacctcgatgaatggctcatccgccatgccgaaaagtccgggttcaccgtcgagcagttgctcaacgtgcaaacgggctacgtcggcgcttccaatggcaaagatgacgaactcaagcggttcttctacgcccgctacgacggcatactccgtgtggcggatgctgagcatctgcacgattccgtcattcagggcattggctccgccaaaggcttcggcttcgggctgctttctctagcgcgtatcaaggagtagctatgcgtacattacatgaattgccgcgtttccgtgatagatggagccacctctacatggaaatggggcggctggatgttgatgcgaatgggttggtattccagcagggtgagagcttcgtgcgggtgccaattgaccagttaagcatcattatgctgggacccggctccacggttactcatgcggcggtgaaatccctttcccagaataactgcttattatcatggacagggcaggatggtattcggctctatgcggcaagcattggtggcacctacagcgcacggaggatgattcgccaggcgaaactggttagtgacgaggagaaacgtctggaagttgcctggcgtatgtaccgtttccgctttaaagaagcggttcctcaggtggttagtctggagcaaatccggggtatggaaggcatacgcgtgcgtcgcacctatgccgaggcttcagctaaatacggggtggaatggaaaggtcgccagtatgaccaggatgattggaacaaaggtgacccaatcaaccgcgctctatccgcggcgaacgcttgtctctatggagtttgtcacgcaggtattctttcagctggctattcatccgctctgggatttgttcacacgggtaaaatgctaagcttcgtttatgacatcggagacctctacaaaaccgaggttacaatccctactgctttcaggatagctgctcaaaatccaccggaattagaaagagtagtacgcatggagtgccgaaaggtgttccacgaattcagactgatggataggctcttgcctgacatcgcggaggtgctgggtgttagtgatgatactggagaaaacgccgacgagcttgaagggcgcattgtcacgctggctgttggaaccgaagacgggggtttttcttgggaacccgagcgcgagagttagagacgaactttgggcaacagcggtgaaaaaggcaaaggataccggcgtggtaatgcaaatctggacagaccagaacccgcaaggtttttcttaccggcaaactggtgaaagggatcggagatttattgacctggatggtctggcattggttgagttcaaacgcgctcaagagattgtcaaaagcaatttttctgacactagaacaccctagctaggcatgaggcataaaccggttagctttgggattgcagagtattccccacgtgtgtgggggtgaaccgtcaaggaaaagctagattcggacgccaccgacagtattccccacgtgtgtgggggtgaaccagtacatattctcatccgcatcgagcacgccgccgtattccccacgtgtgtgggggtgaaccgtaaactcgtttaatagcggacaggctcgcctcgtattccccacgtgtgtgggggtgaaccggcata

SEQ ID NO: 1112 - DNA, 103754 bp, Artificial Sequence
  Synthetic Oligonucleotide
  misc_feature (1)..(96547): n is a, c, g, or t
nnnnnnnnnnnnnnnnnnnnnnnnnnnnnnnnnnnnnnnnnnnnnnnnnnnnnnnnnnnnnnnnnnnnnnnnnnnnnnnnnnnnnnnnnnnnnnnnnnnnnnnnnnnnnnnnnnnnnnnnnnnnnnnnnnnnnnnnnnnnnnnnnnnnnnnnnnnnnnnnnnnnnnnnnnnnnnnnnnnnnnnnnnnnnnnnnnnnnnnnnnnnnnnnnnnnnnnnnnnnnnnnnnnnnnnnnnnnnnnnnnnnnnnnnnnnnnnnnnnnnnnnnnnnnnnnnnnnnnnnnnnnnnnnnnnnnnnnnnnnnnnnnnnnnnnnnnnnnnnnnnnnnnnnnnnnnnnnnnnnnnnnnnnnnnnnnnnnnnnnnnnnnnnnnnnnnnnnnnnnnnnnnnnnnnnnnnnnnnnnnnnnnnnnnnnnnnnnnnnnnnnnnnnnnnnnnnnnnnnnnnnnnnnnnnnnnnnnnnnnnnnnnnnnnnnnnnnnnnnnnnnnnnnnnnnnnnnnnnnnnnnnnnnnnnnnnnnnnnnnnnnnnnnnnnnnnnnnnnnnnnnnnnnnnnnnnnnnnnnnnnnnnnnnnnnnnnnnnnnnnnnnnnnnnnnnnnnnnnnnnnnnnnnnnnnnnnnnnnnnnnnnnnnnnnnnnnnnnnnnnnnnnnnnnnnnnnnnnnnnnnnnnnnnnnnnnnnnnnnnnnnnnnnnnnnnnnnnnnnnnnnnnnnnnnnnnnnnnnnnnnnnnnnnnnnnnnnnnnnnnnnnnnnnnnnnnnnnnnnnnnnnnnnnnnnnnnnnnnnnnnnnnnnnnnnnnnnnnnnnnnnnnnnnnnnnnnnnnnnnnnnnnnnnnnnnnnnnnnnnnnnnnnnnnnnnnnnnnnnnnnnnnnnnnnnnnnnnnnnnnnnnnnnnnnnnnnnnnnnnnnnnnnnnnnnnnnnnnnnnnnnnnnnnnnnnnnnnnnnnnnnnnnnnnnnnnnnnnnnnnnnnnnnnnnnnnnnnnnnnnnnnnnnnnnnnnnnnnnnnnnnnnnnnnnnnnnnnnnnnnnnnnnnnnnnnnnnnnnnnnnnnnnnnnnnnnnnnnnnnnnnnnnnnnnnnnnnnnnnnnnnnnnnnnnnnnnnnnnnnnnnnnnnnnnnnnnnnnnnnnnnnnnnnnnnnnnnnnnnnnnnnnnnnnnnnnnnnnnnnnnnnnnnnnnnnnnnnnnnnnnnnnnnnnnnnnnnnnnnnnnnnnnnnnnnnnnnnnnnnnnnnnnnnnnnnnnnnnnnnnnnnnnnnnnnnnnnnnnnnnnnnnnnnnnnnnnnnnnnnnnnnnnnnnnnnnnnnnnnnnnnnnnnnnnnnnnnnnnnnnnnnnnnnnnnnnnnnnnnnnnnnnnnnnnnnnnnnnnnnnnnnnnnnnnnnnnnnnnnnnnnnnnnnnnnnnnnnnnnnnnnnnnnnnnnnnnnnnnnnnnnnnnnnnnnnnnnnnnnnnnnnnnnnnnnnnnnnnnnnnnnnnnnnnnnnnnnnnnnnnnnnnnnnnnnnnnnnnnnnnnnnnnnnnnnnnnnnnnnnnnnnnnnnnnnnnnnnnnnnnnnnnnnnnnnnnnnnnnnnnnnnnnnnnnnnnnnnnnnnnnnnnnnnnnnnnnnnnnnnnnnnnnnnnnnnnnnnnnnnnnnnnnnnnnnnnnnnnnnnnnnnnnnnnnnnnnnnnnnnnnnnnnnnnnnnnnnnnnnnnnnnnnnnnnnnnnnnnnnnnnnnnnnnnnnnnnnnnnnnnnnnnnnnnnnnnnnnnnnnnnnnnnnnnnnnnnnnnnnnnnnnnnnnnnnnnnnnnnnnnnnnnnnnnnnnnnnnnnnnnnnnnnnnnnnnnnnnnnnnnnnnnnnnnnnnnnnnnnnnnnnnnnnnnnnnnnnnnnnnnnnnnnnnnnnnnnnnnnnnnnnnnnnnnnnnnnnnnnnnnnnnnnnnnnnnnnnnnnnnnnnnnnnnnnnnnnnnnnnnnnnnnnnnnnnnnnnnnnnnnnnnnnnnnnnnnnnnnnnnnnnnnnnnnnnnnnnnnnnnnnnnnnnnnnnnnnnnnnnnnnnnnnnnnnnnnnnnnnnnnnnnnnnnnnnnnnnnnnnnnnnnnnnnnnnnnnnnnnnnnnnnnnnnnnnnnnnnnnnnnnnnnnnnnnnnnnnnnnnnnnnnnnnnnnnnnnnnnnnnnnnnnnnnnnnnnnnnnnnnnnnnnnnnnnnnnnnnnnnnnnnnnnnnnnnnnnnnnnnnnnnnnnnnnnnnnnnnnnnnnnnnnnnnnnnnnnnnnnnnnnnnnnnnnnnnnnnnnnnnnnnnnnnnnnnnnnnnnnnnnnnnnnnnnnnnnnnnnnnnnnnnnnnnnnnnnnnnnnnnnnnnnnnnnnnnnnnnnnnnnnnnnnnnnnnnnnnnnnnnnnnnnnnnnnnnnnnnnnnnnnnnnnnnnnnnnnnnnnnnnnnnnnnnnnnnnnnnnnnnnnnnnnnnnnnnnnnnnnnnnnnnnnnnnnnnnnnnnnnnnnnnnnnnnnnnnnnnnnnnnnnnnnnnnnnnnnnnnnnnnnnnnnnnnnnnnnnnnnnnnnnnnnnnnnnnnnnnnnnnnnnnnnnnnnnnnnnnnnnnnnnnnnnnnnnnnnnnnnnnnnnnnnnnnnnnnnnnnnnnnnnnnnnnnnnnnnnnnnnnnnnnnnnnnnnnnnnnnnnnnnnnnnnnnnnnnnnnnnnnnnnnnnnnnnnnnnnnnnnnnnnnnnnnnnnnnnnnnnnnnnnnnnnnnnnnnnnnnnnnnnnnnnnnnnnnnnnnnnnnnnnnnnnnnnnnnnnnnnnnnnnnnnnnnnnnnnnnnnnnnnnnnnnnnnnnnnnnnnnnnnnnnnnnnnnnnnnnnnnnnnnnnnnnnnnnnnnnnnnnnnnnnnnnnnnnnnnnnnnnnnnnnnnnnnnnnnnnnnnnnnnnnnnnnnnnnnnnnnnnnnnnnnnnnnnnnnnnnnnnnnnnnnnnnnnnnnnnnnnnnnnnnnnnnnnnnnnnnnnnnnnnnnnnnnnnnnnnnnnnnnnnnnnnnnnnnnnnnnnnnnnnnnnnnnnnnnnnnnnnnnnnnnnnnnnnnnnnnnnnnnnnnnnnnnnnnnnnnnnnnnnnnnnnnnnnnnnnnnnnnnnnnnnnnnnnnnnnnnnnnnnnnnnnnnnnnnnnnnnnnnnnnnnnnnnnnnnnnnnnnnnnnnnnnnnnnnnnnnnnnnnnnnnnnnnnnnnnnnnnnnnnnnnnnnnnnnnnnnnnnnnnnnnnnnnnnnnnnnnnnnnnnnnnnnnnnnnnnnnnnnnnnnnnnnnnnnnnnnnnnnnnnnnnnnnnnnnnnnnnnnnnnnnnnnnnnnnnnnnnnnnnnnnnnnnnnnnnnnnnnnnnnnnnnnnnnnnnnnnnnnnnnnnnnnnnnnnnnnnnnnnnnnnnnnnnnnnnnnnnnnnnnnnnnnnnnnnnnnnnnnnnnnnnnnnnnnnnnnnnnnnnnnnnnnnnnnnnnnnnnnnnnnnnnnnnnnnnnnnnnnnnnnnnnnnnnnnnnnnnnnnnnnnnnnnnnnnnnnnnnnnnnnnnnnnnnnnnnnnnnnnnnnnnnnnnnnnnnnnnnnnnnnnnnnnnnnnnnnnnnnnnnnnnnnnnnnnnnnnnnnnnnnnnnnnnnnnnnnnnnnnnnnnnnnnnnnnnnnnnnnnnnnnnnnnnnnnnnnnnnnnnnnnnnnnnnnnnnnnnnnnnnnnnnnnnnnnnnnnnnnnnnnnnnnnnnnnnnnnnnnnnnnnnnnnnnnnnnnnnnnnnnnnnnnnnnnnnnnnnnnnnnnnnnnnnnnnnnnnnnnnnnnnnnnnnnnnnnnnnnnnnnnnnnnnnnnnnnnnnnnnnnnnnnnnnnnnnnnnnnnnnnnnnnnnnnnnnnnnnnnnnnnnnnnnnnnnnnnnnnnnnnnnnnnnnnnnnnnnnnnnnnnnnnnnnnnnnnnnnnnnnnnnnnnnnnnnnnnnnnnnnnnnnnnnnnnnnnnnnnnnnnnnnnnnnnnnnnnnnnnnnnnnnnnnnnnnnnnnnnnnnnnnnnnnnnnnnnnnnnnnnnnnnnnnnnnnnnnnnnnnnnnnnnnnnnnnnnnnnnnnnnnnnnnnnnnnnnnnnnnnnnnnnnnnnnnnnnnnnnnnnnnnnnnnnnnnnnnnnnnnnnnnnnnnnnnnnnnnnnnnnnnnnnnnnnnnnnnnnnnnnnnnnnnnnnnnnnnnnnnnnnnnnnnnnnnnnnnnnnnnnnnnnnnnnnnnnnnnnnnnnnnnnnnnnnnnnnnnnnnnnnnnnnnnnnnnnnnnnnnnnnnnnnnnnnnnnnnnnnnnnnnnnnnnnnnnnnnnnnnnnnnnnnnnnnnnnnnnnnnnnnnnnnnnnnnnnnnnnnnnnnnnnnnnnnnnnnnnnnnnnnnnnnnnnnnnnnnnnnnnnnnnnnnnnnnnnnnnnnnnnnnnnnnnnnnnnnnnnnnnnnnnnnnnnnnnnnnnnnnnnnnnnnnnnnnnnnnnnnnnnnnnnnnnnnnnnnnnnnnnnnnnnnnnnnnnnnnnnnnnnnnnnnnnnnnnnnnnnnnnnnnnnnnnnnnnnnnnnnnnnnnnnnnnnnnnnnnnnnnnnnnnnnnnnnnnnnnnnnnnnnnnnnnnnnnnnnnnnnnnnnnnnnnnnnnnnnnnnnnnnnnnnnnnnnnnnnnnnnnnnnnnnnnnnnnnnnnnnnnnnnnnnnnnnnnnnnnnnnnnnnnnnnnnnnnnnnnnnnnnnnnnnnnnnnnnnnnnnnnnnnnnnnnnnnnnnnnnnnnnnnnnnnnnnnnnnnnnnnnnnnnnnnnnnnnnnnnnnnnnnnnnnnnnnnnnnnnnnnnnnnnnnnnnnnnnnnnnnnnnnnnnnnnnnnnnnnnnnnnnnnnnnnnnnnnnnnnnnnnnnnnnnnnnnnnnnnnnnnnnnnnnnnnnnnnnnnnnnnnnnnnnnnnnnnnnnnnnnnnnnnnnnnnnnnnnnnnnnnnnnnnnnnnnnnnnnnnnnnnnnnnnnnnnnnnnnnnnnnnnnnnnnnnnnnnnnnnnnnnnnnnnnnnnnnnnnnnnnnnnnnnnnnnnnnnnnnnnnnnnnnnnnnnnnnnnnnnnnnnnnnnnnnnnnnnnnnnnnnnnnnnnnnnnnnnnnnnnnnnnnnnnnnnnnnnnnnnnnnnnnnnnnnnnnnnnnnnnnnnnnnnnnnnnnnnnnnnnnnnnnnnnnnnnnnnnnnnnnnnnnnnnnnnnnnnnnnnnnnnnnnnnnnnnnnnnnnnnnnnnnnnnnnnnnnnnnnnnnnnnnnnnnnnnnnnnnnnnnnnnnnnnnnnnnnnnnnnnnnnnnnnnnnnnnnnnnnnnnnnnnnnnnnnnnnnnnnnnnnnnnnnnnnnnnnnnnnnnnnnnnnnnnnnnnnnnnnnnnnnnnnnnnnnnnnnnnnnnnnnnnnnnnnnnnnnnnnnnnnnnnnnnnnnnnnnnnnnnnnnnnnnnnnnnnnnnnnnnnnnnnnnnnnnnnnnnnnnnnnnnnnnnnnnnnnnnnnnnnnnnnnnnnnnnnnnnnnnnnnnnnnnnnnnnnnnnnnnnnnnnnnnnnnnnnnnnnnnnnnnnnnnnnnnnnnnnnnnnnnnnnnnnnnnnnnnnnnnnnnnnnnnnnnnnnnnnnnnnnnnnnnnnnnnnnnnnnnnnnnnnnnnnnnnnnnnnnnnnnnnnnnnnnnnnnnnnnnnnnnnnnnnnnnnnnnnnnnnnnnnnnnnnnnnnnnnnnnnnnnnnnnnnnnnnnnnnnnnnnnnnnnnnnnnnnnnnnnnnnnnnnnnnnnnnnnnnnnnnnnnnnnnnnnnnnnnnnnnnnnnnnnnnnnnnnnnnnnnnnnnnnnnnnnnnnnnnnnnnnnnnnnnnnnnnnnnnnnnnnnnnnnnnnnnnnnnnnnnnnnnnnnnnnnnnnnnnnnnnnnnnnnnnnnnnnnnnnnnnnnnnnnnnnnnnnnnnnnnnnnnnnnnnnnnnnnnnnnnnnnnnnnnnnnnnnnnnnnnnnnnnnnnnnnnnnnnnnnnnnnnnnnnnnnnnnnnnnnnnnnnnnnnnnnnnnnnnnnnnnnnnnnnnnnnnnnnnnnnnnnnnnnnnnnnnnnnnnnnnnnnnnnnnnnnnnnnnnnnnnnnnnnnnnnnnnnnnnnnnnnnnnnnnnnnnnnnnnnnnnnnnnnnnnnnnnnnnnnnnnnnnnnnnnnnnnnnnnnnnnnnnnnnnnnnnnnnnnnnnnnnnnnnnnnnnnnnnnnnnnnnnnnnnnnnnnnnnnnnnnnnnnnnnnnnnnnnnnnnnnnnnnnnnnnnnnnnnnnnnnnnnnnnnnnnnnnnnnnnnnnnnnnnnnnnnnnnnnnnnnnnnnnnnnnnnnnnnnnnnnnnnnnnnnnnnnnnnnnnnnnnnnnnnnnnnnnnnnnnnnnnnnnnnnnnnnnnnnnnnnnnnnnnnnnnnnnnnnnnnnnnnnnnnnnnnnnnnnnnnnnnnnnnnnnnnnnnnnnnnnnnnnnnnnnnnnnnnnnnnnnnnnnnnnnnnnnnnnnnnnnnnnnnnnnnnnnnnnnnnnnnnnnnnnnnnnnnnnnnnnnnnnnnnnnnnnnnnnnnnnnnnnnnnnnnnnnnnnnnnnnnnnnnnnnnnnnnnnnnnnnnnnnnnnnnnnnnnnnnnnnnnnnnnnnnnnnnnnnnnnnnnnnnnnnnnnnnnnnnnnnnnnnnnnnnnnnnnnnnnnnnnnnnnnnnnnnnnnnnnnnnnnnnnnnnnnnnnnnnnnnnnnnnnnnnnnnnnnnnnnnnnnnnnnnnnnnnnnnnnnnnnnnnnnnnnnnnnnnnnnnnnnnnnnnnnnnnnnnnnnnnnnnnnnnnnnnnnnnnnnnnnnnnnnnnnnnnnnnnnnnnnnnnnnnnnnnnnnnnnnnnnnnnnnnnnnnnnnnnnnnnnnnnnnnnnnnnnnnnnnnnnnnnnnnnnnnnnnnnnnnnnnnnnnnnnnnnnnnnnnnnnnnnnnnnnnnnnnnnnnnnnnnnnnnnnnnnnnnnnnnnnnnnnnnnnnnnnnnnnnnnnnnnnnnnnnnnnnnnnnnnnnnnnnnnnnnnnnnnnnnnnnnnnnnnnnnnnnnnnnnnnnnnnnnnnnnnnnnnnnnnnnnnnnnnnnnnnnnnnnnnnnnnnnnnnnnnnnnnnnnnnnnnnnnnnnnnnnnnnnnnnnnnnnnnnnnnnnnnnnnnnnnnnnnnnnnnnnnnnnnnnnnnnnnnnnnnnnnnnnnnnnnnnnnnnnnnnnnnnnnnnnnnnnnnnnnnnnnnnnnnnnnnnnnnnnnnnnnnnnnnnnnnnnnnnnnnnnnnnnnnnnnnnnnnnnnnnnnnnnnnnnnnnnnnnnnnnnnnnnnnnnnnnnnnnnnnnnnnnnnnnnnnnnnnnnnnnnnnnnnnnnnnnnnnnnnnnnnnnnnnnnnnnnnnnnnnnnnnnnnnnnnnnnnnnnnnnnnnnnnnnnnnnnnnnnnnnnnnnnnnnnnnnnnnnnnnnnnnnnnnnnnnnnnnnnnnnnnnnnnnnnnnnnnnnnnnnnnnnnnnnnnnnnnnnnnnnnnnnnnnnnnnnnnnnnnnnnnnnnnnnnnnnnnnnnnnnnnnnnnnnnnnnnnnnnnnnnnnnnnnnnnnnnnnnnnnnnnnnnnnnnnnnnnnnnnnnnnnnnnnnnnnnnnnnnnnnnnnnnnnnnnnnnnnnnnnnnnnnnnnnnnnnnnnnnnnnnnnnnnnnnnnnnnnnnnnnnnnnnnnnnnnnnnnnnnnnnnnnnnnnnnnnnnnnnnnnnnnnnnnnnnnnnnnnnnnnnnnnnnnnnnnnnnnnnnnnnnnnnnnnnnnnnnnnnnnnnnnnnnnnnnnnnnnnnnnnnnnnnnnnnnnnnnnnnnnnnnnnnnnnnnnnnnnnnnnnnnnnnnnnnnnnnnnnnnnnnnnnnnnnnnnnnnnnnnnnnnnnnnnnnnnnnnnnnnnnnnnnnnnnnnnnnnnnnnnnnnnnnnnnnnnnnnnnnnnnnnnnnnnnnnnnnnnnnnnnnnnnnnnnnnnnnnnnnnnnnnnnnnnnnnnnnnnnnnnnnnnnnnnnnnnnnnnnnnnnnnnnnnnnnnnnnnnnnnnnnnnnnnnnnnnnnnnnnnnnnnnnnnnnnnnnnnnnnnnnnnnnnnnnnnnnnnnnnnnnnnnnnnnnnnnnnnnnnnnnnnnnnnnnnnnnnnnnnnnnnnnnnnnnnnnnnnnnnnnnnnnnnnnnnnnnnnnnnnnnnnnnnnnnnnnnnnnnnnnnnnnnnnnnnnnnnnnnnnnnnnnnnnnnnnnnnnnnnnnnnnnnnnnnnnnnnnnnnnnnnnnnnnnnnnnnnnnnnnnnnnnnnnnnnnnnnnnnnnnnnnnnnnnnnnnnnnnnnnnnnnnnnnnnnnnnnnnnnnnnnnnnnnnnnnnnnnnnnnnnnnnnnnnnnnnnnnnnnnnnnnnnnnnnnnnnnnnnnnnnnnnnnnnnnnnnnnnnnnnnnnnnnnnnnnnnnnnnnnnnnnnnnnnnnnnnnnnnnnnnnnnnnnnnnnnnnnnnnnnnnnnnnnnnnnnnnnnnnnnnnnnnnnnnnnnnnnnnnnnnnnnnnnnnnnnnnnnnnnnnnnnnnnnnnnnnnnnnnnnnnnnnnnnnnnnnnnnnnnnnnnnnnnnnnnnnnnnnnnnnnnnnnnnnnnnnnnnnnnnnnnnnnnnnnnnnnnnnnnnnnnnnnnnnnnnnnnnnnnnnnnnnnnnnnnnnnnnnnnnnnnnnnnnnnnnnnnnnnnnnnnnnnnnnnnnnnnnnnnnnnnnnnnnnnnnnnnnnnnnnnnnnnnnnnnnnnnnnnnnnnnnnnnnnnnnnnnnnnnnnnnnnnnnnnnnnnnnnnnnnnnnnnnnnnnnnnnnnnnnnnnnnnnnnnnnnnnnnnnnnnnnnnnnnnnnnnnnnnnnnnnnnnnnnnnnnnnnnnnnnnnnnnnnnnnnnnnnnnnnnnnnnnnnnnnnnnnnnnnnnnnnnnnnnnnnnnnnnnnnnnnnnnnnnnnnnnnnnnnnnnnnnnnnnnnnnnnnnnnnnnnnnnnnnnnnnnnnnnnnnnnnnnnnnnnnnnnnnnnnnnnnnnnnnnnnnnnnnnnnnnnnnnnnnnnnnnnnnnnnnnnnnnnnnnnnnnnnnnnnnnnnnnnnnnnnnnnnnnnnnnnnnnnnnnnnnnnnnnnnnnnnnnnnnnnnnnnnnnnnnnnnnnnnnnnnnnnnnnnnnnnnnnnnnnnnnnnnnnnnnnnnnnnnnnnnnnnnnnnnnnnnnnnnnnnnnnnnnnnnnnnnnnnnnnnnnnnnnnnnnnnnnnnnnnnnnnnnnnnnnnnnnnnnnnnnnnnnnnnnnnnnnnnnnnnnnnnnnnnnnnnnnnnnnnnnnnnnnnnnnnnnnnnnnnnnnnnnnnnnnnnnnnnnnnnnnnnnnnnnnnnnnnnnnnnnnnnnnnnnnnnnnnnnnnnnnnnnnnnnnnnnnnnnnnnnnnnnnnnnnnnnnnnnnnnnnnnnnnnnnnnnnnnnnnnnnnnnnnnnnnnnnnnnnnnnnnnnnnnnnnnnnnnnnnnnnnnnnnnnnnnnnnnnnnnnnnnnnnnnnnnnnnnnnnnnnnnnnnnnnnnnnnnnnnnnnnnnnnnnnnnnnnnnnnnnnnnnnnnnnnnnnnnnnnnnnnnnnnnnnnnnnnnnnnnnnnnnnnnnnnnnnnnnnnnnnnnnnnnnnnnnnnnnnnnnnnnnnnnnnnnnnnnnnnnnnnnnnnnnnnnnnnnnnnnnnnnnnnnnnnnnnnnnnnnnnnnnnnnnnnnnnnnnnnnnnnnnnnnnnnnnnnnnnnnnnnnnnnnnnnnnnnnnnnnnnnnnnnnnnnnnnnnnnnnnnnnnnnnnnnnnnnnnnnnnnnnnnnnnnnnnnnnnnnnnnnnnnnnnnnnnnnnnnnnnnnnnnnnnnnnnnnnnnnnnnnnnnnnnnnnnnnnnnnnnnnnnnnnnnnnnnnnnnnnnnnnnnnnnnnnnnnnnnnnnnnnnnnnnnnnnnnnnnnnnnnnnnnnnnnnnnnnnnnnnnnnnnnnnnnnnnnnnnnnnnnnnnnnnnnnnnnnnnnnnnnnnnnnnnnnnnnnnnnnnnnnnnnnnnnnnnnnnnnnnnnnnnnnnnnnnnnnnnnnnnnnnnnnnnnnnnnnnnnnnnnnnnnnnnnnnnnnnnnnnnnnnnnnnnnnnnnnnnnnnnnnnnnnnnnnnnnnnnnnnnnnnnnnnnnnnnnnnnnnnnnnnnnnnnnnnnnnnnnnnnnnnnnnnnnnnnnnnnnnnnnnnnnnnnnnnnnnnnnnnnnnnnnnnnnnnnnnnnnnnnnnnnnnnnnnnnnnnnnnnnnnnnnnnnnnnnnnnnnnnnnnnnnnnnnnnnnnnnnnnnnnnnnnnnnnnnnnnnnnnnnnnnnnnnnnnnnnnnnnnnnnnnnnnnnnnnnnnnnnnnnnnnnnnnnnnnnnnnnnnnnnnnnnnnnnnnnnnnnnnnnnnnnnnnnnnnnnnnnnnnnnnnnnnnnnnnnnnnnnnnnnnnnnnnnnnnnnnnnnnnnnnnnnnnnnnnnnnnnnnnnnnnnnnnnnnnnnnnnnnnnnnnnnnnnnnnnnnnnnnnnnnnnnnnnnnnnnnnnnnnnnnnnnnnnnnnnnnnnnnnnnnnnnnnnnnnnnnnnnnnnnnnnnnnnnnnnnnnnnnnnnnnnnnnnnnnnnnnnnnnnnnnnnnnnnnnnnnnnnnnnnnnnnnnnnnnnnnnnnnnnnnnnnnnnnnnnnnnnnnnnnnnnnnnnnnnnnnnnnnnnnnnnnnnnnnnnnnnnnnnnnnnnnnnnnnnnnnnnnnnnnnnnnnnnnnnnnnnnnnnnnnnnnnnnnnnnnnnnnnnnnnnnnnnnnnnnnnnnnnnnnnnnnnnnnnnnnnnnnnnnnnnnnnnnnnnnnnnnnnnnnnnnnnnnnnnnnnnnnnnnnnnnnnnnnnnnnnnnnnnnnnnnnnnnnnnnnnnnnnnnnnnnnnnnnnnnnnnnnnnnnnnnnnnnnnnnnnnnnnnnnnnnnnnnnnnnnnnnnnnnnnnnnnnnnnnnnnnnnnnnnnnnnnnnnnnnnnnnnnnnnnnnnnnnnnnnnnnnnnnnnnnnnnnnnnnnnnnnnnnnnnnnnnnnnnnnnnnnnnnnnnnnnnnnnnnnnnnnnnnnnnnnnnnnnnnnnnnnnnnnnnnnnnnnnnnnnnnnnnnnnnnnnnnnnnnnnnnnnnnnnnnnnnnnnnnnnnnnnnnnnnnnnnnnnnnnnnnnnnnnnnnnnnnnnnnnnnnnnnnnnnnnnnnnnnnnnnnnnnnnnnnnnnnnnnnnnnnnnnnnnnnnnnnnnnnnnnnnnnnnnnnnnnnnnnnnnnnnnnnnnnnnnnnnnnnnnnnnnnnnnnnnnnnnnnnnnnnnnnnnnnnnnnnnnnnnnnnnnnnnnnnnnnnnnnnnnnnnnnnnnnnnnnnnnnnnnnnnnnnnnnnnnnnnnnnnnnnnnnnnnnnnnnnnnnnnnnnnnnnnnnnnnnnnnnnnnnnnnnnnnnnnnnnnnnnnnnnnnnnnnnnnnnnnnnnnnnnnnnnnnnnnnnnnnnnnnnnnnnnnnnnnnnnnnnnnnnnnnnnnnnnnnnnnnnnnnnnnnnnnnnnnnnnnnnnnnnnnnnnnnnnnnnnnnnnnnnnnnnnnnnnnnnnnnnnnnnnnnnnnnnnnnnnnnnnnnnnnnnnnnnnnnnnnnnnnnnnnnnnnnnnnnnnnnnnnnnnnnnnnnnnnnnnnnnnnnnnnnnnnnnnnnnnnnnnnnnnnnnnnnnnnnnnnnnnnnnnnnnnnnnnnnnnnnnnnnnnnnnnnnnnnnnnnnnnnnnnnnnnnnnnnnnnnnnnnnnnnnnnnnnnnnnnnnnnnnnnnnnnnnnnnnnnnnnnnnnnnnnnnnnnnnnnnnnnnnnnnnnnnnnnnnnnnnnnnnnnnnnnnnnnnnnnnnnnnnnnnnnnnnnnnnnnnnnnnnnnnnnnnnnnnnnnnnnnnnnnnnnnnnnnnnnnnnnnnnnnnnnnnnnnnnnnnnnnnnnnnnnnnnnnnnnnnnnnnnnnnnnnnnnnnnnnnnnnnnnnnnnnnnnnnnnnnnnnnnnnnnnnnnnnnnnnnnnnnnnnnnnnnnnnnnnnnnnnnnnnnnnnnnnnnnnnnnnnnnnnnnnnnnnnnnnnnnnnnnnnnnnnnnnnnnnnnnnnnnnnnnnnnnnnnnnnnnnnnnnnnnnnnnnnnnnnnnnnnnnnnnnnnnnnnnnnnnnnnnnnnnnnnnnnnnnnnnnnnnnnnnnnnnnnnnnnnnnnnnnnnnnnnnnnnnnnnnnnnnnnnnnnnnnnnnnnnnnnnnnnnnnnnnnnnnnnnnnnnnnnnnnnnnnnnnnnnnnnnnnnnnnnnnnnnnnnnnnnnnnnnnnnnnnnnnnnnnnnnnnnnnnnnnnnnnnnnnnnnnnnnnnnnnnnnnnnnnnnnnnnnnnnnnnnnnnnnnnnnnnnnnnnnnnnnnnnnnnnnnnnnnnnnnnnnnnnnnnnnnnnnnnnnnnnnnnnnnnnnnnnnnnnnnnnnnnnnnnnnnnnnnnnnnnnnnnnnnnnnnnnnnnnnnnnnnnnnnnnnnnnnnnnnnnnnnnnnnnnnnnnnnnnnnnnnnnnnnnnnnnnnnnnnnnnnnnnnnnnnnnnnnnnnnnnnnnnnnnnnnnnnnnnnnnnnnnnnnnnnnnnnnnnnnnnnnnnnnnnnnnnnnnnnnnnnnnnnnnnnnnnnnnnnnnnnnnnnnnnnnnnnnnnnnnnnnnnnnnnnnnnnnnnnnnnnnnnnnnnnnnnnnnnnnnnnnnnnnnnnnnnnnnnnnnnnnnnnnnnnnnnnnnnnnnnnnnnnnnnnnnnnnnnnnnnnnnnnnnnnnnnnnnnnnnnnnnnnnnnnnnnnnnnnnnnnnnnnnnnnnnnnnnnnnnnnnnnnnnnnnnnnnnnnnnnnnnnnnnnnnnnnnnnnnnnnnnnnnnnnnnnnnnnnnnnnnnnnnnnnnnnnnnnnnnnnnnnnnnnnnnnnnnnnnnnnnnnnnnnnnnnnnnnnnnnnnnnnnnnnnnnnnnnnnnnnnnnnnnnnnnnnnnnnnnnnnnnnnnnnnnnnnnnnnnnnnnnnnnnnnnnnnnnnnnnnnnnnnnnnnnnnnnnnnnnnnnnnnnnnnnnnnnnnnnnnnnnnnnnnnnnnnnnnnnnnnnnnnnnnnnnnnnnnnnnnnnnnnnnnnnnnnnnnnnnnnnnnnnnnnnnnnnnnnnnnnnnnnnnnnnnnnnnnnnnnnnnnnnnnnnnnnnnnnnnnnnnnnnnnnnnnnnnnnnnnnnnnnnnnnnnnnnnnnnnnnnnnnnnnnnnnnnnnnnnnnnnnnnnnnnnnnnnnnnnnnnnnnnnnnnnnnnnnnnnnnnnnnnnnnnnnnnnnnnnnnnnnnnnnnnnnnnnnnnnnnnnnnnnnnnnnnnnnnnnnnnnnnnnnnnnnnnnnnnnnnnnnnnnnnnnnnnnnnnnnnnnnnnnnnnnnnnnnnnnnnnnnnnnnnnnnnnnnnnnnnnnnnnnnnnnnnnnnnnnnnnnnnnnnnnnnnnnnnnnnnnnnnnnnnnnnnnnnnnnnnnnnnnnnnnnnnnnnnnnnnnnnnnnnnnnnnnnnnnnnnnnnnnnnnnnnnnnnnnnnnnnnnnnnnnnnnnnnnnnnnnnnnnnnnnnnnnnnnnnnnnnnnnnnnnnnnnnnnnnnnnnnnnnnnnnnnnnnnnnnnnnnnnnnnnnnnnnnnnnnnnnnnnnnnnnnnnnnnnnnnnnnnnnnnnnnnnnnnnnnnnnnnnnnnnnnnnnnnnnnnnnnnnnnnnnnnnnnnnnnnnnnnnnnnnnnnnnnnnnnnnnnnnnnnnnnnnnnnnnnnnnnnnnnnnnnnnnnnnnnnnnnnnnnnnnnnnnnnnnnnnnnnnnnnnnnnnnnnnnnnnnnnnnnnnnnnnnnnnnnnnnnnnnnnnnnnnnnnnnnnnnnnnnnnnnnnnnnnnnnnnnnnnnnnnnnnnnnnnnnnnnnnnnnnnnnnnnnnnnnnnnnnnnnnnnnnnnnnnnnnnnnnnnnnnnnnnnnnnnnnnnnnnnnnnnnnnnnnnnnnnnnnnnnnnnnnnnnnnnnnnnnnnnnnnnnnnnnnnnnnnnnnnnnnnnnnnnnnnnnnnnnnnnnnnnnnnnnnnnnnnnnnnnnnnnnnnnnnnnnnnnnnnnnnnnnnnnnnnnnnnnnnnnnnnnnnnnnnnnnnnnnnnnnnnnnnnnnnnnnnnnnnnnnnnnnnnnnnnnnnnnnnnnnnnnnnnnnnnnnnnnnnnnnnnnnnnnnnnnnnnnnnnnnnnnnnnnnnnnnnnnnnnnnnnnnnnnnnnnnnnnnnnnnnnnnnnnnnnnnnnnnnnnnnnnnnnnnnnnnnnnnnnnnnnnnnnnnnnnnnnnnnnnnnnnnnnnnnnnnnnnnnnnnnnnnnnnnnnnnnnnnnnnnnnnnnnnnnnnnnnnnnnnnnnnnnnnnnnnnnnnnnnnnnnnnnnnnnnnnnnnnnnnnnnnnnnnnnnnnnnnnnnnnnnnnnnnnnnnnnnnnnnnnnnnnnnnnnnnnnnnnnnnnnnnnnnnnnnnnnnnnnnnnnnnnnnnnnnnnnnnnnnnnnnnnnnnnnnnnnnnnnnnnnnnnnnnnnnnnnnnnnnnnnnnnnnnnnnnnnnnnnnnnnnnnnnnnnnnnnnnnnnnnnnnnnnnnnnnnnnnnnnnnnnnnnnnnnnnnnnnnnnnnnnnnnnnnnnnnnnnnnnnnnnnnnnnnnnnnnnnnnnnnnnnnnnnnnnnnnnnnnnnnnnnnnnnnnnnnnnnnnnnnnnnnnnnnnnnnnnnnnnnnnnnnnnnnnnnnnnnnnnnnnnnnnnnnnnnnnnnnnnnnnnnnnnnnnnnnnnnnnnnnnnnnnnnnnnnnnnnnnnnnnnnnnnnnnnnnnnnnnnnnnnnnnnnnnnnnnnnnnnnnnnnnnnnnnnnnnnnnnnnnnnnnnnnnnnnnnnnnnnnnnnnnnnnnnnnnnnnnnnnnnnnnnnnnnnnnnnnnnnnnnnnnnnnnnnnnnnnnnnnnnnnnnnnnnnnnnnnnnnnnnnnnnnnnnnnnnnnnnnnnnnnnnnnnnnnnnnnnnnnnnnnnnnnnnnnnnnnnnnnnnnnnnnnnnnnnnnnnnnnnnnnnnnnnnnnnnnnnnnnnnnnnnnnnnnnnnnnnnnnnnnnnnnnnnnnnnnnnnnnnnnnnnnnnnnnnnnnnnnnnnnnnnnnnnnnnnnnnnnnnnnnnnnnnnnnnnnnnnnnnnnnnnnnnnnnnnnnnnnnnnnnnnnnnnnnnnnnnnnnnnnnnnnnnnnnnnnnnnnnnnnnnnnnnnnnnnnnnnnnnnnnnnnnnnnnnnnnnnnnnnnnnnnnnnnnnnnnnnnnnnnnnnnnnnnnnnnnnnnnnnnnnnnnnnnnnnnnnnnnnnnnnnnnnnnnnnnnnnnnnnnnnnnnnnnnnnnnnnnnnnnnnnnnnnnnnnnnnnnnnnnnnnnnnnnnnnnnnnnnnnnnnnnnnnnnnnnnnnnnnnnnnnnnnnnnnnnnnnnnnnnnnnnnnnnnnnnnnnnnnnnnnnnnnnnnnnnnnnnnnnnnnnnnnnnnnnnnnnnnnnnnnnnnnnnnnnnnnnnnnnnnnnnnnnnnnnnnnnnnnnnnnnnnnnnnnnnnnnnnnnnnnnnnnnnnnnnnnnnnnnnnnnnnnnnnnnnnnnnnnnnnnnnnnnnnnnnnnnnnnnnnnnnnnnnnnnnnnnnnnnnnnnnnnnnnnnnnnnnnnnnnnnnnnnnnnnnnnnnnnnnnnnnnnnnnnnnnnnnnnnnnnnnnnnnnnnnnnnnnnnnnnnnnnnnnnnnnnnnnnnnnnnnnnnnnnnnnnnnnnnnnnnnnnnnnnnnnnnnnnnnnnnnnnnnnnnnnnnnnnnnnnnnnnnnnnnnnnnnnnnnnnnnnnnnnnnnnnnnnnnnnnnnnnnnnnnnnnnnnnnnnnnnnnnnnnnnnnnnnnnnnnnnnnnnnnnnnnnnnnnnnnnnnnnnnnnnnnnnnnnnnnnnnnnnnnnnnnnnnnnnnnnnnnnnnnnnnnnnnnnnnnnnnnnnnnnnnnnnnnnnnnnnnnnnnnnnnnnnnnnnnnnnnnnnnnnnnnnnnnnnnnnnnnnnnnnnnnnnnnnnnnnnnnnnnnnnnnnnnnnnnnnnnnnnnnnnnnnnnnnnnnnnnnnnnnnnnnnnnnnnnnnnnnnnnnnnnnnnnnnnnnnnnnnnnnnnnnnnnnnnnnnnnnnnnnnnnnnnnnnnnnnnnnnnnnnnnnnnnnnnnnnnnnnnnnnnnnnnnnnnnnnnnnnnnnnnnnnnnnnnnnnnnnnnnnnnnnnnnnnnnnnnnnnnnnnnnnnnnnnnnnnnnnnnnnnnnnnnnnnnnnnnnnnnnnnnnnnnnnnnnnnnnnnnnnnnnnnnnnnnnnnnnnnnnnnnnnnnnnnnnnnnnnnnnnnnnnnnnnnnnnnnnnnnnnnnnnnnnnnnnnnnnnnnnnnnnnnnnnnnnnnnnnnnnnnnnnnnnnnnnnnnnnnnnnnnnnnnnnnnnnnnnnnnnnnnnnnnnnnnnnnnnnnnnnnnnnnnnnnnnnnnnnnnnnnnnnnnnnnnnnnnnnnnnnnnnnnnnnnnnnnnnnnnnnnnnnnnnnnnnnnnnnnnnnnnnnnnnnnnnnnnnnnnnnnnnnnnnnnnnnnnnnnnnnnnnnnnnnnnnnnnnnnnnnnnnnnnnnnnnnnnnnnnnnnnnnnnnnnnnnnnnnnnnnnnnnnnnnnnnnnnnnnnnnnnnnnnnnnnnnnnnnnnnnnnnnnnnnnnnnnnnnnnnnnnnnnnnnnnnnnnnnnnnnnnnnnnnnnnnnnnnnnnnnnnnnnnnnnnnnnnnnnnnnnnnnnnnnnnnnnnnnnnnnnnnnnnnnnnnnnnnnnnnnnnnnnnnnnnnnnnnnnnnnnnnnnnnnnnnnnnnnnnnnnnnnnnnnnnnnnnnnnnnnnnnnnnnnnnnnnnnnnnnnnnnnnnnnnnnnnnnnnnnnnnnnnnnnnnnnnnnnnnnnnnnnnnnnnnnnnnnnnnnnnnnnnnnnnnnnnnnnnnnnnnnnnnnnnnnnnnnnnnnnnnnnnnnnnnnnnnnnnnnnnnnnnnnnnnnnnnnnnnnnnnnnnnnnnnnnnnnnnnnnnnnnnnnnnnnnnnnnnnnnnnnnnnnnnnnnnnnnnnnnnnnnnnnnnnnnnnnnnnnnnnnnnnnnnnnnnnnnnnnnnnnnnnnnnnnnnnnnnnnnnnnnnnnnnnnnnnnnnnnnnnnnnnnnnnnnnnnnnnnnnnnnnnnnnnnnnnnnnnnnnnnnnnnnnnnnnnnnnnnnnnnnnnnnnnnnnnnnnnnnnnnnnnnnnnnnnnnnnnnnnnnnnnnnnnnnnnnnnnnnnnnnnnnnnnnnnnnnnnnnnnnnnnnnnnnnnnnnnnnnnnnnnnnnnnnnnnnnnnnnnnnnnnnnnnnnnnnnnnnnnnnnnnnnnnnnnnnnnnnnnnnnnnnnnnnnnnnnnnnnnnnnnnnnnnnnnnnnnnnnnnnnnnnnnnnnnnnnnnnnnnnnnnnnnnnnnnnnnnnnnnnnnnnnnnnnnnnnnnnnnnnnnnnnnnnnnnnnnnnnnnnnnnnnnnnnnnnnnnnnnnnnnnnnnnnnnnnnnnnnnnnnnnnnnnnnnnnnnnnnnnnnnnnnnnnnnnnnnnnnnnnnnnnnnnnnnnnnnnnnnnnnnnnnnnnnnnnnnnnnnnnnnnnnnnnnnnnnnnnnnnnnnnnnnnnnnnnnnnnnnnnnnnnnnnnnnnnnnnnnnnnnnnnnnnnnnnnnnnnnnnnnnnnnnnnnnnnnnnnnnnnnnnnnnnnnnnnnnnnnnnnnnnnnnnnnnnnnnnnnnnnnnnnnnnnnnnnnnnnnnnnnnnnnnnnnnnnnnnnnnnnnnnnnnnnnnnnnnnnnnnnnnnnnnnnnnnnnnnnnnnnnnnnnnnnnnnnnnnnnnnnnnnnnnnnnnnnnnnnnnnnnnnnnnnnnnnnnnnnnnnnnnnnnnnnnnnnnnnnnnnnnnnnnnnnnnnnnnnnnnnnnnnnnnnnnnnnnnnnnnnnnnnnnnnnnnnnnnnnnnnnnnnnnnnnnnnnnnnnnnnnnnnnnnnnnnnnnnnnnnnnnnnnnnnnnnnnnnnnnnnnnnnnnnnnnnnnnnnnnnnnnnnnnnnnnnnnnnnnnnnnnnnnnnnnnnnnnnnnnnnnnnnnnnnnnnnnnnnnnnnnnnnnnnnnnnnnnnnnnnnnnnnnnnnnnnnnnnnnnnnnnnnnnnnnnnnnnnnnnnnnnnnnnnnnnnnnnnnnnnnnnnnnnnnnnnnnnnnnnnnnnnnnnnnnnnnnnnnnnnnnnnnnnnnnnnnnnnnnnnnnnnnnnnnnnnnnnnnnnnnnnnnnnnnnnnnnnnnnnnnnnnnnnnnnnnnnnnnnnnnnnnnnnnnnnnnnnnnnnnnnnnnnnnnnnnnnnnnnnnnnnnnnnnnnnnnnnnnnnnnnnnnnnnnnnnnnnnnnnnnnnnnnnnnnnnnnnnnnnnnnnnnnnnnnnnnnnnnnnnnnnnnnnnnnnnnnnnnnnnnnnnnnnnnnnnnnnnnnnnnnnnnnnnnnnnnnnnnnnnnnnnnnnnnnnnnnnnnnnnnnnnnnnnnnnnnnnnnnnnnnnnnnnnnnnnnnnnnnnnnnnnnnnnnnnnnnnnnnnnnnnnnnnnnnnnnnnnnnnnnnnnnnnnnnnnnnnnnnnnnnnnnnnnnnnnnnnnnnnnnnnnnnnnnnnnnnnnnnnnnnnnnnnnnnnnnnnnnnnnnnnnnnnnnnnnnnnnnnnnnnnnnnnnnnnnnnnnnnnnnnnnnnnnnnnnnnnnnnnnnnnnnnnnnnnnnnnnnnnnnnnnnnnnnnnnnnnnnnnnnnnnnnnnnnnnnnnnnnnnnnnnnnnnnnnnnnnnnnnnnnnnnnnnnnnnnnnnnnnnnnnnnnnnnnnnnnnnnnnnnnnnnnnnnnnnnnnnnnnnnnnnnnnnnnnnnnnnnnnnnnnnnnnnnnnnnnnnnnnnnnnnnnnnnnnnnnnnnnnnnnnnnnnnnnnnnnnnnnnnnnnnnnnnnnnnnnnnnnnnnnnnnnnnnnnnnnnnnnnnnnnnnnnnnnnnnnnnnnnnnnnnnnnnnnnnnnnnnnnnnnnnnnnnnnnnnnnnnnnnnnnnnnnnnnnnnnnnnnnnnnnnnnnnnnnnnnnnnnnnnnnnnnnnnnnnnnnnnnnnnnnnnnnnnnnnnnnnnnnnnnnnnnnnnnnnnnnnnnnnnnnnnnnnnnnnnnnnnnnnnnnnnnnnnnnnnnnnnnnnnnnnnnnnnnnnnnnnnnnnnnnnnnnnnnnnnnnnnnnnnnnnnnnnnnnnnnnnnnnnnnnnnnnnnnnnnnnnnnnnnnnnnnnnnnnnnnnnnnnnnnnnnnnnnnnnnnnnnnnnnnnnnnnnnnnnnnnnnnnnnnnnnnnnnnnnnnnnnnnnnnnnnnnnnnnnnnnnnnnnnnnnnnnnnnnnnnnnnnnnnnnnnnnnnnnnnnnnnnnnnnnnnnnnnnnnnnnnnnnnnnnnnnnnnnnnnnnnnnnnnnnnnnnnnnnnnnnnnnnnnnnnnnnnnnnnnnnnnnnnnnnnnnnnnnnnnnnnnnnnnnnnnnnnnnnnnnnnnnnnnnnnnnnnnnnnnnnnnnnnnnnnnnnnnnnnnnnnnnnnnnnnnnnnnnnnnnnnnnnnnnnnnnnnnnnnnnnnnnnnnnnnnnnnnnnnnnnnnnnnnnnnnnnnnnnnnnnnnnnnnnnnnnnnnnnnnnnnnnnnnnnnnnnnnnnnnnnnnnnnnnnnnnnnnnnnnnnnnnnnnnnnnnnnnnnnnnnnnnnnnnnnnnnnnnnnnnnnnnnnnnnnnnnnnnnnnnnnnnnnnnnnnnnnnnnnnnnnnnnnnnnnnnnnnnnnnnnnnnnnnnnnnnnnnnnnnnnnnnnnnnnnnnnnnnnnnnnnnnnnnnnnnnnnnnnnnnnnnnnnnnnnnnnnnnnnnnnnnnnnnnnnnnnnnnnnnnnnnnnnnnnnnnnnnnnnnnnnnnnnnnnnnnnnnnnnnnnnnnnnnnnnnnnnnnnnnnnnnnnnnnnnnnnnnnnnnnnnnnnnnnnnnnnnnnnnnnnnnnnnnnnnnnnnnnnnnnnnnnnnnnnnnnnnnnnnnnnnnnnnnnnnnnnnnnnnnnnnnnnnnnnnnnnnnnnnnnnnnnnnnnnnnnnnnnnnnnnnnnnnnnnnnnnnnnnnnnnnnnnnnnnnnnnnnnnnnnnnnnnnnnnnnnnnnnnnnnnnnnnnnnnnnnnnnnnnnnnnnnnnnnnnnnnnnnnnnnnnnnnnnnnnnnnnnnnnnnnnnnnnnnnnnnnnnnnnnnnnnnnnnnnnnnnnnnnnnnnnnnnnnnnnnnnnnnnnnnnnnnnnnnnnnnnnnnnnnnnnnnnnnnnnnnnnnnnnnnnnnnnnnnnnnnnnnnnnnnnnnnnnnnnnnnnnnnnnnnnnnnnnnnnnnnnnnnnnnnnnnnnnnnnnnnnnnnnnnnnnnnnnnnnnnnnnnnnnnnnnnnnnnnnnnnnnnnnnnnnnnnnnnnnnnnnnnnnnnnnnnnnnnnnnnnnnnnnnnnnnnnnnnnnnnnnnnnnnnnnnnnnnnnnnnnnnnnnnnnnnnnnnnnnnnnnnnnnnnnnnnnnnnnnnnnnnnnnnnnnnnnnnnnnnnnnnnnnnnnnnnnnnnnnnnnnnnnnnnnnnnnnnnnnnnnnnnnnnnnnnnnnnnnnnnnnnnnnnnnnnnnnnnnnnnnnnnnnnnnnnnnnnnnnnnnnnnnnnnnnnnnnnnnnnnnnnnnnnnnnnnnnnnnnnnnnnnnnnnnnnnnnnnnnnnnnnnnnnnnnnnnnnnnnnnnnnnnnnnnnnnnnnnnnnnnnnnnnnnnnnnnnnnnnnnnnnnnnnnnnnnnnnnnnnnnnnnnnnnnnnnnnnnnnnnnnnnnnnnnnnnnnnnnnnnnnnnnnnnnnnnnnnnnnnnnnnnnnnnnnnnnnnnnnnnnnnnnnnnnnnnnnnnnnnnnnnnnnnnnnnnnnnnnnnnnnnnnnnnnnnnnnnnnnnnnnnnnnnnnnnnnnnnnnnnnnnnnnnnnnnnnnnnnnnnnnnnnnnnnnnnnnnnnnnnnnnnnnnnnnnnnnnnnnnnnnnnnnnnnnnnnnnnnnnnnnnnnnnnnnnnnnnnnnnnnnnnnnnnnnnnnnnnnnnnnnnnnnnnnnnnnnnnnnnnnnnnnnnnnnnnnnnnnnnnnnnnnnnnnnnnnnnnnnnnnnnnnnnnnnnnnnnnnnnnnnnnnnnnnnnnnnnnnnnnnnnnnnnnnnnnnnnnnnnnnnnnnnnnnnnnnnnnnnnnnnnnnnnnnnnnnnnnnnnnnnnnnnnnnnnnnnnnnnnnnnnnnnnnnnnnnnnnnnnnnnnnnnnnnnnnnnnnnnnnnnnnnnnnnnnnnnnnnnnnnnnnnnnnnnnnnnnnnnnnnnnnnnnnnnnnnnnnnnnnnnnnnnnnnnnnnnnnnnnnnnnnnnnnnnnnnnnnnnnnnnnnnnnnnnnnnnnnnnnnnnnnnnnnnnnnnnnnnnnnnnnnnnnnnnnnnnnnnnnnnnnnnnnnnnnnnnnnnnnnnnnnnnnnnnnnnnnnnnnnnnnnnnnnnnnnnnnnnnnnnnnnnnnnnnnnnnnnnnnnnnnnnnnnnnnnnnnnnnnnnnnnnnnnnnnnnnnnnnnnnnnnnnnnnnnnnnnnnnnnnnnnnnnnnnnnnnnnnnnnnnnnnnnnnnnnnnnnnnnnnnnnnnnnnnnnnnnnnnnnnnnnnnnnnnnnnnnnnnnnnnnnnnnnnnnnnnnnnnnnnnnnnnnnnnnnnnnnnnnnnnnnnnnnnnnnnnnnnnnnnnnnnnnnnnnnnnnnnnnnnnnnnnnnnnnnnnnnnnnnnnnnnnnnnnnnnnnnnnnnnnnnnnnnnnnnnnnnnnnnnnnnnnnnnnnnnnnnnnnnnnnnnnnnnnnnnnnnnnnnnnnnnnnnnnnnnnnnnnnnnnnnnnnnnnnnnnnnnnnnnnnnnnnnnnnnnnnnnnnnnnnnnnnnnnnnnnnnnnnnnnnnnnnnnnnnnnnnnnnnnnnnnnnnnnnnnnnnnnnnnnnnnnnnnnnnnnnnnnnnnnnnnnnnnnnnnnnnnnnnnnnnnnnnnnnnnnnnnnnnnnnnnnnnnnnnnnnnnnnnnnnnnnnnnnnnnnnnnnnnnnnnnnnnnnnnnnnnnnnnnnnnnnnnnnnnnnnnnnnnnnnnnnnnnnnnnnnnnnnnnnnnnnnnnnnnnnnnnnnnnnnnnnnnnnnnnnnnnnnnnnnnnnnnnnnnnnnnnnnnnnnnnnnnnnnnnnnnnnnnnnnnnnnnnnnnnnnnnnnnnnnnnnnnnnnnnnnnnnnnnnnnnnnnnnnnnnnnnnnnnnnnnnnnnnnnnnnnnnnnnnnnnnnnnnnnnnnnnnnnnnnnnnnnnnnnnnnnnnnnnnnnnnnnnnnnnnnnnnnnnnnnnnnnnnnnnnnnnnnnnnnnnnnnnnnnnnnnnnnnnnnnnnnnnnnnnnnnnnnnnnnnnnnnnnnnnnnnnnnnnnnnnnnnnnnnnnnnnnnnnnnnnnnnnnnnnnnnnnnnnnnnnnnnnnnnnnnnnnnnnnnnnnnnnnnnnnnnnnnnnnnnnnnnnnnnnnnnnnnnnnnnnnnnnnnnnnnnnnnnnnnnnnnnnnnnnnnnnnnnnnnnnnnnnnnnnnnnnnnnnnnnnnnnnnnnnnnnnnnnnnnnnnnnnnnnnnnnnnnnnnnnnnnnnnnnnnnnnnnnnnnnnnnnnnnnnnnnnnnnnnnnnnnnnnnnnnnnnnnnnnnnnnnnnnnnnnnnnnnnnnnnnnnnnnnnnnnnnnnnnnnnnnnnnnnnnnnnnnnnnnnnnnnnnnnnnnnnnnnnnnnnnnnnnnnnnnnnnnnnnnnnnnnnnnnnnnnnnnnnnnnnnnnnnnnnnnnnnnnnnnnnnnnnnnnnnnnnnnnnnnnnnnnnnnnnnnnnnnnnnnnnnnnnnnnnnnnnnnnnnnnnnnnnnnnnnnnnnnnnnnnnnnnnnnnnnnnnnnnnnnnnnnnnnnnnnnnnnnnnnnnnnnnnnnnnnnnnnnnnnnnnnnnnnnnnnnnnnnnnnnnnnnnnnnnnnnnnnnnnnnnnnnnnnnnnnnnnnnnnnnnnnnnnnnnnnnnnnnnnnnnnnnnnnnnnnnnnnnnnnnnnnnnnnnnnnnnnnnnnnnnnnnnnnnnnnnnnnnnnnnnnnnnnnnnnnnnnnnnnnnnnnnnnnnnnnnnnnnnnnnnnnnnnnnnnnnnnnnnnnnnnnnnnnnnnnnnnnnnnnnnnnnnnnnnnnnnnnnnnnnnnnnnnnnnnnnnnnnnnnnnnnnnnnnnnnnnnnnnnnnnnnnnnnnnnnnnnnnnnnnnnnnnnnnnnnnnnnnnnnnnnnnnnnnnnnnnnnnnnnnnnnnnnnnnnnnnnnnnnnnnnnnnnnnnnnnnnnnnnnnnnnnnnnnnnnnnnnnnnnnnnnnnnnnnnnnnnnnnnnnnnnnnnnnnnnnnnnnnnnnnnnnnnnnnnnnnnnnnnnnnnnnnnnnnnnnnnnnnnnnnnnnnnnnnnnnnnnnnnnnnnnnnnnnnnnnnnnnnnnnnnnnnnnnnnnnnnnnnnnnnnnnnnnnnnnnnnnnnnnnnnnnnnnnnnnnnnnnnnnnnnnnnnnnnnnnnnnnnnnnnnnnnnnnnnnnnnnnnnnnnnnnnnnnnnnnnnnnnnnnnnnnnnnnnnnnnnnnnnnnnnnnnnnnnnnnnnnnnnnnnnnnnnnnnnnnnnnnnnnnnnnnnnnnnnnnnnnnnnnnnnnnnnnnnnnnnnnnnnnnnnnnnnnnnnnnnnnnnnnnnnnnnnnnnnnnnnnnnnnnnnnnnnnnnnnnnnnnnnnnnnnnnnnnnnnnnnnnnnnnnnnnnnnnnnnnnnnnnnnnnnnnnnnnnnnnnnnnnnnnnnnnnnnnnnnnnnnnnnnnnnnnnnnnnnnnnnnnnnnnnnnnnnnnnnnnnnnnnnnnnnnnnnnnnnnnnnnnnnnnnnnnnnnnnnnnnnnnnnnnnnnnnnnnnnnnnnnnnnnnnnnnnnnnnnnnnnnnnnnnnnnnnnnnnnnnnnnnnnnnnnnnnnnnnnnnnnnnnnnnnnnnnnnnnnnnnnnnnnnnnnnnnnnnnnnnnnnnnnnnnnnnnnnnnnnnnnnnnnnnnnnnnnnnnnnnnnnnnnnnnnnnnnnnnnnnnnnnnnnnnnnnnnnnnnnnnnnnnnnnnnnnnnnnnnnnnnnnnnnnnnnnnnnnnnnnnnnnnnnnnnnnnnnnnnnnnnnnnnnnnnnnnnnnnnnnnnnnnnnnnnnnnnnnnnnnnnnnnnnnnnnnnnnnnnnnnnnnnnnnnnnnnnnnnnnnnnnnnnnnnnnnnnnnnnnnnnnnnnnnnnnnnnnnnnnnnnnnnnnnnnnnnnnnnnnnnnnnnnnnnnnnnnnnnnnnnnnnnnnnnnnnnnnnnnnnnnnnnnnnnnnnnnnnnnnnnnnnnnnnnnnnnnnnnnnnnnnnnnnnnnnnnnnnnnnnnnnnnnnnnnnnnnnnnnnnnnnnnnnnnnnnnnnnnnnnnnnnnnnnnnnnnnnnnnnnnnnnnnnnnnnnnnnnnnnnnnnnnnnnnnnnnnnnnnnnnnnnnnnnnnnnnnnnnnnnnnnnnnnnnnnnnnnnnnnnnnnnnnnnnnnnnnnnnnnnnnnnnnnnnnnnnnnnnnnnnnnnnnnnnnnnnnnnnnnnnnnnnnnnnnnnnnnnnnnnnnnnnnnnnnnnnnnnnnnnnnnnnnnnnnnnnnnnnnnnnnnnnnnnnnnnnnnnnnnnnnnnnnnnnnnnnnnnnnnnnnnnnnnnnnnnnnnnnnnnnnnnnnnnnnnnnnnnnnnnnnnnnnnnnnnnnnnnnnnnnnnnnnnnnnnnnnnnnnnnnnnnnnnnnnnnnnnnnnnnnnnnnnnnnnnnnnnnnnnnnnnnnnnnnnnnnnnnnnnnnnnnnnnnnnnnnnnnnnnnnnnnnnnnnnnnnnnnnnnnnnnnnnnnnnnnnnnnnnnnnnnnnnnnnnnnnnnnnnnnnnnnnnnnnnnnnnnnnnnnnnnnnnnnnnnnnnnnnnnnnnnnnnnnnnnnnnnnnnnnnnnnnnnnnnnnnnnnnnnnnnnnnnnnnnnnnnnnnnnnnnnnnnnnnnnnnnnnnnnnnnnnnnnnnnnnnnnnnnnnnnnnnnnnnnnnnnnnnnnnnnnnnnnnnnnnnnnnnnnnnnnnnnnnnnnnnnnnnnnnnnnnnnnnnnnnnnnnnnnnnnnnnnnnnnnnnnnnnnnnnnnnnnnnnnnnnnnnnnnnnnnnnnnnnnnnnnnnnnnnnnnnnnnnnnnnnnnnnnnnnnnnnnnnnnnnnnnnnnnnnnnnnnnnnnnnnnnnnnnnnnnnnnnnnnnnnnnnnnnnnnnnnnnnnnnnnnnnnnnnnnnnnnnnnnnnnnnnnnnnnnnnnnnnnnnnnnnnnnnnnnnnnnnnnnnnnnnnnnnnnnnnnnnnnnnnnnnnnnnnnnnnnnnnnnnnnnnnnnnnnnnnnnnnnnnnnnnnnnnnnnnnnnnnnnnnnnnnnnnnnnnnnnnnnnnnnnnnnnnnnnnnnnnnnnnnnnnnnnnnnnnnnnnnnnnnnnnnnnnnnnnnnnnnnnnnnnnnnnnnnnnnnnnnnnnnnnnnnnnnnnnnnnnnnnnnnnnnnnnnnnnnnnnnnnnnnnnnnnnnnnnnnnnnnnnnnnnnnnnnnnnnnnnnnnnnnnnnnnnnnnnnnnnnnnnnnnnnnnnnnnnnnnnnnnnnnnnnnnnnnnnnnnnnnnnnnnnnnnnnnnnnnnnnnnnnnnnnnnnnnnnnnnnnnnnnnnnnnnnnnnnnnnnnnnnnnnnnnnnnnnnnnnnnnnnnnnnnnnnnnnnnnnnnnnnnnnnnnnnnnnnnnnnnnnnnnnnnnnnnnnnnnnnnnnnnnnnnnnnnnnnnnnnnnnnnnnnnnnnnnnnnnnnnnnnnnnnnnnnnnnnnnnnnnnnnnnnnnnnnnnnnnnnnnnnnnnnnnnnnnnnnnnnnnnnnnnnnnnnnnnnnnnnnnnnnnnnnnnnnnnnnnnnnnnnnnnnnnnnnnnnnnnnnnnnnnnnnnnnnnnnnnnnnnnnnnnnnnnnnnnnnnnnnnnnnnnnnnnnnnnnnnnnnnnnnnnnnnnnnnnnnnnnnnnnnnnnnnnnnnnnnnnnnnnnnnnnnnnnnnnnnnnnnnnnnnnnnnnnnnnnnnnnnnnnnnnnnnnnnnnnnnnnnnnnnnnnnnnnnnnnnnnnnnnnnnnnnnnnnnnnnnnnnnnnnnnnnnnnnnnnnnnnnnnnnnnnnnnnnnnnnnnnnnnnnnnnnnnnnnnnnnnnnnnnnnnnnnnnnnnnnnnnnnnnnnnnnnnnnnnnnnnnnnnnnnnnnnnnnnnnnnnnnnnnnnnnnnnnnnnnnnnnnnnnnnnnnnnnnnnnnnnnnnnnnnnnnnnnnnnnnnnnnnnnnnnnnnnnnnnnnnnnnnnnnnnnnnnnnnnnnnnnnnnnnnnnnnnnnnnnnnnnnnnnnnnnnnnnnnnnnnnnnnnnnnnnnnnnnnnnnnnnnnnnnnnnnnnnnnnnnnnnnnnnnnnnnnnnnnnnnnnnnnnnnnnnnnnnnnnnnnnnnnnnnnnnnnnnnnnnnnnnnnnnnnnnnnnnnnnnnnnnnnnnnnnnnnnnnnnnnnnnnnnnnnnnnnnnnnnnnnnnnnnnnnnnnnnnnnnnnnnnnnnnnnnnnnnnnnnnnnnnnnnnnnnnnnnnnnnnnnnnnnnnnnnnnnnnnnnnnnnnnnnnnnnnnnnnnnnnnnnnnnnnnnnnnnnnnnnnnnnnnnnnnnnnnnnnnnnnnnnnnnnnnnnnnnnnnnnnnnnnnnnnnnnnnnnnnnnnnnnnnnnnnnnnnnnnnnnnnnnnnnnnnnnnnnnnnnnnnnnnnnnnnnnnnnnnnnnnnnnnnnnnnnnnnnnnnnnnnnnnnnnnnnnnnnnnnnnnnnnnnnnnnnnnnnnnnnnnnnnnnnnnnnnnnnnnnnnnnnnnnnnnnnnnnnnnnnnnnnnnnnnnnnnnnnnnnnnnnnnnnnnnnnnnnnnnnnnnnnnnnnnnnnnnnnnnnnnnnnnnnnnnnnnnnnnnnnnnnnnnnnnnnnnnnnnnnnnnnnnnnnnnnnnnnnnnnnnnnnnnnnnnnnnnnnnnnnnnnnnnnnnnnnnnnnnnnnnnnnnnnnnnnnnnnnnnnnnnnnnnnnnnnnnnnnnnnnnnnnnnnnnnnnnnnnnnnnnnnnnnnnnnnnnnnnnnnnnnnnnnnnnnnnnnnnnnnnnnnnnnnnnnnnnnnnnnnnnnnnnnnnnnnnnnnnnnnnnnnnnnnnnnnnnnnnnnnnnnnnnnnnnnnnnnnnnnnnnnnnnnnnnnnnnnnnnnnnnnnnnnnnnnnnnnnnnnnnnnnnnnnnnnnnnnnnnnnnnnnnnnnnnnnnnnnnnnnnnnnnnnnnnnnnnnnnnnnnnnnnnnnnnnnnnnnnnnnnnnnnnnnnnnnnnnnnnnnnnnnnnnnnnnnnnnnnnnnnnnnnnnnnnnnnnnnnnnnnnnnnnnnnnnnnnnnnnnnnnnnnnnnnnnnnnnnnnnnnnnnnnnnnnnnnnnnnnnnnnnnnnnnnnnnnnnnnnnnnnnnnnnnnnnnnnnnnnnnnnnnnnnnnnnnnnnnnnnnnnnnnnnnnnnnnnnnnnnnnnnnnnnnnnnnnnnnnnnnnnnnnnnnnnnnnnnnnnnnnnnnnnnnnnnnnnnnnnnnnnnnnnnnnnnnnnnnnnnnnnnnnnnnnnnnnnnnnnnnnnnnnnnnnnnnnnnnnnnnnnnnnnnnnnnnnnnnnnnnnnnnnnnnnnnnnnnnnnnnnnnnnnnnnnnnnnnnnnnnnnnnnnnnnnnnnnnnnnnnnnnnnnnnnnnnnnnnnnnnnnnnnnnnnnnnnnnnnnnnnnnnnnnnnnnnnnnnnnnnnnnnnnnnnnnnnnnnnnnnnnnnnnnnnnnnnnnnnnnnnnnnnnnnnnnnnnnnnnnnnnnnnnnnnnnnnnnnnnnnnnnnnnnnnnnnnnnnnnnnnnnnnnnnnnnnnnnnnnnnnnnnnnnnnnnnnnnnnnnnnnnnnnnnnnnnnnnnnnnnnnnnnnnnnnnnnnnnnnnnnnnnnnnnnnnnnnnnnnnnnnnnnnnnnnnnnnnnnnnnnnnnnnnnnnnnnnnnnnnnnnnnnnnnnnnnnnnnnnnnnnnnnnnnnnnnnnnnnnnnnnnnnnnnnnnnnnnnnnnnnnnnnnnnnnnnnnnnnnnnnnnnnnnnnnnnnnnnnnnnnnnnnnnnnnnnnnnnnnnnnnnnnnnnnnnnnnnnnnnnnnnnnnnnnnnnnnnnnnnnnnnnnnnnnnnnnnnnnnnnnnnnnnnnnnnnnnnnnnnnnnnnnnnnnnnnnnnnnnnnnnnnnnnnnnnnnnnnnnnnnnnnnnnnnnnnnnnnnnnnnnnnnnnnnnnnnnnnnnnnnnnnnnnnnnnnnnnnnnnnnnnnnnnnnnnnnnnnnnnnnnnnnnnnnnnnnnnnnnnnnnnnnnnnnnnnnnnnnnnnnnnnnnnnnnnnnnnnnnnnnnnnnnnnnnnnnnnnnnnnnnnnnnnnnnnnnnnnnnnnnnnnnnnnnnnnnnnnnnnnnnnnnnnnnnnnnnnnnnnnnnnnnnnnnnnnnnnnnnnnnnnnnnnnnnnnnnnnnnnnnnnnnnnnnnnnnnnnnnnnnnnnnnnnnnnnnnnnnnnnnnnnnnnnnnnnnnnnnnnnnnnnnnnnnnnnnnnnnnnnnnnnnnnnnnnnnnnnnnnnnnnnnnnnnnnnnnnnnnnnnnnnnnnnnnnnnnnnnnnnnnnnnnnnnnnnnnnnnnnnnnnnnnnnnnnnnnnnnnnnnnnnnnnnnnnnnnnnnnnnnnnnnnnnnnnnnnnnnnnnnnnnnnnnnnnnnnnnnnnnnnnnnnnnnnnnnnnnnnnnnnnnnnnnnnnnnnnnnnnnnnnnnnnnnnnnnnnnnnnnnnnnnnnnnnnnnnnnnnnnnnnnnnnnnnnnnnnnnnnnnnnnnnnnnnnnnnnnnnnnnnnnnnnnnnnnnnnnnnnnnnnnnnnnnnnnnnnnnnnnnnnnnnnnnnnnnnnnnnnnnnnnnnnnnnnnnnnnnnnnnnnnnnnnnnnnnnnnnnnnnnnnnnnnnnnnnnnnnnnnnnnnnnnnnnnnnnnnnnnnnnnnnnnnnnnnnnnnnnnnnnnnnnnnnnnnnnnnnnnnnnnnnnnnnnnnnnnnnnnnnnnnnnnnnnnnnnnnnnnnnnnnnnnnnnnnnnnnnnnnnnnnnnnnnnnnnnnnnnnnnnnnnnnnnnnnnnnnnnnnnnnnnnnnnnnnnnnnnnnnnnnnnnnnnnnnnnnnnnnnnnnnnnnnnnnnnnnnnnnnnnnnnnnnnnnnnnnnnnnnnnnnnnnnnnnnnnnnnnnnnnnnnnnnnnnnnnnnnnnnnnnnnnnnnnnnnnnnnnnnnnnnnnnnnnnnnnnnnnnnnnnnnnnnnnnnnnnnnnnnnnnnnnnnnnnnnnnnnnnnnnnnnnnnnnnnnnnnnnnnnnnnnnnnnnnnnnnnnnnnnnnnnnnnnnnnnnnnnnnnnnnnnnnnnnnnnnnnnnnnnnnnnnnnnnnnnnnnnnnnnnnnnnnnnnnnnnnnnnnnnnnnnnnnnnnnnnnnnnnnnnnnnnnnnnnnnnnnnnnnnnnnnnnnnnnnnnnnnnnnnnnnnnnnnnnnnnnnnnnnnnnnnnnnnnnnnnnnnnnnnnnnnnnnnnnnnnnnnnnnnnnnnnnnnnnnnnnnnnnnnnnnnnnnnnnnnnnnnnnnnnnnnnnnnnnnnnnnnnnnnnnnnnnnnnnnnnnnnnnnnnnnnnnnnnnnnnnnnnnnnnnnnnnnnnnnnnnnnnnnnnnnnnnnnnnnnnnnnnnnnnnnnnnnnnnnnnnnnnnnnnnnnnnnnnnnnnnnnnnnnnnnnnnnnnnnnnnnnnnnnnnnnnnnnnnnnnnnnnnnnnnnnnnnnnnnnnnnnnnnnnnnnnnnnnnnnnnnnnnnnnnnnnnnnnnnnnnnnnnnnnnnnnnnnnnnnnnnnnnnnnnnnnnnnnnnnnnnnnnnnnnnnnnnnnnnnnnnnnnnnnnnnnnnnnnnnnnnnnnnnnnnnnnnnnnnnnnnnnnnnnnnnnnnnnnnnnnnnnnnnnnnnnnnnnnnnnnnnnnnnnnnnnnnnnnnnnnnnnnnnnnnnnnnnnnnnnnnnnnnnnnnnnnnnnnnnnnnnnnnnnnnnnnnnnnnnnnnnnnnnnnnnnnnnnnnnnnnnnnnnnnnnnnnnnnnnnnnnnnnnnnnnnnnnnnnnnnnnnnnnnnnnnnnnnnnnnnnnnnnnnnnnnnnnnnnnnnnnnnnnnnnnnnnnnnnnnnnnnnnnnnnnnnnnnnnnnnnnnnnnnnnnnnnnnnnnnnnnnnnnnnnnnnnnnnnnnnnnnnnnnnnnnnnnnnnnnnnnnnnnnnnnnnnnnnnnnnnnnnnnnnnnnnnnnnnnnnnnnnnnnnnnnnnnnnnnnnnnnnnnnnnnnnnnnnnnnnnnnnnnnnnnnnnnnnnnnnnnnnnnnnnnnnnnnnnnnnnnnnnnnnnnnnnnnnnnnnnnnnnnnnnnnnnnnnnnnnnnnnnnnnnnnnnnnnnnnnnnnnnnnnnnnnnnnnnnnnnnnnnnnnnnnnnnnnnnnnnnnnnnnnnnnnnnnnnnnnnnnnnnnnnnnnnnnnnnnnnnnnnnnnnnnnnnnnnnnnnnnnnnnnnnnnnnnnnnnnnnnnnnnnnnnnnnnnnnnnnnnnnnnnnnnnnnnnnnnnnnnnnnnnnnnnnnnnnnnnnnnnnnnnnnnnnnnnnnnnnnnnnnnnnnnnnnnnnnnnnnnnnnnnnnnnnnnnnnnnnnnnnnnnnnnnnnnnnnnnnnnnnnnnnnnnnnnnnnnnnnnnnnnnnnnnnnnnnnnnnnnnnnnnnnnnnnnnnnnnnnnnnnnnnnnnnnnnnnnnnnnnnnnnnnnnnnnnnnnnnnnnnnnnnnnnnnnnnnnnnnnnnnnnnnnnnnnnnnnnnnnnnnnnnnnnnnnnnnnnnnnnnnnnnnnnnnnnnnnnnnnnnnnnnnnnnnnnnnnnnnnnnnnnnnnnnnnnnnnnnnnnnnnnnnnnnnnnnnnnnnnnnnnnnnnnnnnnnnnnnnnnnnnnnnnnnnnnnnnnnnnnnnnnnnnnnnnnnnnnnnnnnnnnnnnnnnnnnnnnnnnnnnnnnnnnnnnnnnnnnnnnnnnnnnnnnnnnnnnnnnnnnnnnnnnnnnnnnnnnnnnnnnnnnnnnnnnnnnnnnnnnnnnnnnnnnnnnnnnnnnnnnnnnnnnnnnnnnnnnnnnnnnnnnnnnnnnnnnnnnnnnnnnnnnnnnnnnnnnnnnnnnnnnnnnnnnnnnnnnnnnnnnnnnnnnnnnnnnnnnnnnnnnnnnnnnnnnnnnnnnnnnnnnnnnnnnnnnnnnnnnnnnnnnnnnnnnnnnnnnnnnnnnnnnnnnnnnnnnnnnnnnnnnnnnnnnnnnnnnnnnnnnnnnnnnnnnnnnnnnnnnnnnnnnnnnnnnnnnnnnnnnnnnnnnnnnnnnnnnnnnnnnnnnnnnnnnnnnnnnnnnnnnnnnnnnnnnnnnnnnnnnnnnnnnnnnnnnnnnnnnnnnnnnnnnnnnnnnnnnnnnnnnnnnnnnnnnnnnnnnnnnnnnnnnnnnnnnnnnnnnnnnnnnnnnnnnnnnnnnnnnnnnnnnnnnnnnnnnnnnnnnnnnnnnnnnnnnnnnnnnnnnnnnnnnnnnnnnnnnnnnnnnnnnnnnnnnnnnnnnnnnnnnnnnnnnnnnnnnnnnnnnnnnnnnnnnnnnnnnnnnnnnnnnnnnnnnnnnnnnnnnnnnnnnnnnnnnnnnnnnnnnnnnnnnnnnnnnnnnnnnnnnnnnnnnnnnnnnnnnnnnnnnnnnnnnnnnnnnnnnnnnnnnnnnnnnnnnnnnnnnnnnnnnnnnnnnnnnnnnnnnnnnnnnnnnnnnnnnnnnnnnnnnnnnnnnnnnnnnnnnnnnnnnnnnnnnnnnnnnnnnnnnnnnnnnnnnnnnnnnnnnnnnnnnnnnnnnnnnnnnnnnnnnnnnnnnnnnnnnnnnnnnnnnnnnnnnnnnnnnnnnnnnnnnnnnnnnnnnnnnnnnnnnnnnnnnnnnnnnnnnnnnnnnnnnnnnnnnnnnnnnnnnnnnnnnnnnnnnnnnnnnnnnnnnnnnnnnnnnnnnnnnnnnnnnnnnnnnnnnnnnnnnnnnnnnnnnnnnnnnnnnnnnnnnnnnnnnnnnnnnnnnnnnnnnnnnnnnnnnnnnnnnnnnnnnnnnnnnnnnnnnnnnnnnnnnnnnnnnnnnnnnnnnnnnnnnnnnnnnnnnnnnnnnnnnnnnnnnnnnnnnnnnnnnnnnnnnnnnnnnnnnnnnnnnnnnnnnnnnnnnnnnnnnnnnnnnnnnnnnnnnnnnnnnnnnnnnnnnnnnnnnnnnnnnnnnnnnnnnnnnnnnnnnnnnnnnnnnnnnnnnnnnnnnnnnnnnnnnnnnnnnnnnnnnnnnnnnnnnnnnnnnnnnnnnnnnnnnnnnnnnnnnnnnnnnnnnnnnnnnnnnnnnnnnnnnnnnnnnnnnnnnnnnnnnnnnnnnnnnnnnnnnnnnnnnnnnnnnnnnnnnnnnnnnnnnnnnnnnnnnnnnnnnnnnnnnnnnnnnnnnnnnnnnnnnnnnnnnnnnnnnnnnnnnnnnnnnnnnnnnnnnnnnnnnnnnnnnnnnnnnnnnnnnnnnnnnnnnnnnnnnnnnnnnnnnnnnnnnnnnnnnnnnnnnnnnnnnnnnnnnnnnnnnnnnnnnnnnnnnnnnnnnnnnnnnnnnnnnnnnnnnnnnnnnnnnnnnnnnnnnnnnnnnnnnnnnnnnnnnnnnnnnnnnnnnnnnnnnnnnnnnnnnnnnnnnnnnnnnnnnnnnnnnnnnnnnnnnnnnnnnnnnnnnnnnnnnnnnnnnnnnnnnnnnnnnnnnnnnnnnnnnnnnnnnnnnnnnnnnnnnnnnnnnnnnnnnnnnnnnnnnnnnnnnnnnnnnnnnnnnnnnnnnnnnnnnnnnnnnnnnnnnnnnnnnnnnnnnnnnnnnnnnnnnnnnnnnnnnnnnnnnnnnnnnnnnnnnnnnnnnnnnnnnnnnnnnnnnnnnnnnnnnnnnnnnnnnnnnnnnnnnnnnnnnnnnnnnnnnnnnnnnnnnnnnnnnnnnnnnnnnnnnnnnnnnnnnnnnnnnnnnnnnnnnnnnnnnnnnnnnnnnnnnnnnnnnnnnnnnnnnnnnnnnnnnnnnnnnnnnnnnnnnnnnnnnnnnnnnnnnnnnnnnnnnnnnnnnnnnnnnnnnnnnnnnnnnnnnnnnnnnnnnnnnnnnnnnnnnnnnnnnnnnnnnnnnnnnnnnnnnnnnnnnnnnnnnnnnnnnnnnnnnnnnnnnnnnnnnnnnnnnnnnnnnnnnnnnnnnnnnnnnnnnnnnnnnnnnnnnnnnnnnnnnnnnnnnnnnnnnnnnnnnnnnnnnnnnnnnnnnnnnnnnnnnnnnnnnnnnnnnnnnnnnnnnnnnnnnnnnnnnnnnnnnnnnnnnnnnnnnnnnnnnnnnnnnnnnnnnnnnnnnnnnnnnnnnnnnnnnnnnnnnnnnnnnnnnnnnnnnnnnnnnnnnnnnnnnnnnnnnnnnnnnnnnnnnnnnnnnnnnnnnnnnnnnnnnnnnnnnnnnnnnnnnnnnnnnnnnnnnnnnnnnnnnnnnnnnnnnnnnnnnnnnnnnnnnnnnnnnnnnnnnnnnnnnnnnnnnnnnnnnnnnnnnnnnnnnnnnnnnnnnnnnnnnnnnnnnnnnnnnnnnnnnnnnnnnnnnnnnnnnnnnnnnnnnnnnnnnnnnnnnnnnnnnnnnnnnnnnnnnnnnnnnnnnnnnnnnnnnnnnnnnnnnnnnnnnnnnnnnnnnnnnnnnnnnnnnnnnnnnnnnnnnnnnnnnnnnnnnnnnnnnnnnnnnnnnnnnnnnnnnnnnnnnnnnnnnnnnnnnnnnnnnnnnnnnnnnnnnnnnnnnnnnnnnnnnnnnnnnnnnnnnnnnnnnnnnnnnnnnnnnnnnnnnnnnnnnnnnnnnnnnnnnnnnnnnnnnnnnnnnnnnnnnnnnnnnnnnnnnnnnnnnnnnnnnnnnnnnnnnnnnnnnnnnnnnnnnnnnnnnnnnnnnnnnnnnnnnnnnnnnnnnnnnnnnnnnnnnnnnnnnnnnnnnnnnnnnnnnnnnnnnnnnnnnnnnnnnnnnnnnnnnnnnnnnnnnnnnnnnnnnnnnnnnnnnnnnnnnnnnnnnnnnnnnnnnnnnnnnnnnnnnnnnnnnnnnnnnnnnnnnnnnnnnnnnnnnnnnnnnnnnnnnnnnnnnnnnnnnnnnnnnnnnnnnnnnnnnnnnnnnnnnnnnnnnnnnnnnnnnnnnnnnnnnnnnnnnnnnnnnnnnnnnnnnnnnnnnnnnnnnnnnnnnnnnnnnnnnnnnnnnnnnnnnnnnnnnnnnnnnnnnnnnnnnnnnnnnnnnnnnnnnnnnnnnnnnnnnnnnnnnnnnnnnnnnnnnnnnnnnnnnnnnnnnnnnnnnnnnnnnnnnnnnnnnnnnnnnnnnnnnnnnnnnnnnnnnnnnnnnnnnnnnnnnnnnnnnnnnnnnnnnnnnnnnnnnnnnnnnnnnnnnnnnnnnnnnnnnnnnnnnnnnnnnnnnnnnnnnnnnnnnnnnnnnnnnnnnnnnnnnnnnnnnnnnnnnnnnnnnnnnnnnnnnnnnnnnnnnnnnnnnnnnnnnnnnnnnnnnnnnnnnnnnnnnnnnnnnnnnnnnnnnnnnnnnnnnnnnnnnnnnnnnnnnnnnnnnnnnnnnnnnnnnnnnnnnnnnnnnnnnnnnnnnnnnnnnnnnnnnnnnnnnnnnnnnnnnnnnnnnnnnnnnnnnnnnnnnnnnnnnnnnnnnnnnnnnnnnnnnnnnnnnnnnnnnnnnnnnnnnnnnnnnnnnnnnnnnnnnnnnnnnnnnnnnnnnnnnnnnnnnnnnnnnnnnnnnnnnnnnnnnnnnnnnnnnnnnnnnnnnnnnnnnnnnnnnnnnnnnnnnnnnnnnnnnnnnnnnnnnnnnnnnnnnnnnnnnnnnnnnnnnnnnnnnnnnnnnnnnnnnnnnnnnnnnnnnnnnnnnnnnnnnnnnnnnnnnnnnnnnnnnnnnnnnnnnnnnnnnnnnnnnnnnnnnnnnnnnnnnnnnnnnnnnnnnnnnnnnnnnnnnnnnnnnnnnnnnnnnnnnnnnnnnnnnnnnnnnnnnnnnnnnnnnnnnnnnnnnnnnnnnnnnnnnnnnnnnnnnnnnnnnnnnnnnnnnnnnnnnnnnnnnnnnnnnnnnnnnnnnnnnnnnnnnnnnnnnnnnnnnnnnnnnnnnnnnnnnnnnnnnnnnnnnnnnnnnnnnnnnnnnnnnnnnnnnnnnnnnnnnnnnnnnnnnnnnnnnnnnnnnnnnnnnnnnnnnnnnnnnnnnnnnnnnnnnnnnnnnnnnnnnnnnnnnnnnnnnnnnnnnnnnnnnnnnnnnnnnnnnnnnnnnnnnnnnnnnnnnnnnnnnnnnnnnnnnnnnnnnnnnnnnnnnnnnnnnnnnnnnnnnnnnnnnnnnnnnnnnnnnnnnnnnnnnnnnnnnnnnnnnnnnnnnnnnnnnnnnnnnnnnnnnnnnnnnnnnnnnnnnnnnnnnnnnnnnnnnnnnnnnnnnnnnnnnnnnnnnnnnnnnnnnnnnnnnnnnnnnnnnnnnnnnnnnnnnnnnnnnnnnnnnnnnnnnnnnnnnnnnnnnnnnnnnnnnnnnnnnnnnnnnnnnnnnnnnnnnnnnnnnnnnnnnnnnnnnnnnnnnnnnnnnnnnnnnnnnnnnnnnnnnnnnnnnnnnnnnnnnnnnnnnnnnnnnnnnnnnnnnnnnnnnnnnnnnnnnnnnnnnnnnnnnnnnnnnnnnnnnnnnnnnnnnnnnnnnnnnnnnnnnnnnnnnnnnnnnnnnnnnnnnnnnnnnnnnnnnnnnnnnnnnnnnnnnnnnnnnnnnnnnnnnnnnnnnnnnnnnnnnnnnnnnnnnnnnnnnnnnnnnnnnnnnnnnnnnnnnnnnnnnnnnnnnnnnnnnnnnnnnnnnnnnnnnnnnnnnnnnnnnnnnnnnnnnnnnnnnnnnnnnnnnnnnnnnnnnnnnnnnnnnnnnnnnnnnnnnnnnnnnnnnnnnnnnnnnnnnnnnnnnnnnnnnnnnnnnnnnnnnnnnnnnnnnnnnnnnnnnnnnnnnnnnnnnnnnnnnnnnnnnnnnnnnnnnnnnnnnnnnnnnnnnnnnnnnnnnnnnnnnnnnnnnnnnnnnnnnnnnnnnnnnnnnnnnnnnnnnnnnnnnnnnnnnnnnnnnnnnnnnnnnnnnnnnnnnnnnnnnnnnnnnnnnnnnnnnnnnnnnnnnnnnnnnnnnnnnnnnnnnnnnnnnnnnnnnnnnnnnnnnnnnnnnnnnnnnnnnnnnnnnnnnnnnnnnnnnnnnnnnnnnnnnnnnnnnnnnnnnnnnnnnnnnnnnnnnnnnnnnnnnnnnnnnnnnnnnnnnnnnnnnnnnnnnnnnnnnnnnnnnnnnnnnnnnnnnnnnnnnnnnnnnnnnnnnnnnnnnnnnnnnnnnnnnnnnnnnnnnnnnnnnnnnnnnnnnnnnnnnnnnnnnnnnnnnnnnnnnnnnnnnnnnnnnnnnnnnnnnnnnnnnnnnnnnnnnnnnnnnnnnnnnnnnnnnnnnnnnnnnnnnnnnnnnnnnnnnnnnnnnnnnnnnnnnnnnnnnnnnnnnnnnnnnnnnnnnnnnnnnnnnnnnnnnnnnnnnnnnnnnnnnnnnnnnnnnnnnnnnnnnnnnnnnnnnnnnnnnnnnnnnnnnnnnnnnnnnnnnnnnnnnnnnnnnnnnnnnnnnnnnnnnnnnnnnnnnnnnnnnnnnnnnnnnnnnnnnnnnnnnnnnnnnnnnnnnnnnnnnnnnnnnnnnnnnnnnnnnnnnnnnnnnnnnnnnnnnnnnnnnnnnnnnnnnnnnnnnnnnnnnnnnnnnnnnnnnnnnnnnnnnnnnnnnnnnnnnnnnnnnnnnnnnnnnnnnnnnnnnnnnnnnnnnnnnnnnnnnnnnnnnnnnnnnnnnnnnnnnnnnnnnnnnnnnnnnnnnnnnnnnnnnnnnnnnnnnnnnnnnnnnnnnnnnnnnnnnnnnnnnnnnnnnnnnnnnnnnnnnnnnnnnnnnnnnnnnnnnnnnnnnnnnnnnnnnnnnnnnnnnnnnnnnnnnnnnnnnnnnnnnnnnnnnnnnnnnnnnnnnnnnnnnnnnnnnnnnnnnnnnnnnnnnnnnnnnnnnnnnnnnnnnnnnnnnnnnnnnnnnnnnnnnnnnnnnnnnnnnnnnnnnnnnnnnnnnnnnnnnnnnnnnnnnnnnnnnnnnnnnnnnnnnnnnnnnnnnnnnnnnnnnnnnnnnnnnnnnnnnnnnnnnnnnnnnnnnnnnnnnnnnnnnnnnnnnnnnnnnnnnnnnnnnnnnnnnnnnnnnnnnnnnnnnnnnnnnnnnnnnnnnnnnnnnnnnnnnnnnnnnnnnnnnnnnnnnnnnnnnnnnnnnnnnnnnnnnnnnnnnnnnnnnnnnnnnnnnnnnnnnnnnnnnnnnnnnnnnnnnnnnnnnnnnnnnnnnnnnnnnnnnnnnnnnnnnnnnnnnnnnnnnnnnnnnnnnnnnnnnnnnnnnnnnnnnnnnnnnnnnnnnnnnnnnnnnnnnnnnnnnnnnnnnnnnnnnnnnnnnnnnnnnnnnnnnnnnnnnnnnnnnnnnnnnnnnnnnnnnnnnnnnnnnnnnnnnnnnnnnnnnnnnnnnnnnnnnnnnnnnnnnnnnnnnnnnnnnnnnnnnnnnnnnnnnnnnnnnnnnnnnnnnnnnnnnnnnnnnnnnnnnnnnnnnnnnnnnnnnnnnnnnnnnnnnnnnnnnnnnnnnnnnnnnnnnnnnnnnnnnnnnnnnnnnnnnnnnnnnnnnnnnnnnnnnnnnnnnnnnnnnnnnnnnnnnnnnnnnnnnnnnnnnnnnnnnnnnnnnnnnnnnnnnnnnnnnnnnnnnnnnnnnnnnnnnnnnnnnnnnnnnnnnnnnnnnnnnnnnnnnnnnnnnnnnnnnnnnnnnnnnnnnnnnnnnnnnnnnnnnnnnnnnnnnnnnnnnnnnnnnnnnnnnnnnnnnnnnnnnnnnnnnnnnnnnnnnnnnnnnnnnnnnnnnnnnnnnnnnnnnnnnnnnnnnnnnnnnnnnnnnnnnnnnnnnnnnnnnnnnnnnnnnnnnnnnnnnnnnnnnnnnnnnnnnnnnnnnnnnnnnnnnnnnnnnnnnnnnnnnnnnnnnnnnnnnnnnnnnnnnnnnnnnnnnnnnnnnnnnnnnnnnnnnnnnnnnnnnnnnnnnnnnnnnnnnnnnnnnnnnnnnnnnnnnnnnnnnnnnnnnnnnnnnnnnnnnnnnnnnnnnnnnnnnnnnnnnnnnnnnnnnnnnnnnnnnnnnnnnnnnnnnnnnnnnnnnnnnnnnnnnnnnnnnnnnnnnnnnnnnnnnnnnnnnnnnnnnnnnnnnnnnnnnnnnnnnnnnnnnnnnnnnnnnnnnnnnnnnnnnnnnnnnnnnnnnnnnnnnnnnnnnnnnnnnnnnnnnnnnnnnnnnnnnnnnnnnnnnnnnnnnnnnnnnnnnnnnnnnnnnnnnnnnnnnnnnnnnnnnnnnnnnnnnnnnnnnnnnnnnnnnnnnnnnnnnnnnnnnnnnnnnnnnnnnnnnnnnnnnnnnnnnnnnnnnnnnnnnnnnnnnnnnnnnnnnnnnnnnnnnnnnnnnnnnnnnnnnnnnnnnnnnnnnnnnnnnnnnnnnnnnnnnnnnnnnnnnnnnnnnnnnnnnnnnnnnnnnnnnnnnnnnnnnnnnnnnnnnnnnnnnnnnnnnnnnnnnnnnnnnnnnnnnnnnnnnnnnnnnnnnnnnnnnnnnnnnnnnnnnnnnnnnnnnnnnnnnnnnnnnnnnnnnnnnnnnnnnnnnnnnnnnnnnnnnnnnnnnnnnnnnnnnnnnnnnnnnnnnnnnnnnnnnnnnnnnnnnnnnnnnnnnnnnnnnnnnnnnnnnnnnnnnnnnnnnnnnnnnnnnnnnnnnnnnnnnnnnnnnnnnnnnnnnnnnnnnnnnnnnnnnnnnnnnnnnnnnnnnnnnnnnnnnnnnnnnnnnnnnnnnnnnnnnnnnnnnnnnnnnnnnnnnnnnnnnnnnnnnnnnnnnnnnnnnnnnnnnnnnnnnnnnnnnnnnnnnnnnnnnnnnnnnnnnnnnnnnnnnnnnnnnnnnnnnnnnnnnnnnnnnnnnnnnnnnnnnnnnnnnnnnnnnnnnnnnnnnnnnnnnnnnnnnnnnnnnnnnnnnnnnnnnnnnnnnnnnnnnnnnnnnnnnnnnnnnnnnnnnnnnnnnnnnnnnnnnnnnnnnnnnnnnnnnnnnnnnnnnnnnnnnnnnnnnnnnnnnnnnnnnnnnnnnnnnnnnnnnnnnnnnnnnnnnnnnnnnnnnnnnnnnnnnnnnnnnnnnnnnnnnnnnnnnnnnnnnnnnnnnnnnnnnnnnnnnnnnnnnnnnnnnnnnnnnnnnnnnnnnnnnnnnnnnnnnnnnnnnnnnnnnnnnnnnnnnnnnnnnnnnnnnnnnnnnnnnnnnnnnnnnnnnnnnnnnnnnnnnnnnnnnnnnnnnnnnnnnnnnnnnnnnnnnnnnnnnnnnnnnnnnnnnnnnnnnnnnnnnnnnnnnnnnnnnnnnnnnnnnnnnnnnnnnnnnnnnnnnnnnnnnnnnnnnnnnnnnnnnnnnnnnnnnnnnnnnnnnnnnnnnnnnnnnnnnnnnnnnnnnnnnnnnnnnnnnnnnnnnnnnnnnnnnnnnnnnnnnnnnnnnnnnnnnnnnnnnnnnnnnnnnnnnnnnnnnnnnnnnnnnnnnnnnnnnnnnnnnnnnnnnnnnnnnnnnnnnnnnnnnnnnnnnnnnnnnnnnnnnnnnnnnnnnnnnnnnnnnnnnnnnnnnnnnnnnnnnnnnnnnnnnnnnnnnnnnnnnnnnnnnnnnnnnnnnnnnnnnnnnnnnnnnnnnnnnnnnnnnnnnnnnnnnnnnnnnnnnnnnnnnnnnnnnnnnnnnnnnnnnnnnnnnnnnnnnnnnnnnnnnnnnnnnnnnnnnnnnnnnnnnnnnnnnnnnnnnnnnnnnnnnnnnnnnnnnnnnnnnnnnnnnnnnnnnnnnnnnnnnnnnnnnnnnnnnnnnnnnnnnnnnnnnnnnnnnnnnnnnnnnnnnnnnnnnnnnnnnnnnnnnnnnnnnnnnnnnnnnnnnnnnnnnnnnnnnnnnnnnnnnnnnnnnnnnnnnnnnnnnnnnnnnnnnnnnnnnnnnnnnnnnnnnnnnnnnnnnnnnnnnnnnnnnnnnnnnnnnnnnnnnnnnnnnnnnnnnnnnnnnnnnnnnnnnnnnnnnnnnnnnnnnnnnnnnnnnnnnnnnnnnnnnnnnnnnnnnnnnnnnnnnnnnnnnnnnnnnnnnnnnnnnnnnnnnnnnnnnnnnnnnnnnnnnnnnnnnnnnnnnnnnnnnnnnnnnnnnnnnnnnnnnnnnnnnnnnnnnnnnnnnnnnnnnnnnnnnnnnnnnnnnnnnnnnnnnnnnnnnnnnnnnnnnnnnnnnnnnnnnnnnnnnnnnnnnnnnnnnnnnnnnnnnnnnnnnnnnnnnnnnnnnnnnnnnnnnnnnnnnnnnnnnnnnnnnnnnnnnnnnnnnnnnnnnnnnnnnnnnnnnnnnnnnnnnnnnnnnnnnnnnnnnnnnnnnnnnnnnnnnnnnnnnnnnnnnnnnnnnnnnnnnnnnnnnnnnnnnnnnnnnnnnnnnnnnnnnnnnnnnnnnnnnnnnnnnnnnnnnnnnnnnnnnnnnnnnnnnnnnnnnnnnnnnnnnnnnnnnnnnnnnnnnnnnnnnnnnnnnnnnnnnnnnnnnnnnnnnnnnnnnnnnnnnnnnnnnnnnnnnnnnnnnnnnnnnnnnnnnnnnnnnnnnnnnnnnnnnnnnnnnnnnnnnnnnnnnnnnnnnnnnnnnnnnnnnnnnnnnnnnnnnnnnnnnnnnnnnnnnnnnnnnnnnnnnnnnnnnnnnnnnnnnnnnnnnnnnnnnnnnnnnnnnnnnnnnnnnnnnnnnnnnnnnnnnnnnnnnnnnnnnnnnnnnnnnnnnnnnnnnnnnnnnnnnnnnnnnnnnnnnnnnnnnnnnnnnnnnnnnnnnnnnnnnnnnnnnnnnnnnnnnnnnnnnnnnnnnnnnnnnnnnnnnnnnnnnnnnnnnnnnnnnnnnnnnnnnnnnnnnnnnnnnnnnnnnnnnnnnnnnnnnnnnnnnnnnnnnnnnnnnnnnnnnnnnnnnnnnnnnnnnnnnnnnnnnnnnnnnnnnnnnnnnnnnnnnnnnnnnnnnnnnnnnnnnnnnnnnnnnnnnnnnnnnnnnnnnnnnnnnnnnnnnnnnnnnnnnnnnnnnnnnnnnnnnnnnnnnnnnnnnnnnnnnnnnnnnnnnnnnnnnnnnnnnnnnnnnnnnnnnnnnnnnnnnnnnnnnnnnnnnnnnnnnnnnnnnnnnnnnnnnnnnnnnnnnnnnnnnnnnnnnnnnnnnnnnnnnnnnnnnnnnnnnnnnnnnnnnnnnnnnnnnnnnnnnnnnnnnnnnnnnnnnnnnnnnnnnnnnnnnnnnnnnnnnnnnnnnnnnnnnnnnnnnnnnnnnnnnnnnnnnnnnnnnnnnnnnnnnnnnnnnnnnnnnnnnnnnnnnnnnnnnnnnnnnnnnnnnnnnnnnnnnnnnnnnnnnnnnnnnnnnnnnnnnnnnnnnnnnnnnnnnnnnnnnnnnnnnnnnnnnnnnnnnnnnnnnnnnnnnnnnnnnnnnnnnnnnnnnnnnnnnnnnnnnnnnnnnnnnnnnnnnnnnnnnnnnnnnnnnnnnnnnnnnnnnnnnnnnnnnnnnnnnnnnnnnnnnnnnnnnnnnnnnnnnnnnnnnnnnnnnnnnnnnnnnnnnnnnnnnnnnnnnnnnnnnnnnnnnnnnnnnnnnnnnnnnnnnnnnnnnnnnnnnnnnnnnnnnnnnnnnnnnnnnnnnnnnnnnnnnnnnnnnnnnnnnnnnnnnnnnnnnnnnnnnnnnnnnnnnnnnnnnnnnnnnnnnnnnnnnnnnnnnnnnnnnnnnnnnnnnnnnnnnnnnnnnnnnnnnnnnnnnnnnnnnnnnnnnnnnnnnnnnnnnnnnnnnnnnnnnnnnnnnnnnnnnnnnnnnnnnnnnnnnnnnnnnnnnnnnnnnnnnnnnnnnnnnnnnnnnnnnnnnnnnnnnnnnnnnnnnnnnnnnnnnnnnnnnnnnnnnnnnnnnnnnnnnnnnnnnnnnnnnnnnnnnnnnnnnnnnnnnnnnnnnnnnnnnnnnnnnnnnnnnnnnnnnnnnnnnnnnnnnnnnnnnnnnnnnnnnnnnnnnnnnnnnnnnnnnnnnnnnnnnnnnnnnnnnnnnnnnnnnnnnnnnnnnnnnnnnnnnnnnnnnnnnnnnnnnnnnnnnnnnnnnnnnnnnnnnnnnnnnnnnnnnnnnnnnnnnnnnnnnnnnnnnnnnnnnnnnnnnnnnnnnnnnnnnnnnnnnnnnnnnnnnnnnnnnnnnnnnnnnnnnnnnnnnnnnnnnnnnnnnnnnnnnnnnnnnnnnnnnnnnnnnnnnnnnnnnnnnnnnnnnnnnnnnnnnnnnnnnnnnnnnnnnnnnnnnnnnnnnnnnnnnnnnnnnnnnnnnnnnnnnnnnnnnnnnnnnnnnnnnnnnnnnnnnnnnnnnnnnnnnnnnnnnnnnnnnnnnnnnnnnnnnnnnnnnnnnnnnnnnnnnnnnnnnnnnnnnnnnnnnnnnnnnnnnnnnnnnnnnnnnnnnnnnnnnnnnnnnnnnnnnnnnnnnnnnnnnnnnnnnnnnnnnnnnnnnnnnnnnnnnnnnnnnnnnnnnnnnnnnnnnnnnnnnnnnnnnnnnnnnnnnnnnnnnnnnnnnnnnnnnnnnnnnnnnnnnnnnnnnnnnnnnnnnnnnnnnnnnnnnnnnnnnnnnnnnnnnnnnnnnnnnnnnnnnnnnnnnnnnnnnnnnnnnnnnnnnnnnnnnnnnnnnnnnnnnnnnnnnnnnnnnnnnnnnnnnnnnnnnnnnnnnnnnnnnnnnnnnnnnnnnnnnnnnnnnnnnnnnnnnnnnnnnnnnnnnnnnnnnnnnnnnnnnnnnnnnnnnnnnnnnnnnnnnnnnnnnnnnnnnnnnnnnnnnnnnnnnnnnnnnnnnnnnnnnnnnnnnnnnnnnnnnnnnnnnnnnnnnnnnnnnnnnnnnnnnnnnnnnnnnnnnnnnnnnnnnnnnnnnnnnnnnnnnnnnnnnnnnnnnnnnnnnnnnnnnnnnnnnnnnnnnnnnnnnnnnnnnnnnnnnnnnnnnnnnnnnnnnnnnnnnnnnnnnnnnnnnnnnnnnnnnnnnnnnnnnnnnnnnnnnnnnnnnnnnnnnnnnnnnnnnnnnnnnnnnnnnnnnnnnnnnnnnnnnnnnnnnnnnnnnnnnnnnnnnnnnnnnnnnnnnnnnnnnnnnnnnnnnnnnnnnnnnnnnnnnnnnnnnnnnnnnnnnnnnnnnnnnnnnnnnnnnnnnnnnnnnnnnnnnnnnnnnnnnnnnnnnnnnnnnnnnnnnnnnnnnnnnnnnnnnnnnnnnnnnnnnnnnnnnnnnnnnnnnnnnnnnnnnnnnnnnnnnnnnnnnnnnnnnnnnnnnnnnnnnnnnnnnnnnnnnnnnnnnnnnnnnnnnnnnnnnnnnnnnnnnnnnnnnnnnnnnnnnnnnnnnnnnnnnnnnnnnnnnnnnnnnnnnnnnnnnnnnnnnnnnnnnnnnnnnnnnnnnnnnnnnnnnnnnnnnnnnnnnnnnnnnnnnnnnnnnnnnnnnnnnnnnnnnnnnnnnnnnnnnnnnnnnnnnnnnnnnnnnnnnnnnnnnnnnnnnnnnnnnnnnnnnnnnnnnnnnnnnnnnnnnnnnnnnnnnnnnnnnnnnnnnnnnnnnnnnnnnnnnnnnnnnnnnnnnnnnnnnnnnnnnnnnnnnnnnnnnnnnnnnnnnnnnnnnnnnnnnnnnnnnnnnnnnnnnnnnnnnnnnnnnnnnnnnnnnnnnnnnnnnnnnnnnnnnnnnnnnnnnnnnnnnnnnnnnnnnnnnnnnnnnnnnnnnnnnnnnnnnnnnnnnnnnnnnnnnnnnnnnnnnnnnnnnnnnnnnnnnnnnnnnnnnnnnnnnnnnnnnnnnnnnnnnnnnnnnnnnnnnnnnnnnnnnnnnnnnnnnnnnnnnnnnnnnnnnnnnnnnnnnnnnnnnnnnnnnnnnnnnnnnnnnnnnnnnnnnnnnnnnnnnnnnnnnnnnnnnnnnnnnnnnnnnnnnnnnnnnnnnnnnnnnnnnnnnnnnnnnnnnnnnnnnnnnnnnnnnnnnnnnnnnnnnnnnnnnnnnnnnnnnnnnnnnnnnnnnnnnnnnnnnnnnnnnnnnnnnnnnnnnnnnnnnnnnnnnnnnnnnnnnnnnnnnnnnnnnnnnnnnnnnnnnnnnnnnnnnnnnnnnnnnnnnnnnnnnnnnnnnnnnnnnnnnnnnnnnnnnnnnnnnnnnnnnnnnnnnnnnnnnnnnnnnnnnnnnnnnnnnnnnnnnnnnnnnnnnnnnnnnnnnnnnnnnnnnnnnnnnnnnnnnnnnnnnnnnnnnnnnnnnnnnnnnnnnnnnnnnnnnnnnnnnnnnnnnnnnnnnnnnnnnnnnnnnnnnnnnnnnnnnnnnnnnnnnnnnnnnnnnnnnnnnnnnnnnnnnnnnnnnnnnnnnnnnnnnnnnnnnnnnnnnnnnnnnnnnnnnnnnnnnnnnnnnnnnnnnnnnnnnnnnnnnnnnnnnnnnnnnnnnnnnnnnnnnnnnnnnnnnnnnnnnnnnnnnnnnnnnnnnnnnnnnnnnnnnnnnnnnnnnnnnnnnnnnnnnnnnnnnnnnnnnnnnnnnnnnnnnnnnnnnnnnnnnnnnnnnnnnnnnnnnnnnnnnnnnnnnnnnnnnnnnnnnnnnnnnnnnnnnnnnnnnnnnnnnnnnnnnnnnnnnnnnnnnnnnnnnnnnnnnnnnnnnnnnnnnnnnnnnnnnnnnnnnnnnnnnnnnnnnnnnnnnnnnnnnnnnnnnnnnnnnnnnnnnnnnnnnnnnnnnnnnnnnnnnnnnnnnnnnnnnnnnnnnnnnnnnnnnnnnnnnnnnnnnnnnnnnnnnnnnnnnnnnnnnnnnnnnnnnnnnnnnnnnnnnnnnnnnnnnnnnnnnnnnnnnnnnnnnnnnnnnnnnnnnnnnnnnnnnnnnnnnnnnnnnnnnnnnnnnnnnnnnnnnnnnnnnnnnnnnnnnnnnnnnnnnnnnnnnnnnnnnnnnnnnnnnnnnnnnnnnnnnnnnnnnnnnnnnnnnnnnnnnnnnnnnnnnnnnnnnnnnnnnnnnnnnnnnnnnnnnnnnnnnnnnnnnnnnnnnnnnnnnnnnnnnnnnnnnnnnnnnnnnnnnnnnnnnnnnnnnnnnnnnnnnnnnnnnnnnnnnnnnnnnnnnnnnnnnnnnnnnnnnnnnnnnnnnnnnnnnnnnnnnnnnnnnnnnnnnnnnnnnnnnnnnnnnnnnnnnnnnnnnnnnnnnnnnnnnnnnnnnnnnnnnnnnnnnnnnnnnnnnnnnnnnnnnnnnnnnnnnnnnnnnnnnnnnnnnnnnnnnnnnnnnnnnnnnnnnnnnnnnnnnnnnnnnnnnnnnnnnnnnnnnnnnnnnnnnnnnnnnnnnnnnnnnnnnnnnnnnnnnnnnnnnnnnnnnnnnnnnnnnnnnnnnnnnnnnnnnnnnnnnnnnnnnnnnnnnnnnnnnnnnnnnnnnnnnnnnnnnnnnnnnnnnnnnnnnnnnnnnnnnnnnnnnnnnnnnnnnnnnnnnnnnnnnnnnnnnnnnnnnnnnnnnnnnnnnnnnnnnnnnnnnnnnnnnnnnnnnnnnnnnnnnnnnnnnnnnnnnnnnnnnnnnnnnnnnnnnnnnnnnnnnnnnnnnnnnnnnnnnnnnnnnnnnnnnnnnnnnnnnnnnnnnnnnnnnnnnnnnnnnnnnnnnnnnnnnnnnnnnnnnnnnnnnnnnnnnnnnnnnnnnnnnnnnnnnnnnnnnnnnnnnnnnnnnnnnnnnnnnnnnnnnnnnnnnnnnnnnnnnnnnnnnnnnnnnnnnnnnnnnnnnnnnnnnnnnnnnnnnnnnnnnnnnnnnnnnnnnnnnnnnnnnnnnnnnnnnnnnnnnnnnnnnnnnnnnnnnnnnnnnnnnnnnnnnnnnnnnnnnnnnnnnnnnnnnnnnnnnnnnnnnnnnnnnnnnnnnnnnnnnnnnnnnnnnnnnnnnnnnnnnnnnnnnnnnnnnnnnnnnnnnnnnnnnnnnnnnnnnnnnnnnnnnnnnnnnnnnnnnnnnnnnnnnnnnnnnnnnnnnnnnnnnnnnnnnnnnnnnnnnnnnnnnnnnnnnnnnnnnnnnnnnnnnnnnnnnnnnnnnnnnnnnnnnnnnnnnnnnnnnnnnnnnnnnnnnnnnnnnnnnnnnnnnnnnnnnnnnnnnnnnnnnnnnnnnnnnnnnnnnnnnnnnnnnnnnnnnnnnnnnnnnnnnnnnnnnnnnnnnnnnnnnnnnnnnnnnnnnnnnnnnnnnnnnnnnnnnnnnnnnnnnnnnnnnnnnnnnnnnnnnnnnnnnnnnnnnnnnnnnnnnnnnnnnnnnnnnnnnnnnnnnnnnnnnnnnnnnnnnnnnnnnnnnnnnnnnnnnnnnnnnnnnnnnnnnnnnnnnnnnnnnnnnnnnnnnnnnnnnnnnnnnnnnnnnnnnnnnnnnnnnnnnnnnnnnnnnnnnnnnnnnnnnnnnnnnnnnnnnnnnnnnnnnnnnnnnnnnnnnnnnnnnnnnnnnnnnnnnnnnnnnnnnnnnnnnnnnnnnnnnnnnnnnnnnnnnnnnnnnnnnnnnnnnnnnnnnnnnnnnnnnnnnnnnnnnnnnnnnnnnnnnnnnnnnnnnnnnnnnnnnnnnnnnnnnnnnnnnnnnnnnnnnnnnnnnnnnnnnnnnnnnnnnnnnnnnnnnnnnnnnnnnnnnnnnnnnnnnnnnnnnnnnnnnnnnnnnnnnnnnnnnnnnnnnnnnnnnnnnnnnnnnnnnnnnnnnnnnnnnnnnnnnnnnnnnnnnnnnnnnnnnnnnnnnnnnnnnnnnnnnnnnnnnnnnnnnnnnnnnnnnnnnnnnnnnnnnnnnnnnnnnnnnnnnnnnnnnnnnnnnnnnnnnnnnnnnnnnnnnnnnnnnnnnnnnnnnnnnnnnnnnnnnnnnnnnnnnnnnnnnnnnnnnnnnnnnnnnnnnnnnnnnnnnnnnnnnnnnnnnnnnnnnnnnnnnnnnnnnnnnnnnnnnnnnnnnnnnnnnnnnnnnnnnnnnnnnnnnnnnnnnnnnnnnnnnnnnnnnnnnnnnnnnnnnnnnnnnnnnnnnnnnnnnnnnnnnnnnnnnnnnnnnnnnnnnnnnnnnnnnnnnnnnnnnnnnnnnnnnnnnnnnnnnnnnnnnnnnnnnnnnnnnnnnnnnnnnnnnnnnnnnnnnnnnnnnnnnnnnnnnnnnnnnnnnnnnnnnnnnnnnnnnnnnnnnnnnnnnnnnnnnnnnnnnnnnnnnnnnnnnnnnnnnnnnnnnnnnnnnnnnnnnnnnnnnnnnnnnnnnnnnnnnnnnnnnnnnnnnnnnnnnnnnnnnnnnnnnnnnnnnnnnnnnnnnnnnnnnnnnnnnnnnnnnnnnnnnnnnnnnnnnnnnnnnnnnnnnnnnnnnnnnnnnnnnnnnnnnnnnnnnnnnnnnnnnnnnnnnnnnnnnnnnnnnnnnnnnnnnnnnnnnnnnnnnnnnnnnnnnnnnnnnnnnnnnnnnnnnnnnnnnnnnnnnnnnnnnnnnnnnnnnnnnnnnnnnnnnnnnnnnnnnnnnnnnnnnnnnnnnnnnnnnnnnnnnnnnnnnnnnnnnnnnnnnnnnnnnnnnnnnnnnnnnnnnnnnnnnnnnnnnnnnnnnnnnnnnnnnnnnnnnnnnnnnnnnnnnnnnnnnnnnnnnnnnnnnnnnnnnnnnnnnnnnnnnnnnnnnnnnnnnnnnnnnnnnnnnnnnnnnnnnnnnnnnnnnnnnnnnnnnnnnnnnnnnnnnnnnnnnnnnnnnnnnnnnnnnnnnnnnnnnnnnnnnnnnnnnnnnnnnnnnnnnnnnnnnnnnnnnnnnnnnnnnnnnnnnnnnnnnnnnnnnnnnnnnnnnnnnnnnnnnnnnnnnnnnnnnnnnnnnnnnnnnnnnnnnnnnnnnnnnnnnnnnnnnnnnnnnnnnnnnnnnnnnnnnnnnnnnnnnnnnnnnnnnnnnnnnnnnnnnnnnnnnnnnnnnnnnnnnnnnnnnnnnnnnnnnnnnnnnnnnnnnnnnnnnnnnnnnnnnnnnnnnnnnnnnnnnnnnnnnnnnnnnnnnnnnnnnnnnnnnnnnnnnnnnnnnnnnnnnnnnnnnnnnnnnnnnnnnnnnnnnnnnnnnnnnnnnnnnnnnnnnnnnnnnnnnnnnnnnnnnnnnnnnnnnnnnnnnnnnnnnnnnnnnnnnnnnnnnnnnnnnnnnnnnnnnnnnnnnnnnnnnnnnnnnnnnnnnnnnnnnnnnnnnnnnnnnnnnnnnnnnnnnnnnnnnnnnnnnnnnnnnnnnnnnnnnnnnnnnnnnnnnnnnnnnnnnnnnnnnnnnnnnnnnnnnnnnnnnnnnnnnnnnnnnnnnnnnnnnnnnnnnnnnnnnnnnnnnnnnnnnnnnnnnnnnnnnnnnnnnnnnnnnnnnnnnnnnnnnnnnnnnnnnnnnnnnnnnnnnnnnnnnnnnnnnnnnnnnnnnnnnnnnnnnnnnnnnnnnnnnnnnnnnnnnnnnnnnnnnnnnnnnnnnnnnnnnnnnnnnnnnnnnnnnnnnnnnnnnnnnnnnnnnnnnnnnnnnnnnnnnnnnnnnnnnnnnnnnnnnnnnnnnnnnnnnnnnnnnnnnnnnnnnnnnnnnnnnnnnnnnnnnnnnnnnnnnnnnnnnnnnnnnnnnnnnnnnnnnnnnnnnnnnnnnnnnnnnnnnnnnnnnnnnnnnnnnnnnnnnnnnnnnnnnnnnnnnnnnnnnnnnnnnnnnnnnnnnnnnnnnnnnnnnnnnnnnnnnnnnnnnnnnnnnnnnnnnnnnnnnnnnnnnnnnnnnnnnnnnnnnnnnnnnnnnnnnnnnnnnnnnnnnnnnnnnnnnnnnnnnnnnnnnnnnnnnnnnnnnnnnnnnnnnnnnnnnnnnnnnnnnnnnnnnnnnnnnnnnnnnnnnnnnnnnnnnnnnnnnnnnnnnnnnnnnnnnnnnnnnnnnnnnnnnnnnnnnnnnnnnnnnnnnnnnnnnnnnnnnnnnnnnnnnnnnnnnnnnnnnnnnnnnnnnnnnnnnnnnnnnnnnnnnnnnnnnnnnnnnnnnnnnnnnnnnnnnnnnnnnnnnnnnnnnnnnnnnnnnnnnnnnnnnnnnnnnnnnnnnnnnnnnnnnnnnnnnnnnnnnnnnnnnnnnnnnnnnnnnnnnnnnnnnnnnnnnnnnnnnnnnnnnnnnnnnnnnnnnnnnnnnnnnnnnnnnnnnnnnnnnnnnnnnnnnnnnnnnnnnnnnnnnnnnnnnnnnnnnnnnnnnnnnnnnnnnnnnnnnnnnnnnnnnnnnnnnnnnnnnnnnnnnnnnnnnnnnnnnnnnnnnnnnnnnnnnnnnnnnnnnnnnnnnnnnnnnnnnnnnnnnnnnnnnnnnnnnnnnnnnnnnnnnnnnnnnnnnnnnnnnnnnnnnnnnnnnnnnnnnnnnnnnnnnnnnnnnnnnnnnnnnnnnnnnnnnnnnnnnnnnnnnnnnnnnnnnnnnnnnnnnnnnnnnnnnnnnnnnnnnnnnnnnnnnnnnnnnnnnnnnnnnnnnnnnnnnnnnnnnnnnnnnnnnnnnnnnnnnnnnnnnnnnnnnnnnnnnnnnnnnnnnnnnnnnnnnnnnnnnnnnnnnnnnnnnnnnnnnnnnnnnnnnnnnnnnnnnnnnnnnnnnnnnnnnnnnnnnnnnnnnnnnnnnnnnnnnnnnnnnnnnnnnnnnnnnnnnnnnnnnnnnnnnnnnnnnnnnnnnnnnnnnnnnnnnnnnnnnnnnnnnnnnnnnnnnnnnnnnnnnnnnnnnnnnnnnnnnnnnnnnnnnnnnnnnnnnnnnnnnnnnnnnnnnnnnnnnnnnnnnnnnnnnnnnnnnnnnnnnnnnnnnnnnnnnnnnnnnnnnnnnnnnnnnnnnnnnnnnnnnnnnnnnnnnnnnnnnnnnnnnnnnnnnnnnnnnnnnnnnnnnnnnnnnnnnnnnnnnnnnnnnnnnnnnnnnnnnnnnnnnnnnnnnnnnnnnnnnnnnnnnnnnnnnnnnnnnnnnnnnnnnnnnnnnnnnnnnnnnnnnnnnnnnnnnnnnnnnnnnnnnnnnnnnnnnnnnnnnnnnnnnnnnnnnnnnnnnnnnnnnnnnnnnnnnnnnnnnnnnnnnnnnnnnnnnnnnnnnnnnnnnnnnnnnnnnnnnnnnnnnnnnnnnnnnnnnnnnnnnnnnnnnnnnnnnnnnnnnnnnnnnnnnnnnnnnnnnnnnnnnnnnnnnnnnnnnnnnnnnnnnnnnnnnnnnnnnnnnnnnnnnnnnnnnnnnnnnnnnnnnnnnnnnnnnnnnnnnnnnnnnnnnnnnnnnnnnnnnnnnnnnnnnnnnnnnnnnnnnnnnnnnnnnnnnnnnnnnnnnnnnnnnnnnnnnnnnnnnnnnnnnnnnnnnnnnnnnnnnnnnnnnnnnnnnnnnnnnnnnnnnnnnnnnnnnnnnnnnnnnnnnnnnnnnnnnnnnnnnnnnnnnnnnnnnnnnnnnnnnnnnnnnnnnnnnnnnnnnnnnnnnnnnnnnnnnnnnnnnnnnnnnnnnnnnnnnnnnnnnnnnnnnnnnnnnnnnnnnnnnnnnnnnnnnnnnnnnnnnnnnnnnnnnnnnnnnnnnnnnnnnnnnnnnnnnnnnnnnnnnnnnnnnnnnnnnnnnnnnnnnnnnnnnnnnnnnnnnnnnnnnnnnnnnnnnnnnnnnnnnnnnnnnnnnnnnnnnnnnnnnnnnnnnnnnnnnnnnnnnnnnnnnnnnnnnnnnnnnnnnnnnnnnnnnnnnnnnnnnnnnnnnnnnnnnnnnnnnnnnnnnnnnnnnnnnnnnnnnnnnnnnnnnnnnnnnnnnnnnnnnnnnnnnnnnnnnnnnnnnnnnnnnnnnnnnnnnnnnnnnnnnnnnnnnnnnnnnnnnnnnnnnnnnnnnnnnnnnnnnnnnnnnnnnnnnnnnnnnnnnnnnnnnnnnnnnnnnnnnnnnnnnnnnnnnnnnnnnnnnnnnnnnnnnnnnnnnnnnnnnnnnnnnnnnnnnnnnnnnnnnnnnnnnnnnnnnnnnnnnnnnnnnnnnnnnnnnnnnnnnnnnnnnnnnnnnnnnnnnnnnnnnnnnnnnnnnnnnnnnnnnnnnnnnnnnnnnnnnnnnnnnnnnnnnnnnnnnnnnnnnnnnnnnnnnnnnnnnnnnnnnnnnnnnnnnnnnnnnnnnnnnnnnnnnnnnnnnnnnnnnnnnnnnnnnnnnnnnnnnnnnnnnnnnnnnnnnnnnnnnnnnnnnnnnnnnnnnnnnnnnnnnnnnnnnnnnnnnnnnnnnnnnnnnnnnnnnnnnnnnnnnnnnnnnnnnnnnnnnnnnnnnnnnnnnnnnnnnnnnnnnnnnnnnnnnnnnnnnnnnnnnnnnnnnnnnnnnnnnnnnnnnnnnnnnnnnnnnnnnnnnnnnnnnnnnnnnnnnnnnnnnnnnnnnnnnnnnnnnnnnnnnnnnnnnnnnnnnnnnnnnnnnnnnnnnnnnnnnnnnnnnnnnnnnnnnnnnnnnnnnnnnnnnnnnnnnnnnnnnnnnnnnnnnnnnnnnnnnnnnnnnnnnnnnnnnnnnnnnnnnnnnnnnnnnnnnnnnnnnnnnnnnnnnnnnnnnnnnnnnnnnnnnnnnnnnnnnnnnnnnnnnnnnnnnnnnnnnnnnnnnnnnnnnnnnnnnnnnnnnnnnnnnnnnnnnnnnnnnnnnnnnnnnnnnnnnnnnnnnnnnnnnnnnnnnnnnnnnnnnnnnnnnnnnnnnnnnnnnnnnnnnnnnnnnnnnnnnnnnnnnnnnnnnnnnnnnnnnnnnnnnnnnnnnnnnnnnnnnnnnnnnnnnnnnnnnnnnnnnnnnnnnnnnnnnnnnnnnnnnnnnnnnnnnnnnnnnnnnnnnnnnnnnnnnnnnnnnnnnnnnnnnnnnnnnnnnnnnnnnnnnnnnnnnnnnnnnnnnnnnnnnnnnnnnnnnnnnnnnnnnnnnnnnnnnnnnnnnnnnnnnnnnnnnnnnnnnnnnnnnnnnnnnnnnnnnnnnnnnnnnnnnnnnnnnnnnnnnnnnnnnnnnnnnnnnnnnnnnnnnnnnnnnnnnnnnnnnnnnnnnnnnnnnnnnnnnnnnnnnnnnnnnnnnnnnnnnnnnnnnnnnnnnnnnnnnnnnnnnnnnnnnnnnnnnnnnnnnnnnnnnnnnnnnnnnnnnnnnnnnnnnnnnnnnnnnnnnnnnnnnnnnnnnnnnnnnnnnnnnnnnnnnnnnnnnnnnnnnnnnnnnnnnnnnnnnnnnnnnnnnnnnnnnnnnnnnnnnnnnnnnnnnnnnnnnnnnnnnnnnnnnnnnnnnnnnnnnnnnnnnnnnnnnnnnnnnnnnnnnnnnnnnnnnnnnnnnnnnnnnnnnnnnnnnnnnnnnnnnnnnnnnnnnnnnnnnnnnnnnnnnnnnnnnnnnnnnnnnnnnnnnnnnnnnnnnnnnnnnnnnnnnnnnnnnnnnnnnnnnnnnnnnnnnnnnnnnnnnnnnnnnnnnnnnnnnnnnnnnnnnnnnnnnnnnnnnnnnnnnnnnnnnnnnnnnnnnnnnnnnnnnnnnnnnnnnnnnnnnnnnnnnnnnnnnnnnnnnnnnnnnnnnnnnnnnnnnnnnnnnnnnnnnnnnnnnnnnnnnnnnnnnnnnnnnnnnnnnnnnnnnnnnnnnnnnnnnnnnnnnnnnnnnnnnnnnnnnnnnnnnnnnnnnnnnnnnnnnnnnnnnnnnnnnnnnnnnnnnnnnnnnnnnnnnnnnnnnnnnnnnnnnnnnnnnnnnnnnnnnnnnnnnnnnnnnnnnnnnnnnnnnnnnnnnnnnnnnnnnnnnnnnnnnnnnnnnnnnnnnnnnnnnnnnnnnnnnnnnnnnnnnnnnnnnnnnnnnnnnnnnnnnnnnnnnnnnnnnnnnnnnnnnnnnnnnnnnnnnnnnnnnnnnnnnnnnnnnnnnnnnnnnnnnnnnnnnnnnnnnnnnnnnnnnnnnnnnnnnnnnnnnnnnnnnnnnnnnnnnnnnnnnnnnnnnnnnnnnnnnnnnnnnnnnnnnnnnnnnnnnnnnnnnnnnnnnnnnnnnnnnnnnnnnnnnnnnnnnnnnnnnnnnnnnnnnnnnnnnnnnnnnnnnnnnnnnnnnnnnnnnnnnnnnnnnnnnnnnnnnnnnnnnnnnnnnnnnnnnnnnnnnnnnnnnnnnnnnnnnnnnnnnnnnnnnnnnnnnnnnnnnnnnnnnnnnnnnnnnnnnnnnnnnnnnnnnnnnnnnnnnnnnnnnnnnnnnnnnnnnnnnnnnnnnnnnnnnnnnnnnnnnnnnnnnnnnnnnnnnnnnnnnnnnnnnnnnnnnnnnnnnnnnnnnnnnnnnnnnnnnnnnnnnnnnnnnnnnnnnnnnnnnnnnnnnnnnnnnnnnnnnnnnnnnnnnnnnnnnnnnnnnnnnnnnnnnnnnnnnnnnnnnnnnnnnnnnnnnnnnnnnnnnnnnnnnnnnnnnnnnnnnnnnnnnnnnnnnnnnnnnnnnnnnnnnnnnnnnnnnnnnnnnnnnnnnnnnnnnnnnnnnnnnnnnnnnnnnnnnnnnnnnnnnnnnnnnnnnnnnnnnnnnnnnnnnnnnnnnnnnnnnnnnnnnnnnnnnnnnnnnnnnnnnnnnnnnnnnnnnnnnnnnnnnnnnnnnnnnnnnnnnnnnnnnnnnnnnnnnnnnnnnnnnnnnnnnnnnnnnnnnnnnnnnnnnnnnnnnnnnnnnnnnnnnnnnnnnnnnnnnnnnnnnnnnnnnnnnnnnnnnnnnnnnnnnnnnnnnnnnnnnnnnnnnnnnnnnnnnnnnnnnnnnnnnnnnnnnnnnnnnnnnnnnnnnnnnnnnnnnnnnnnnnnnnnnnnnnnnnnnnnnnnnnnnnnnnnnnnnnnnnnnnnnnnnnnnnnnnnnnnnnnnnnnnnnnnnnnnnnnnnnnnnnnnnnnnnnnnnnnnnnnnnnnnnnnnnnnnnnnnnnnnnnnnnnnnnnnnnnnnnnnnnnnnnnnnnnnnnnnnnnnnnnnnnnnnnnnnnnnnnnnnnnnnnnnnnnnnnnnnnnnnnnnnnnnnnnnnnnnnnnnnnnnnnnnnnnnnnnnnnnnnnnnnnnnnnnnnnnnnnnnnnnnnnnnnnnnnnnnnnnnnnnnnnnnnnnnnnnnnnnnnnnnnnnnnnnnnnnnnnnnnnnnnnnnnnnnnnnnnnnnnnnnnnnnnnnnnnnnnnnnnnnnnnnnnnnnnnnnnnnnnnnnnnnnnnnnnnnnnnnnnnnnnnnnnnnnnnnnnnnnnnnnnnnnnnnnnnnnnnnnnnnnnnnnnnnnnnnnnnnnnnnnnnnnnnnnnnnnnnnnnnnnnnnnnnnnnnnnnnnnnnnnnnnnnnnnnnnnnnnnnnnnnnnnnnnnnnnnnnnnnnnnnnnnnnnnnnnnnnnnnnnnnnnnnnnnnnnnnnnnnnnnnnnnnnnnnnnnnnnnnnnnnnnnnnnnnnnnnnnnnnnnnnnnnnnnnnnnnnnnnnnnnnnnnnnnnnnnnnnnnnnnnnnnnnnnnnnnnnnnnnnnnnnnnnnnnnnnnnnnnnnnnnnnnnnnnnnnnnnnnnnnnnnnnnnnnnnnnnnnnnnnnnnnnnnnnnnnnnnnnnnnnnnnnnnnnnnnnnnnnnnnnnnnnnnnnnnnnnnnnnnnnnnnnnnnnnnnnnnnnnnnnnnnnnnnnnnnnnnnnnnnnnnnnnnnnnnnnnnnnnnnnnnnnnnnnnnnnnnnnnnnnnnnnnnnnnnnnnnnnnnnnnnnnnnnnnnnnnnnnnnnnnnnnnnnnnnnnnnnnnnnnnnnnnnnnnnnnnnnnnnnnnnnnnnnnnnnnnnnnnnnnnnnnnnnnnnnnnnnnnnnnnnnnnnnnnnnnnnnnnnnnnnnnnnnnnnnnnnnnnnnnnnnnnnnnnnnnnnnnnnnnnnnnnnnnnnnnnnnnnnnnnnnnnnnnnnnnnnnnnnnnnnnnnnnnnnnnnnnnnnnnnnnnnnnnnnnnnnnnnnnnnnnnnnnnnnnnnnnnnnnnnnnnnnnnnnnnnnnnnnnnnnnnnnnnnnnnnnnnnnnnnnnnnnnnnnnnnnnnnnnnnnnnnnnnnnnnnnnnnnnnnnnnnnnnnnnnnnnnnnnnnnnnnnnnnnnnnnnnnnnnnnnnnnnnnnnnnnnnnnnnnnnnnnnnnnnnnnnnnnnnnnnnnnnnnnnnnnnnnnnnnnnnnnnnnnnnnnnnnnnnnnnnnnnnnnnnnnnnnnnnnnnnnnnnnnnnnnnnnnnnnnnnnnnnnnnnnnnnnnnnnnnnnnnnnnnnnnnnnnnnnnnnnnnnnnnnnnnnnnnnnnnnnnnnnnnnnnnnnnnnnnnnnnnnnnnnnnnnnnnnnnnnnnnnnnnnnnnnnnnnnnnnnnnnnnnnnnnnnnnnnnnnnnnnnnnnnnnnnnnnnnnnnnnnnnnnnnnnnnnnnnnnnnnnnnnnnnnnnnnnnnnnnnnnnnnnnnnnnnnnnnnnnnnnnnnnnnnnnnnnnnnnnnnnnnnnnnnnnnnnnnnnnnnnnnnnnnnnnnnnnnnnnnnnnnnnnnnnnnnnnnnnnnnnnnnnnnnnnnnnnnnnnnnnnnnnnnnnnnnnnnnnnnnnnnnnnnnnnnnnnnnnnnnnnnnnnnnnnnnnnnnnnnnnnnnnnnnnnnnnnnnnnnnnnnnnnnnnnnnnnnnnnnnnnnnnnnnnnnnnnnnnnnnnnnnnnnnnnnnnnnnnnnnnnnnnnnnnnnnnnnnnnnnnnnnnnnnnnnnnnnnnnnnnnnnnnnnnnnnnnnnnnnnnnnnnnnnnnnnnnnnnnnnnnnnnnnnnnnnnnnnnnnnnnnnnnnnnnnnnnnnnnnnnnnnnnnnnnnnnnnnnnnnnnnnnnnnnnnnnnnnnnnnnnnnnnnnnnnnnnnnnnnnnnnnnnnnnnnnnnnnnnnnnnnnnnnnnnnnnnnnnnnnnnnnnnnnnnnnnnnnnnnnnnnnnnnnnnnnnnnnnnnnnnnnnnnnnnnnnnnnnnnnnnnnnnnnnnnnnnnnnnnnnnnnnnnnnnnnnnnnnnnnnnnnnnnnnnnnnnnnnnnnnnnnnnnnnnnnnnnnnnnnnnnnnnnnnnnnnnnnnnnnnnnnnnnnnnnnnnnnnnnnnnnnnnnnnnnnnnnnnnnnnnnnnnnnnnnnnnnnnnnnnnnnnnnnnnnnnnnnnnnnnnnnnnnnnnnnnnnnnnnnnnnnnnnnnnnnnnnnnnnnnnnnnnnnnnnnnnnnnnnnnnnnnnnnnnnnnnnnnnnnnnnnnnnnnnnnnnnnnnnnnnnnnnnnnnnnnnnnnnnnnnnnnnnnnnnnnnnnnnnnnnnnnnnnnnnnnnnnnnnnnnnnnnnnnnnnnnnnnnnnnnnnnnnnnnnnnnnnnnnnnnnnnnnnnnnnnnnnnnnnnnnnnnnnnnnnnnnnnnnnnnnnnnnnnnnnnnnnnnnnnnnnnnnnnnnnnnnnnnnnnnnnnnnnnnnnnnnnnnnnnnnnnnnnnnnnnnnnnnnnnnnnnnnnnnnnnnnnnnnnnnnnnnnnnnnnnnnnnnnnnnnnnnnnnnnnnnnnnnnnnnnnnnnnnnnnnnnnnnnnnnnnnnnnnnnnnnnnnnnnnnnnnnnnnnnnnnnnnnnnnnnnnnnnnnnnnnnnnnnnnnnnnnnnnnnnnnnnnnnnnnnnnnnnnnnnnnnnnnnnnnnnnnnnnnnnnnnnnnnnnnnnnnnnnnnnnnnnnnnnnnnnnnnnnnnnnnnnnnnnnnnnnnnnnnnnnnnnnnnnnnnnnnnnnnnnnnnnnnnnnnnnnnnnnnnnnnnnnnnnnnnnnnnnnnnnnnnnnnnnnnnnnnnnnnnnnnnnnnnnnnnnnnnnnnnnnnnnnnnnnnnnnnnnnnnnnnnnnnnnnnnnnnnnnnnnnnnnnnnnnnnnnnnnnnnnnnnnnnnnnnnnnnnnnnnnnnnnnnnnnnnnnnnnnnnnnnnnnnnnnnnnnnnnnnnnnnnnnnnnnnnnnnnnnnnnnnnnnnnnnnnnnnnnnnnnnnnnnnnnnnnnnnnnnnnnnnnnnnnnnnnnnnnnnnnnnnnnnnnnnnnnnnnnnnnnnnnnnnnnnnnnnnnnnnnnnnnnnnnnnnnnnnnnnnnnnnnnnnnnnnnnnnnnnnnnnnnnnnnnnnnnnnnnnnnnnnnnnnnnnnnnnnnnnnnnnnnnnnnnnnnnnnnnnnnnnnnnnnnnnnnnnnnnnnnnnnnnnnnnnnnnnnnnnnnnnnnnnnnnnnnnnnnnnnnnnnnnnnnnnnnnnnnnnnnnnnnnnnnnnnnnnnnnnnnnnnnnnnnnnnnnnnnnnnnnnnnnnnnnnnnnnnnnnnnnnnnnnnnnnnnnnnnnnnnnnnnnnnnnnnnnnnnnnnnnnnnnnnnnnnnnnnnnnnnnnnnnnnnnnnnnnnnnnnnnnnnnnnnnnnnnnnnnnnnnnnnnnnnnnnnnnnnnnnnnnnnnnnnnnnnnnnnnnnnnnnnnnnnnnnnnnnnnnnnnnnnnnnnnnnnnnnnnnnnnnnnnnnnnnnnnnnnnnnnnnnnnnnnnnnnnnnnnnnnnnnnnnnnnnnnnnnnnnnnnnnnnnnnnnnnnnnnnnnnnnnnnnnnnnnnnnnnnnnnnnnnnnnnnnnnnnnnnnnnnnnnnnnnnnnnnnnnnnnnnnnnnnnnnnnnnnnnnnnnnnnnnnnnnnnnnnnnnnnnnnnnnnnnnnnnnnnnnnnnnnnnnnnnnnnnnnnnnnnnnnnnnnnnnnnnnnnnnnnnnnnnnnnnnnnnnnnnnnnnnnnnnnnnnnnnnnnnnnnnnnnnnnnnnnnnnnnnnnnnnnnnnnnnnnnnnnnnnnnnnnnnnnnnnnnnnnnnnnnnnnnnnnnnnnnnnnnnnnnnnnnnnnnnnnnnnnnnnnnnnnnnnnnnnnnnnnnnnnnnnnnnnnnnnnnnnnnnnnnnnnnnnnnnnnnnnnnnnnnnnnnnnnnnnnnnnnnnnnnnnnnnnnnnnnnnnnnnnnnnnnnnnnnnnnnnnnnnnnnnnnnnnnnnnnnnnnnnnnnnnnnnnnnnnnnnnnnnnnnnnnnnnnnnnnnnnnnnnnnnnnnnnnnnnnnnnnnnnnnnnnnnnnnnnnnnnnnnnnnnnnnnnnnnnnnnnnnnnnnnnnnnnnnnnnnnnnnnnnnnnnnnnnnnnnnnnnnnnnnnnnnnnnnnnnnnnnnnnnnnnnnnnnnnnnnnnnnnnnnnnnnnnnnnnnnnnnnnnnnnnnnnnnnnnnnnnnnnnnnnnnnnnnnnnnnnnnnnnnnnnnnnnnnnnnnnnnnnnnnnnnnnnnnnnnnnnnnnnnnnnnnnnnnnnnnnnnnnnnnnnnnnnnnnnnnnnnnnnnnnnnnnnnnnnnnnnnnnnnnnnnnnnnnnnnnnnnnnnnnnnnnnnnnnnnnnnnnnnnnnnnnnnnnnnnnnnnnnnnnnnnnnnnnnnnnnnnnnnnnnnnnnnnnnnnnnnnnnnnnnnnnnnnnnnnnnnnnnnnnnnnnnnnnnnnnnnnnnnnnnnnnnnnnnnnnnnnnnnnnnnnnnnnnnnnnnnnnnnnnnnnnnnnnnnnnnnnnnnnnnnnnnnnnnnnnnnnnnnnnnnnnnnnnnnnnnnnnnnnnnnnnnnnnnnnnnnnnnnnnnnnnnnnnnnnnnnnnnnnnnnnnnnnnnnnnnnnnnnnnnnnnnnnnnnnnnnnnnnnnnnnnnnnnnnnnnnnnnnnnnnnnnnnnnnnnnnnnnnnnnnnnnnnnnnnnnnnnnnnnnnnnnnnnnnnnnnnnnnnnnnnnnnnnnnnnnnnnnnnnnnnnnnnnnnnnnnnnnnnnnnnnnnnnnnnnnnnnnnnnnnnnnnnnnnnnnnnnnnnnnnnnnnnnnnnnnnnnnnnnnnnnnnnnnnnnnnnnnnnnnnnnnnnnnnnnnnnnnnnnnnnnnnnnnnnnnnnnnnnnnnnnnnnnnnnnnnnnnnnnnnnnnnnnnnnnnnnnnnnnnnnnnnnnnnnnnnnnnnnnnnnnnnnnnnnnnnnnnnnnnnnnnnnnnnnnnnnnnnnnnnnnnnnnnnnnnnnnnnnnnnnnnnnnnnnnnnnnnnnnnnnnnnnnnnnnnnnnnnnnnnnnnnnnnnnnnnnnnnnnnnnnnnnnnnnnnnnnnnnnnnnnnnnnnnnnnnnnnnnnnnnnnnnnnnnnnnnnnnnnnnnnnnnnnnnnnnnnnnnnnnnnnnnnnnnnnnnnnnnnnnnnnnnnnnnnnnnnnnnnnnnnnnnnnnnnnnnnnnnnnnnnnnnnnnnnnnnnnnnnnnnnnnnnnnnnnnnnnnnnnnnnnnnnnnnnnnnnnnnnnnnnnnnnnnnnnnnnnnnnnnnnnnnnnnnnnnnnnnnnnnnnnnnnnnnnnnnnnnnnnnnnnnnnnnnnnnnnnnnnnnnnnnnnnnnnnnnnnnnnnnnnnnnnnnnnnnnnnnnnnnnnnnnnnnnnnnnnnnnnnnnnnnnnnnnnnnnnnnnnnnnnnnnnnnnnnnnnnnnnnnnnnnnnnnnnnnnnnnnnnnnnnnnnnnnnnnnnnnnnnnnnnnnnnnnnnnnnnnnnnnnnnnnnnnnnnnnnnnnnnnnnnnnnnnnnnnnnnnnnnnnnnnnnnnnnnnnnnnnnnnnnnnnnnnnnnnnnnnnnnnnnnnnnnnnnnnnnnnnnnnnnnnnnnnnnnnnnnnnnnnnnnnnnnnnnnnnnnnnnnnnnnnnnnnnnnnnnnnnnnnnnnnnnnnnnnnnnnnnnnnnnnnnnnnnnnnnnnnnnnnnnnnnnnnnnnnnnnnnnnnnnnnnnnnnnnnnnnnnnnnnnnnnnnnnnnnnnnnnnnnnnnnnnnnnnnnnnnnnnnnnnnnnnnnnnnnnnnnnnnnnnnnnnnnnnnnnnnnnnnnnnnnnnnnnnnnnnnnnnnnnnnnnnnnnnnnnnnnnnnnnnnnnnnnnnnnnnnnnnnnnnnnnnnnnnnnnnnnnnnnnnnnnnnnnnnnnnnnnnnnnnnnnnnnnnnnnnnnnnnnnnnnnnnnnnnnnnnnnnnnnnnnnnnnnnnnnnnnnnnnnnnnnnnnnnnnnnnnnnnnnnnnnnnnnnnnnnnnnnnnnnnnnnnnnnnnnnnnnnnnnnnnnnnnnnnnnnnnnnnnnnnnnnnnnnnnnnnnnnnnnnnnnnnnnnnnnnnnnnnnnnnnnnnnnnnnnnnnnnnnnnnnnnnnnnnnnnnnnnnnnnnnnnnnnnnnnnnnnnnnnnnnnnnnnnnnnnnnnnnnnnnnnnnnnnnnnnnnnnnnnnnnnnnnnnnnnnnnnnnnnnnnnnnnnnnnnnnnnnnnnnnnnnnnnnnnnnnnnnnnnnnnnnnnnnnnnnnnnnnnnnnnnnnnnnnnnnnnnnnnnnnnnnnnnnnnnnnnnnnnnnnnnnnnnnnnnnnnnnnnnnnnnnnnnnnnnnnnnnnnnnnnnnnnnnnnnnnnnnnnnnnnnnnnnnnnnnnnnnnnnnnnnnnnnnnnnnnnnnnnnnnnnnnnnnnnnnnnnnnnnnnnnnnnnnnnnnnnnnnnnnnnnnnnnnnnnnnnnnnnnnnnnnnnnnnnnnnnnnnnnnnnnnnnnnnnnnnnnnnnnnnnnnnnnnnnnnnnnnnnnnnnnnnnnnnnnnnnnnnnnnnnnnnnnnnnnnnnnnnnnnnnnnnnnnnnnnnnnnnnnnnnnnnnnnnnnnnnnnnnnnnnnnnnnnnnnnnnnnnnnnnnnnnnnnnnnnnnnnnnnnnnnnnnnnnnnnnnnnnnnnnnnnnnnnnnnnnnnnnnnnnnnnnnnnnnnnnnnnnnnnnnnnnnnnnnnnnnnnnnnnnnnnnnnnnnnnnnnnnnnnnnnnnnnnnnnnnnnnnnnnnnnnnnnnnnnnnnnnnnnnnnnnnnnnnnnnnnnnnnnnnnnnnnnnnnnnnnnnnnnnnnnnnnnnnnnnnnnnnnnnnnnnnnnnnnnnnnnnnnnnnnnnnnnnnnnnnnnnnnnnnnnnnnnnnnnnnnnnnnnnnnnnnnnnnnnnnnnnnnnnnnnnnnnnnnnnnnnnnnnnnnnnnnnnnnnnnnnnnnnnnnnnnnnnnnnnnnnnnnnnnnnnnnnnnnnnnnnnnnnnnnnnnnnnnnnnnnnnnnnnnnnnnnnnnnnnnnnnnnnnnnnnnnnnnnnnnnnnnnnnnnnnnnnnnnnnnnnnnnnnnnnnnnnnnnnnnnnnnnnnnnnnnnnnnnnnnnnnnnnnnnnnnnnnnnnnnnnnnnnnnnnnnnnnnnnnnnnnnnnnnnnnnnnnnnnnnnnnnnnnnnnnnnnnnnnnnnnnnnnnnnnnnnnnnnnnnnnnnnnnnnnnnnnnnnnnnnnnnnnnnnnnnnnnnnnnnnnnnnnnnnnnnnnnnnnnnnnnnnnnnnnnnnnnnnnnnnnnnnnnnnnnnnnnnnnnnnnnnnnnnnnnnnnnnnnnnnnnnnnnnnnnnnnnnnnnnnnnnnnnnnnnnnnnnnnnnnnnnnnnnnnnnnnnnnnnnnnnnnnnnnnnnnnnnnnnnnnnnnnnnnnnnnnnnnnnnnnnnnnnnnnnnnnnnnnnnnnnnnnnnnnnnnnnnnnnnnnnnnnnnnnnnnnnnnnnnnnnnnnnnnnnnnnnnnnnnnnnnnnnnnnnnnnnnnnnnnnnnnnnnnnnnnnnnnnnnnnnnnnnnnnnnnnnnnnnnnnnnnnnnnnnnnnnnnnnnnnnnnnnnnnnnnnnnnnnnnnnnnnnnnnnnnnnnnnnnnnnnnnnnnnnnnnnnnnnnnnnnnnnnnnnnnnnnnnnnnnnnnnnnnnnnnnnnnnnnnnnnnnnnnnnnnnnnnnnnnnnnnnnnnnnnnnnnnnnnnnnnnnnnnnnnnnnnnnnnnnnnnnnnnnnnnnnnnnnnnnnnnnnnnnnnnnnnnnnnnnnnnnnnnnnnnnnnnnnnnnnnnnnnnnnnnnnnnnnnnnnnnnnnnnnnnnnnnnnnnnnnnnnnnnnnnnnnnnnnnnnnnnnnnnnnnnnnnnnnnnnnnnnnnnnnnnnnnnnnnnnnnnnnnnnnnnnnnnnnnnnnnnnnnnnnnnnnnnnnnnnnnnnnnnnnnnnnnnnnnnnnnnnnnnnnnnnnnnnnnnnnnnnnnnnnnnnnnnnnnnnnnnnnnnnnnnnnnnnnnnnnnnnnnnnnnnnnnnnnnnnnnnnnnnnnnnnnnnnnnnnnnnnnnnnnnnnnnnnnnnnnnnnnnnnnnnnnnnnnnnnnnnnnnnnnnnnnnnnnnnnnnnnnnnnnnnnnnnnnnnnnnnnnnnnnnnnnnnnnnnnnnnnnnnnnnnnnnnnnnnnnnnnnnnnnnnnnnnnnnnnnnnnnnnnnnnnnnnnnnnnnnnnnnnnnnnnnnnnnnnnnnnnnnnnnnnnnnnnnnnnnnnnnnnnnnnnnnnnnnnnnnnnnnnnnnnnnnnnnnnnnnnnnnnnnnnnnnnnnnnnnnnnnnnnnnnnnnnnnnnnnnnnnnnnnnnnnnnnnnnnnnnnnnnnnnnnnnnnnnnnnnnnnnnnnnnnnnnnnnnnnnnnnnnnnnnnnnnnnnnnnnnnnnnnnnnnnnnnnnnnnnnnnnnnnnnnnnnnnnnnnnnnnnnnnnnnnnnnnnnnnnnnnnnnnnnnnnnnnnnnnnnnnnnnnnnnnnnnnnnnnnnnnnnnnnnnnnnnnnnnnnnnnnnnnnnnnnnnnnnnnnnnnnnnnnnnnnnnnnnnnnnnnnnnnnnnnnnnnnnnnnnnnnnnnnnnnnnnnnnnnnnnnnnnnnnnnnnnnnnnnnnnnnnnnnnnnnnnnnnnnnnnnnnnnnnnnnnnnnnnnnnnnnnnnnnnnnnnnnnnnnnnnnnnnnnnnnnnnnnnnnnnnnnnnnnnnnnnnnnnnnnnnnnnnnnnnnnnnnnnnnnnnnnnnnnnnnnnnnnnnnnnnnnnnnnnnnnnnnnnnnnnnnnnnnnnnnnnnnnnnnnnnnnnnnnnnnnnnnnnnnnnnnnnnnnnnnnnnnnnnnnnnnnnnnnnnnnnnnnnnnnnnnnnnnnnnnnnnnnnnnnnnnnnnnnnnnnnnnnnnnnnnnnnnnnnnnnnnnnnnnnnnnnnnnnnnnnnnnnnnnnnnnnnnnnnnnnnnnnnnnnnnnnnnnnnnnnnnnnnnnnnnnnnnnnnnnnnnnnnnnnnnnnnnnnnnnnnnnnnnnnnnnnnnnnnnnnnnnnnnnnnnnnnnnnnnnnnnnnnnnnnnnnnnnnnnnnnnnnnnnnnnnnnnnnnnnnnnnnnnnnnnnnnnnnnnnnnnnnnnnnnnnnnnnnnnnnnnnnnnnnnnnnnnnnnnnnnnnnnnnnnnnnnnnnnnnnnnnnnnnnnnnnnnnnnnnnnnnnnnnnnnnnnnnnnnnnnnnnnnnnnnnnnnnnnnnnnnnnnnnnnnnnnnnnnnnnnnnnnnnnnnnnnnnnnnnnnnnnnnnnnnnnnnnnnnnnnnnnnnnnnnnnnnnnnnnnnnnnnnnnnnnnnnnnnnnnnnnnnnnnnnnnnnnnnnnnnnnnnnnnnnnnnnnnnnnnnnnnnnnnnnnnnnnnnnnnnnnnnnnnnnnnnnnnnnnnnnnnnnnnnnnnnnnnnnnnnnnnnnnnnnnnnnnnnnnnnnnnnnnnnnnnnnnnnnnnnnnnnnnnnnnnnnnnnnnnnnnnnnnnnnnnnnnnnnnnnnnnnnnnnnnnnnnnnnnnnnnnnnnnnnnnnnnnnnnnnnnnnnnnnnnnnnnnnnnnnnnnnnnnnnnnnnnnnnnnnnnnnnnnnnnnnnnnnnnnnnnnnnnnnnnnnnnnnnnnnnnnnnnnnnnnnnnnnnnnnnnnnnnnnnnnnnnnnnnnnnnnnnnnnnnnnnnnnnnnnnnnnnnnnnnnnnnnnnnnnnnnnnnnnnnnnnnnnnnnnnnnnnnnnnnnnnnnnnnnnnnnnnnnnnnnnnnnnnnnnnnnnnnnnnnnnnnnnnnnnnnnnnnnnnnnnnnnnnnnnnnnnnnnnnnnnnnnnnnnnnnnnnnnnnnnnnnnnnnnnnnnnnnnnnnnnnnnnnnnnnnnnnnnnnnnnnnnnnnnnnnnnnnnnnnnnnnnnnnnnnnnnnnnnnnnnnnnnnnnnnnnnnnnnnnnnnnnnnnnnnnnnnnnnnnnnnnnnnnnnnnnnnnnnnnnnnnnnnnnnnnnnnnnnnnnnnnnnnnnnnnnnnnnnnnnnnnnnnnnnnnnnnnnnnnnnnnnnnnnnnnnnnnnnnnnnnnnnnnnnnnnnnnnnnnnnnnnnnnnnnnnnnnnnnnnnnnnnnnnnnnnnnnnnnnnnnnnnnnnnnnnnnnnnnnnnnnnnnnnnnnnnnnnnnnnnnnnnnnnnnnnnnnnnnnnnnnnnnnnnnnnnnnnnnnnnnnnnnnnnnnnnnnnnnnnnnnnnnnnnnnnnnnnnnnnnnnnnnnnnnnnnnnnnnnnnnnnnnnnnnnnnnnnnnnnnnnnnnnnnnnnnnnnnnnnnnnnnnnnnnnnnnnnnnnnnnnnnnnnnnnnnnnnnnnnnnnnnnnnnnnnnnnnnnnnnnnnnnnnnnnnnnnnnnnnnnnnnnnnnnnnnnnnnnnnnnnnnnnnnnnnnnnnnnnnnnnnnnnnnnnnnnnnnnnnnnnnnnnnnnnnnnnnnnnnnnnnnnnnnnnnnnnnnnnnnnnnnnnnnnnnnnnnnnnnnnnnnnnnnnnnnnnnnnnnnnnnnnnnnnnnnnnnnnnnnnnnnnnnnnnnnnnnnnnnnnnnnnnnnnnnnnnnnnnnnnnnnnnnnnnnnnnnnnnnnnnnnnnnnnnnnnnnnnnnnnnnnnnnnnnnnnnnnnnnnnnnnnnnnnnnnnnnnnnnnnnnnnnnnnnnnnnnnnnnnnnnnnnnnnnnnnnnnnnnnnnnnnnnnnnnnnnnnnnnnnnnnnnnnnnnnnnnnnnnnnnnnnnnnnnnnnnnnnnnnnnnnnnnnnnnnnnnnnnnnnnnnnnnnnnnnnnnnnnnnnnnnnnnnnnnnnnnnnnnnnnnnnnnnnnnnnnnnnnnnnnnnnnnnnnnnnnnnnnnnnnnnnnnnnnnnnnnnnnnnnnnnnnnnnnnnnnnnnnnnnnnnnnnnnnnnnnnnnnnnnnnnnnnnnnnnnnnnnnnnnnnnnnnnnnnnnnnnnnnnnnnnnnnnnnnnnnnnnnnnnnnnnnnnnnnnnnnnnnnnnnnnnnnnnnnnnnnnnnnnnnnnnnnnnnnnnnnnnnnnnnnnnnnnnnnnnnnnnnnnnnnnnnnnnnnnnnnnnnnnnnnnnnnnnnnnnnnnnnnnnnnnnnnnnnnnnnnnnnnnnnnnnnnnnnnnnnnnnnnnnnnnnnnnnnnnnnnnnnnnnnnnnnnnnnnnnnnnnnnnnnnnnnnnnnnnnnnnnnnnnnnnnnnnnnnnnnnnnnnnnnnnnnnnnnnnnnnnnnnnnnnnnnnnnnnnnnnnnnnnnnnnnnnnnnnnnnnnnnnnnnnnnnnnnnnnnnnnnnnnnnnnnnnnnnnnnnnnnnnnnnnnnnnnnnnnnnnnnnnnnnnnnnnnnnnnnnnnnnnnnnnnnnnnnnnnnnnnnnnnnnnnnnnnnnnnnnnnnnnnnnnnnnnnnnnnnnnnnnnnnnnnnnnnnnnnnnnnnnnnnnnnnnnnnnnnnnnnnnnnnnnnnnnnnnnnnnnnnnnnnnnnnnnnnnnnnnnnnnnnnnnnnnnnnnnnnnnnnnnnnnnnnnnnnnnnnnnnnnnnnnnnnnnnnnnnnnnnnnnnnnnnnnnnnnnnnnnnnnnnnnnnnnnnnnnnnnnnnnnnnnnnnnnnnnnnnnnnnnnnnnnnnnnnnnnnnnnnnnnnnnnnnnnnnnnnnnnnnnnnnnnnnnnnnnnnnnnnnnnnnnnnnnnnnnnnnnnnnnnnnnnnnnnnnnnnnnnnnnnnnnnnnnnnnnnnnnnnnnnnnnnnnnnnnnnnnnnnnnnnnnnnnnnnnnnnnnnnnnnnnnnnnnnnnnnnnnnnnnnnnnnnnnnnnnnnnnnnnnnnnnnnnnnnnnnnnnnnnnnnnnnnnnnnnnnnnnnnnnnnnnnnnnnnnnnnnnnnnnnnnnnnnnnnnnnnnnnnnnnnnnnnnnnnnnnnnnnnnnnnnnnnnnnnnnnnnnnnnnnnnnnnnnnnnnnnnnnnnnnnnnnnnnnnnnnnnnnnnnnnnnnnnnnnnnnnnnnnnnnnnnnnnnnnnnnnnnnnnnnnnnnnnnnnnnnnnnnnnnnnnnnnnnnnnnnnnnnnnnnnnnnnnnnnnnnnnnnnnnnnnnnnnnnnnnnnnnnnnnnnnnnnnnnnnnnnnnnnnnnnnnnnnnnnnnnnnnnnnnnnnnnnnnnnnnnnnnnnnnnnnnnnnnnnnnnnnnnnnnnnnnnnnnnnnnnnnnnnnnnnnnnnnnnnnnnnnnnnnnnnnnnnnnnnnnnnnnnnnnnnnnnnnnnnnnnnnnnnnnnnnnnnnnnnnnnnnnnnnnnnnnnnnnnnnnnnnnnnnnnnnnnnnnnnnnnnnnnnnnnnnnnnnnnnnnnnnnnnnnnnnnnnnnnnnnnnnnnnnnnnnnnnnnnnnnnnnnnnnnnnnnnnnnnnnnnnnnnnnnnnnnnnnnnnnnnnnnnnnnnnnnnnnnnnnnnnnnnnnnnnnnnnnnnnnnnnnnnnnnnnnnnnnnnnnnnnnnnnnnnnnnnnnnnnnnnnnnnnnnnnnnnnnnnnnnnnnnnnnnnnnnnnnnnnnnnnnnnnnnnnnnnnnnnnnnnnnnnnnnnnnnnnnnnnnnnnnnnnnnnnnnnnnnnnnnnnnnnnnnnnnnnnnnnnnnnnnnnnnnnnnnnnnnnnnnnnnnnnnnnnnnnnnnnnnnnnnnnnnnnnnnnnnnnnnnnnnnnnnnnnnnnnnnnnnnnnnnnnnnnnnnnnnnnnnnnnnnnnnnnnnnnnnnnnnnnnnnnnnnnnnnnnnnnnnnnnnnnnnnnnnnnnnnnnnnnnnnnnnnnnnnnnnnnnnnnnnnnnnnnnnnnnnnnnnnnnnnnnnnnnnnnnnnnnnnnnnnnnnnnnnnnnnnnnnnnnnnnnnnnnnnnnnnnnnnnnnnnnnnnnnnnnnnnnnnnnnnnnnnnnnnnnnnnnnnnnnnnnnnnnnnnnnnnnnnnnnnnnnnnnnnnnnnnnnnnnnnnnnnnnnnnnnnnnnnnnnnnnnnnnnnnnnnnnnnnnnnnnnnnnnnnnnnnnnnnnnnnnnnnnnnnnnnnnnnnnnnnnnnnnnnnnnnnnnnnnnnnnnnnnnnnnnnnnnnnnnnnnnnnnnnnnnnnnnnnnnnnnnnnnnnnnnnnnnnnnnnnnnnnnnnnnnnnnnnnnnnnnnnnnnnnnnnnnnnnnnnnnnnnnnnnnnnnnnnnnnnnnnnnnnnnnnnnnnnnnnnnnnnnnnnnnnnnnnnnnnnnnnnnnnnnnnnnnnnnnnnnnnnnnnnnnnnnnnnnnnnnnnnnnnnnnnnnnnnnnnnnnnnnnnnnnnnnnnnnnnnnnnnnnnnnnnnnnnnnnnnnnnnnnnnnnnnnnnnnnnnnnnnnnnnnnnnnnnnnnnnnnnnnnnnnnnnnnnnnnnnnnnnnnnnnnnnnnnnnnnnnnnnnnnnnnnnnnnnnnnnnnnnnnnnnnnnnnnnnnnnnnnnnnnnnnnnnnnnnnnnnnnnnnnnnnnnnnnnnnnnnnnnnnnnnnnnnnnnnnnnnnnnnnnnnnnnnnnnnnnnnnnnnnnnnnnnnnnnnnnnnnnnnnnnnnnnnnnnnnnnnnnnnnnnnnnnnnnnnnnnnnnnnnnnnnnnnnnnnnnnnnnnnnnnnnnnnnnnnnnnnnnnnnnnnnnnnnnnnnnnnnnnnnnnnnnnnnnnnnnnnnnnnnnnnnnnnnnnnnnnnnnnnnnnnnnnnnnnnnnnnnnnnnnnnnnnnnnnnnnnnnnnnnnnnnnnnnnnnnnnnnnnnnnnnnnnnnnnnnnnnnnnnnnnnnnnnnnnnnnnnnnnnnnnnnnnnnnnnnnnnnnnnnnnnnnnnnnnnnnnnnnnnnnnnnnnnnnnnnnnnnnnnnnnnnnnnnnnnnnnnnnnnnnnnnnnnnnnnnnnnnnnnnnnnnnnnnnnnnnnnnnnnnnnnnnnnnnnnnnnnnnnnnnnnnnnnnnnnnnnnnnnnnnnnnnnnnnnnnnnnnnnnnnnnnnnnnnnnnnnnnnnnnnnnnnnnnnnnnnnnnnnnnnnnnnnnnnnnnnnnnnnnnnnnnnnnnnnnnnnnnnnnnnnnnnnnnnnnnnnnnnnnnnnnnnnnnnnnnnnnnnnnnnnnnnnnnnnnnnnnnnnnnnnnnnnnnnnnnnnnnnnnnnnnnnnnnnnnnnnnnnnnnnnnnnnnnnnnnnnnnnnnnnnnnnnnnnnnnnnnnnnnnnnnnnnnnnnnnnnnnnnnnnnnnnnnnnnnnnnnnnnnnnnnnnnnnnnnnnnnnnnnnnnnnnnnnnnnnnnnnnnnnnnnnnnnnnnnnnnnnnnnnnnnnnnnnnnnnnnnnnnnnnnnnnnnnnnnnnnnnnnnnnnnnnnnnnnnnnnnnnnnnnnnnnnnnnnnnnnnnnnnnnnnnnnnnnnnnnnnnnnnnnnnnnnnnnnnnnnnnnnnnnnnnnnnnnnnnnnnnnnnnnnnnnnnnnnnnnnnnnnnnnnnnnnnnnnnnnnnnnnnnnnnnnnnnnnnnnnnnnnnnnnnnnnnnnnnnnnnnnnnnnnnnnnnnnnnnnnnnnnnnnnnnnnnnnnnnnnnnnnnnnnnnnnnnnnnnnnnnnnnnnnnnnnnnnnnnnnnnnnnnnnnnnnnnnnnnnnnnnnnnnnnnnnnnnnnnnnnnnnnnnnnnnnnnnnnnnnnnnnnnnnnnnnnnnnnnnnnnnnnnnnnnnnnnnnnnnnnnnnnnnnnnnnnnnnnnnnnnnnnnnnnnnnnnnnnnnnnnnnnnnnnnnnnnnnnnnnnnnnnnnnnnnnnnnnnnnnnnnnnnnnnnnnnnnnnnnnnnnnnnnnnnnnnnnnnnnnnnnnnnnnnnnnnnnnnnnnnnnnnnnnnnnnnnnnnnnnnnnnnnnnnnnnnnnnnnnnnnnnnnnnnnnnnnnnnnnnnnnnnnnnnnnnnnnnnnnnnnnnnnnnnnnnnnnnnnnnnnnnnnnnnnnnnnnnnnnnnnnnnnnnnnnnnnnnnnnnnnnnnnnnnnnnnnnnnnnnnnnnnnnnnnnnnnnnnnnnnnnnnnnnnnnnnnnnnnnnnnnnnnnnnnnnnnnnnnnnnnnnnnnnnnnnnnnnnnnnnnnnnnnnnnnnnnnnnnnnnnnnnnnnnnnnnnnnnnnnnnnnnnnnnnnnnnnnnnnnnnnnnnnnnnnnnnnnnnnnnnnnnnnnnnnnnnnnnnnnnnnnnnnnnnnnnnnnnnnnnnnnnnnnnnnnnnnnnnnnnnnnnnnnnnnnnnnnnnnnnnnnnnnnnnnnnnnnnnnnnnnnnnnnnnnnnnnnnnnnnnnnnnnnnnnnnnnnnnnnnnnnnnnnnnnnnnnnnnnnnnnnnnnnnnnnnnnnnnnnnnnnnnnnnnnnnnnnnnnnnnnnnnnnnnnnnnnnnnnnnnnnnnnnnnnnnnnnnnnnnnnnnnnnnnnnnnnnnnnnnnnnnnnnnnnnnnnnnnnnnnnnnnnnnnnnnnnnnnnnnnnnnnnnnnnnnnnnnnnnnnnnnnnnnnnnnnnnnnnnnnnnnnnnnnnnnnnnnnnnnnnnnnnnnnnnnnnnnnnnnnnnnnnnnnnnnnnnnnnnnnnnnnnnnnnnnnnnnnnnnnnnnnnnnnnnnnnnnnnnnnnnnnnnnnnnnnnnnnnnnnnnnnnnnnnnnnnnnnnnnnnnnnnnnnnnnnnnnnnnnnnnnnnnnnnnnnnnnnnnnnnnnnnnnnnnnnnnnnnnnnnnnnnnnnnnnnnnnnnnnnnnnnnnnnnnnnnnnnnnnnnnnnnnnnnnnnnnnnnnnnnnnnnnnnnnnnnnnnnnnnnnnnnnnnnnnnnnnnnnnnnnnnnnnnnnnnnnnnnnnnnnnnnnnnnnnnnnnnnnnnnnnnnnnnnnnnnnnnnnnnnnnnnnnnnnnnnnnnnnnnnnnnnnnnnnnnnnnnnnnnnnnnnnnnnnnnnnnnnnnnnnnnnnnnnnnnnnnnnnnnnnnnnnnnnnnnnnnnnnnnnnnnnnnnnnnnnnnnnnnnnnnnnnnnnnnnnnnnnnnnnnnnnnnnnnnnnnnnnnnnnnnnnnnnnnnnnnnnnnnnnnnnnnnnnnnnnnnnnnnnnnnnnnnnnnnnnnnnnnnnnnnnnnnnnnnnnnnnnnnnnnnnnnnnnnnnnnnnnnnnnnnnnnnnnnnnnnnnnnnnnnnnnnnnnnnnnnnnnnnnnnnnnnnnnnnnnnnnnnnnnnnnnnnnnnnnnnnnnnnnnnnnnnnnnnnnnnnnnnnnnnnnnnnnnnnnnnnnnnnnnnnnnnnnnnnnnnnnnnnnnnnnnnnnnnnnnnnnnnnnnnnnnnnnnnnnnnnnnnnnnnnnnnnnnnnnnnnnnnnnnnnnnnnnnnnnnnnnnnnnnnnnnnnnnnnnnnnnnnnnnnnnnnnnnnnnnnnnnnnnnnnnnnnnnnnnnnnnnnnnnnnnnnnnnnnnnnnnnnnnnnnnnnnnnnnnnnnnnnnnnnnnnnnnnnnnnnnnnnnnnnnnnnnnnnnnnnnnnnnnnnnnnnnnnnnnnnnnnnnnnnnnnnnnnnnnnnnnnnnnnnnnnnnnnnnnnnnnnnnnnnnnnnnnnnnnnnnnnnnnnnnnnnnnnnnnnnnnnnnnnnnnnnnnnnnnnnnnnnnnnnnnnnnnnnnnnnnnnnnnnnnnnnnnnnnnnnnnnnnnnnnnnnnnnnnnnnnnnnnnnnnnnnnnnnnnnnnnnnnnnnnnnnnnnnnnnnnnnnnnnnnnnnnnnnnnnnnnnnnnnnnnnnnnnnnnnnnnnnnnnnnnnnnnnnnnnnnnnnnnnnnnnnnnnnnnnnnnnnnnnnnnnnnnnnnnnnnnnnnnnnnnnnnnnnnnnnnnnnnnnnnnnnnnnnnnnnnnnnnnnnnnnnnnnnnnnnnnnnnnnnnnnnnnnnnnnnnnnnnnnnnnnnnnnnnnnnnnnnnnnnnnnnnnnnnnnnnnnnnnnnnnnnnnnnnnnnnnnnnnnnnnnnnnnnnnnnnnnnnnnnnnnnnnnnnnnnnnnnnnnnnnnnnnnnnnnnnnnnnnnnnnnnnnnnnnnnnnnnnnnnnnnnnnnnnnnnnnnnnnnnnnnnnnnnnnnnnnnnnnnnnnnnnnnnnnnnnnnnnnnnnnnnnnnnnnnnnnnnnnnnnnnnnnnnnnnnnnnnnnnnnnnnnnnnnnnnnnnnnnnnnnnnnnnnnnnnnnnnnnnnnnnnnnnnnnnnnnnnnnnnnnnnnnnnnnnnnnnnnnnnnnnnnnnnnnnnnnnnnnnnnnnnnnnnnnnnnnnnnnnnnnnnnnnnnnnnnnnnnnnnnnnnnnnnnnnnnnnnnnnnnnnnnnnnnnnnnnnnnnnnnnnnnnnnnnnnnnnnnnnnnnnnnnnnnnnnnnnnnnnnnnnnnnnnnnnnnnnnnnnnnnnnnnnnnnnnnnnnnnnnnnnnnnnnnnnnnnnnnnnnnnnnnnnnnnnnnnnnnnnnnnnnnnnnnnnnnnnnnnnnnnnnnnnnnnnnnnnnnnnnnnnnnnnnnnnnnnnnnnnnnnnnnnnnnnnnnnnnnnnnnnnnnnnnnnnnnnnnnnnnnnnnnnnnnnnnnnnnnnnnnnnnnnnnnnnnnnnnnnnnnnnnnnnnnnnnnnnnnnnnnnnnnnnnnnnnnnnnnnnnnnnnnnnnnnnnnnnnnnnnnnnnnnnnnnnnnnnnnnnnnnnnnnnnnnnnnnnnnnnnnnnnnnnnnnnnnnnnnnnnnnnnnnnnnnnnnnnnnnnnnnnnnnnnnnnnnnnnnnnnnnnnnnnnnnnnnnnnnnnnnnnnnnnnnnnnnnnnnnnnnnnnnnnnnnnnnnnnnnnnnnnnnnnnnnnnnnnnnnnnnnnnnnnnnnnnnnnnnnnnnnnnnnnnnnnnnnnnnnnnnnnnnnnnnnnnnnnnnnnnnnnnnnnnnnnnnnnnnnnnnnnnnnnnnnnnnnnnnnnnnnnnnnnnnnnnnnnnnnnnnnnnnnnnnnnnnnnnnnnnnnnnnnnnnnnnnnnnnnnnnnnnnnnnnnnnnnnnnnnnnnnnnnnnnnnnnnnnnnnnnnnnnnnnnnnnnnnnnnnnnnnnnnnnnnnnnnnnnnnnnnnnnnnnnnnnnnnnnnnnnnnnnnnnnnnnnnnnnnnnnnnnnnnnnnnnnnnnnnnnnnnnnnnnnnnnnnnnnnnnnnnnnnnnnnnnnnnnnnnnnnnnnnnnnnnnnnnnnnnnnnnnnnnnnnnnnnnnnnnnnnnnnnnnnnnnnnnnnnnnnnnnnnnnnnnnnnnnnnnnnnnnnnnnnnnnnnnnnnnnnnnnnnnnnnnnnnnnnnnnnnnnnnnnnnnnnnnnnnnnnnnnnnnnnnnnnnnnnnnnnnnnnnnnnnnnnnnnnnnnnnnnnnnnnnnnnnnnnnnnnnnnnnnnnnnnnnnnnnnnnnnnnnnnnnnnnnnnnnnnnnnnnnnnnnnnnnnnnnnnnnnnnnnnnnnnnnnnnnnnnnnnnnnnnnnnnnnnnnnnnnnnnnnnnnnnnnnnnnnnnnnnnnnnnnnnnnnnnnnnnnnnnnnnnnnnnnnnnnnnnnnnnnnnnnnnnnnnnnnnnnnnnnnnnnnnnnnnnnnnnnnnnnnnnnnnnnnnnnnnnnnnnnnnnnnnnnnnnnnnnnnnnnnnnnnnnnnnnnnnnnnnnnnnnnnnnnnnnnnnnnnnnnnnnnnnnnnnnnnnnnnnnnnnnnnnnnnnnnnnnnnnnnnnnnnnnnnnnnnnnnnnnnnnnnnnnnnnnnnnnnnnnnnnnnnnnnnnnnnnnnnnnnnnnnnnnnnnnnnnnnnnnnnnnnnnnnnnnnnnnnnnnnnnnnnnnnnnnnnnnnnnnnnnnnnnnnnnnnnnnnnnnnnnnnnnnnnnnnnnnnnnnnnnnnnnnnnnnnnnnnnnnnnnnnnnnnnnnnnnnnnnnnnnnnnnnnnnnnnnnnnnnnnnnnnnnnnnnnnnnnnnnnnnnnnnnnnnnnnnnnnnnnnnnnnnnnnnnnnnnnnnnnnnnnnnnnnnnnnnnnnnnnnnnnnnnnnnnnnnnnnnnnnnnnnnnnnnnnnnnnnnnnnnnnnnnnnnnnnnnnnnnnnnnnnnnnnnnnnnnnnnnnnnnnnnnnnnnnnnnnnnnnnnnnnnnnnnnnnnnnnnnnnnnnnnnnnnnnnnnnnnnnnnnnnnnnnnnnnnnnnnnnnnnnnnnnnnnnnnnnnnnnnnnnnnnnnnnnnnnnnnnnnnnnnnnnnnnnnnnnnnnnnnnnnnnnnnnnnnnnnnnnnnnnnnnnnnnnnnnnnnnnnnnnnnnnnnnnnnnnnnnnnnnnnnnnnnnnnnnnnnnnnnnnnnnnnnnnnnnnnnnnnnnnnnnnnnnnnnnnnnnnnnnnnnnnnnnnnnnnnnnnnnnnnnnnnnnnnnnnnnnnnnnnnnnnnnnnnnnnnnnnnnnnnnnnnnnnnnnnnnnnnnnnnnnnnnnnnnnnnnnnnnnnnnnnnnnnnnnnnnnnnnnnnnnnnnnnnnnnnnnnnnnnnnnnnnnnnnnnnnnnnnnnnnnnnnnnnnnnnnnnnnnnnnnnnnnnnnnnnnnnnnnnnnnnnnnnnnnnnnnnnnnnnnnnnnnnnnnnnnnnnnnnnnnnnnnnnnnnnnnnnnnnnnnnnnnnnnnnnnnnnnnnnnnnnnnnnnnnnnnnnnnnnnnnnnnnnnnnnnnnnnnnnnnnnnnnnnnnnnnnnnnnnnnnnnnnnnnnnnnnnnnnnnnnnnnnnnnnnnnnnnnnnnnnnnnnnnnnnnnnnnnnnnnnnnnnnnnnnnnnnnnnnnnnnnnnnnnnnnnnnnnnnnnnnnnnnnnnnnnnnnnnnnnnnnnnnnnnnnnnnnnnnnnnnnnnnnnnnnnnnnnnnnnnnnnnnnnnnnnnnnnnnnnnnnnnnnnnnnnnnnnnnnnnnnnnnnnnnnnnnnnnnnnnnnnnnnnnnnnnnnnnnnnnnnnnnnnnnnnnnnnnnnnnnnnnnnnnnnnnnnnnnnnnnnnnnnnnnnnnnnnnnnnnnnnnnnnnnnnnnnnnnnnnnnnnnnnnnnnnnnnnnnnnnnnnnnnnnnnnnnnnnnnnnnnnnnnnnnnnnnnnnnnnnnnnnnnnnnnnnnnnnnnnnnnnnnnnnnnnnnnnnnnnnnnnnnnnnnnnnnnnnnnnnnnnnnnnnnnnnnnnnnnnnnnnnnnnnnnnnnnnnnnnnnnnnnnnnnnnnnnnnnnnnnnnnnnnnnnnnnnnnnnnnnnnnnnnnnnnnnnnnnnnnnnnnnnnnnnnnnnnnnnnnnnnnnnnnnnnnnnnnnnnnnnnnnnnnnnnnnnnnnnnnnnnnnnnnnnnnnnnnnnnnnnnnnnnnnnnnnnnnnnnnnnnnnnnnnnnnnnnnnnnnnnnnnnnnnnnnnnnnnnnnnnnnnnnnnnnnnnnnnnnnnnnnnnnnnnnnnnnnnnnnnnnnnnnnnnnnnnnnnnnnnnnnnnnnnnnnnnnnnnnnnnnnnnnnnnnnnnnnnnnnnnnnnnnnnnnnnnnnnnnnnnnnnnnnnnnnnnnnnnnnnnnnnnnnnnnnnnnnnnnnnnnnnnnnnnnnnnnnnnnnnnnnnnnnnnnnnnnnnnnnnnnnnnnnnnnnnnnnnnnnnnnnnnnnnnnnnnnnnnnnnnnnnnnnnnnnnnnnnnnnnnnnnnnnnnnnnnnnnnnnnnnnnnnnnnnnnnnnnnnnnnnnnnnnnnnnnnnnnnnnnnnnnnnnnnnnnnnnnnnnnnnnnnnnnnnnnnnnnnnnnnnnnnnnnnnnnnnnnnnnnnnnnnnnnnnnnnnnnnnnnnnnnnnnnnnnnnnnnnnnnnnnnnnnnnnnnnnnnnnnnnnnnnnnnnnnnnnnnnnnnnnnnnnnnnnnnnnnnnnnnnnnnnnnnnnnnnnnnnnnnnnnnnnnnnnnnnnnnnnnnnnnnnnnnnnnnnnnnnnnnnnnnnnnnnnnnnnnnnnnnnnnnnnnnnnnnnnnnnnnnnnnnnnnnnnnnnnnnnnnnnnnnnnnnnnnnnnnnnnnnnnnnnnnnnnnnnnnnnnnnnnnnnnnnnnnnnnnnnnnnnnnnnnnnnnnnnnnnnnnnnnnnnnnnnnnnnnnnnnnnnnnnnnnnnnnnnnnnnnnnnnnnnnnnnnnnnnnnnnnnnnnnnnnnnnnnnnnnnnnnnnnnnnnnnnnnnnnnnnnnnnnnnnnnnnnnnnnnnnnnnnnnnnnnnnnnnnnnnnnnnnnnnnnnnnnnnnnnnnnnnnnnnnnnnnnnnnnnnnnnnnnnnnnnnnnnnnnnnnnnnnnnnnnnnnnnnnnnnnnnnnnnnnnnnnnnnnnnnnnnnnnnnnnnnnnnnnnnnnnnnnnnnnnnnnnnnnnnnnnnnnnnnnnnnnnnnnnnnnnnnnnnnnnnnnnnnnnnnnnnnnnnnnnnnnnnnnnnnnnnnnnnnnnnnnnnnnnnnnnnnnnnnnnnnnnnnnnnnnnnnnnnnnnnnnnnnnnnnnnnnnnnnnnnnnnnnnnnnnnnnnnnnnnnnnnnnnnnnnnnnnnnnnnnnnnnnnnnnnnnnnnnnnnnnnnnnnnnnnnnnnnnnnnnnnnnnnnnnnnnnnnnnnnnnnnnnnnnnnnnnnnnnnnnnnnnnnnnnnnnnnnnnnnnnnnnnnnnnnnnnnnnnnnnnnnnnnnnnnnnnnnnnnnnnnnnnnnnnnnnnnnnnnnnnnnnnnnnnnnnnnnnnnnnnnnnnnnnnnnnnnnnnnnnnnnnnnnnnnnnnnnnnnnnnnnnnnnnnnnnnnnnnnnnnnnnnnnnnnnnnnnnnnnnnnnnnnnnnnnnnnnnnnnnnnnnnnnnnnnnnnnnnnnnnnnnnnnnnnnnnnnnnnnnnnnnnnnnnnnnnnnnnnnnnnnnnnnnnnnnnnnnnnnnnnnnnnnnnnnnnnnnnnnnnnnnnnnnnnnnnnnnnnnnnnnnnnnnnnnnnnnnnnnnnnnnnnnnnnnnnnnnnnnnnnnnnnnnnnnnnnnnnnnnnnnnnnnnnnnnnnnnnnnnnnnnnnnnnnnnnnnnnnnnnnnnnnnnnnnnnnnnnnnnnnnnnnnnnnnnnnnnnnnnnnnnnnnnnnnnnnnnnnnnnnnnnnnnnnnnnnnnnnnnnnnnnnnnnnnnnnnnnnnnnnnnnnnnnnnnnnnnnnnnnnnnnnnnnnnnnnnnnnnnnnnnnnnnnnnnnnnnnnnnnnnnnnnnnnnnnnnnnnnnnnnnnnnnnnnnnnnnnnnnnnnnnnnnnnnnnnnnnnnnnnnnnnnnnnnnnnnnnnnnnnnnnnnnnnnnnnnnnnnnnnnnnnnnnnnnnnnnnnnnnnnnnnnnnnnnnnnnnnnnnnnnnnnnnnnnnnnnnnnnnnnnnnnnnnnnnnnnnnnnnnnnnnnnnnnnnnnnnnnnnnnnnnnnnnnnnnnnnnnnnnnnnnnnnnnnnnnnnnnnnnnnnnnnnnnnnnnnnnnnnnnnnnnnnnnnnnnnnnnnnnnnnnnnnnnnnnnnnnnnnnnnnnnnnnnnnnnnnnnnnnnnnnnnnnnnnnnnnnnnnnnnnnnnnnnnnnnnnnnnnnnnnnnnnnnnnnnnnnnnnnnnnnnnnnnnnnnnnnnnnnnnnnnnnnnnnnnnnnnnnnnnnnnnnnnnnnnnnnnnnnnnnnnnnnnnnnnnnnnnnnnnnnnnnnnnnnnnnnnnnnnnnnnnnnnnnnnnnnnnnnnnnnnnnnnnnnnnnnnnnnnnnnnnnnnnnnnnnnnnnnnnnnnnnnnnnnnnnnnnnnnnnnnnnnnnnnnnnnnnnnnnnnnnnnnnnnnnnnnnnnnnnnnnnnnnnnnnnnnnnnnnnnnnnnnnnnnnnnnnnnnnnnnnnnnnnnnnnnnnnnnnnnnnnnnnnnnnnnnnnnnnnnnnnnnnnnnnnnnnnnnnnnnnnnnnnnnnnnnnnnnnnnnnnnnnnnnnnnnnnnnnnnnnnnnnnnnnnnnnnnnnnnnnnnnnnnnnnnnnnnnnnnnnnnnnnnnnnnnnnnnnnnnnnnnnnnnnnnnnnnnnnnnnnnnnnnnnnnnnnnnnnnnnnnnnnnnnnnnnnnnnnnnnnnnnnnnnnnnnnnnnnnnnnnnnnnnnnnnnnnnnnnnnnnnnnnnnnnnnnnnnnnnnnnnnnnnnnnnnnnnnnnnnnnnnnnnnnnnnnnnnnnnnnnnnnnnnnnnnnnnnnnnnnnnnnnnnnnnnnnnnnnnnnnnnnnnnnnnnnnnnnnnnnnnnnnnnnnnnnnnnnnnnnnnnnnnnnnnnnnnnnnnnnnnnnnnnnnnnnnnnnnnnnnnnnnnnnnnnnnnnnnnnnnnnnnnnnnnnnnnnnnnnnnnnnnnnnnnnnnnnnnnnnnnnnnnnnnnnnnnnnnnnnnnnnnnnnnnnnnnnnnnnnnnnnnnnnnnnnnnnnnnnnnnnnnnnnnnnnnnnnnnnnnnnnnnnnnnnnnnnnnnnnnnnnnnnnnnnnnnnnnnnnnnnnnnnnnnnnnnnnnnnnnnnnnnnnnnnnnnnnnnnnnnnnnnnnnnnnnnnnnnnnnnnnnnnnnnnnnnnnnnnnnnnnnnnnnnnnnnnnnnnnnnnnnnnnnnnnnnnnnnnnnnnnnnnnnnnnnnnnnnnnnnnnnnnnnnnnnnnnnnnnnnnnnnnnnnnnnnnnnnnnnnnnnnnnnnnnnnnnnnnnnnnnnnnnnnnnnnnnnnnnnnnnnnnnnnnnnnnnnnnnnnnnnnnnnnnnnnnnnnnnnnnnnnnnnnnnnnnnnnnnnnnnnnnnnnnnnnnnnnnnnnnnnnnnnnnnnnnnnnnnnnnnnnnnnnnnnnnnnnnnnnnnnnnnnnnnnnnnnnnnnnnnnnnnnnnnnnnnnnnnnnnnnnnnnnnnnnnnnnnnnnnnnnnnnnnnnnnnnnnnnnnnnnnnnnnnnnnnnnnnnnnnnnnnnnnnnnnnnnnnnnnnnnnnnnnnnnnnnnnnnnnnnnnnnnnnnnnnnnnnnnnnnnnnnnnnnnnnnnnnnnnnnnnnnnnnnnnnnnnnnnnnnnnnnnnnnnnnnnnnnnnnnnnnnnnnnnnnnnnnnnnnnnnnnnnnnnnnnnnnnnnnnnnnnnnnnnnnnnnnnnnnnnnnnnnnnnnnnnnnnnnnnnnnnnnnnnnnnnnnnnnnnnnnnnnnnnnnnnnnnnnnnnnnnnnnnnnnnnnnnnnnnnnnnnnnnnnnnnnnnnnnnnnnnnnnnnnnnnnnnnnnnnnnnnnnnnnnnnnnnnnnnnnnnnnnnnnnnnnnnnnnnnnnnnnnnnnnnnnnnnnnnnnnnnnnnnnnnnnnnnnnnnnnnnnnnnnnnnnnnnnnnnnnnnnnnnnnnnnnnnnnnnnnnnnnnnnnnnnnnnnnnnnnnnnnnnnnnnnnnnnnnnnnnnnnnnnnnnnnnnnnnnnnnnnnnnnnnnnnnnnnnnnnnnnnnnnnnnnnnnnnnnnnnnnnnnnnnnnnnnnnnnnnnnnnnnnnnnnnnnnnnnnnnnnnnnnnnnnnnnnnnnnnnnnnnnnnnnnnnnnnnnnnnnnnnnnnnnnnnnnnnnnnnnnnnnnnnnnnnnnnnnnnnnnnnnnnnnnnnnnnnnnnnnnnnnnnnnnnnnnnnnnnnnnnnnnnnnnnnnnnnnnnnnnnnnnnnnnnnnnnnnnnnnnnnnnnnnnnnnnnnnnnnnnnnnnnnnnnnnnnnnnnnnnnnnnnnnnnnnnnnnnnnnnnnnnnnnnnnnnnnnnnnnnnnnnnnnnnnnnnnnnnnnnnnnnnnnnnnnnnnnnnnnnnnnnnnnnnnnnnnnnnnnnnnnnnnnnnnnnnnnnnnnnnnnnnnnnnnnnnnnnnnnnnnnnnnnnnnnnnnnnnnnnnnnnnnnnnnnnnnnnnnnnnnnnnnnnnnnnnnnnnnnnnnnnnnnnnnnnnnnnnnnnnnnnnnnnnnnnnnnnnnnnnnnnnnnnnnnnnnnnnnnnnnnnnnnnnnnnnnnnnnnnnnnnnnnnnnnnnnnnnnnnnnnnnnnnnnnnnnnnnnnnnnnnnnnnnnnnnnnnnnnnnnnnnnnnnnnnnnnnnnnnnnnnnnnnnnnnnnnnnnnnnnnnnnnnnnnnnnnnnnnnnnnnnnnnnnnnnnnnnnnnnnnnnnnnnnnnnnnnnnnnnnnnnnnnnnnnnnnnnnnnnnnnnnnnnnnnnnnnnnnnnnnnnnnnnnnnnnnnnnnnnnnnnnnnnnnnnnnnnnnnnnnnnnnnnnnnnnnnnnnnnnnnnnnnnnnnnnnnnnnnnnnnnnnnnnnnnnnnnnnnnnnnnnnnnnnnnnnnnnnnnnnnnnnnnnnnnnnnnnnnnnnnnnnnnnnnnnnnnnnnnnnnnnnnnnnnnnnnnnnnnnnnnnnnnnnnnnnnnnnnnnnnnnnnnnnnnnnnnnnnnnnnnnnnnnnnnnnnnnnnnnnnnnnnnnnnnnnnnnnnnnnnnnnnnnnnnnnnnnnnnnnnnnnnnnnnnnnnnnnnnnnnnnnnnnnnnnnnnnnnnnnnnnnnnnnnnnnnnnnnnnnnnnnnnnnnnnnnnnnnnnnnnnnnnnnnnnnnnnnnnnnnnnnnnnnnnnnnnnnnnnnnnnnnnnnnnnnnnnnnnnnnnnnnnnnnnnnnnnnnnnnnnnnnnnnnnnnnnnnnnnnnnnnnnnnnnnnnnnnnnnnnnnnnnnnnnnnnnnnnnnnnnnnnnnnnnnnnnnnnnnnnnnnnnnnnnnnnnnnnnnnnnnnnnnnnnnnnnnnnnnnnnnnnnnnnnnnnnnnnnnnnnnnnnnnnnnnnnnnnnnnnnnnnnnnnnnnnnnnnnnnnnnnnnnnnnnnnnnnnnnnnnnnnnnnnnnnnnnnnnnnnnnnnnnnnnnnnnnnnnnnnnnnnnnnnnnnnnnnnnnnnnnnnnnnnnnnnnnnnnnnnnnnnnnnnnnnnnnnnnnnnnnnnnnnnnnnnnnnnnnnnnnnnnnnnnnnnnnnnnnnnnnnnnnnnnnnnnnnnnnnnnnnnnnnnnnnnnnnnnnnnnnnnnnnnnnnnnnnnnnnnnnnnnnnnnnnnnnnnnnnnnnnnnnnnnnnnnnnnnnnnnnnnnnnnnnnnnnnnnnnnnnnnnnnnnnnnnnnnnnnnnnnnnnnnnnnnnnnnnnnnnnnnnnnnnnnnnnnnnnnnnnnnnnnnnnnnnnnnnnnnnnnnnnnnnnnnnnnnnnnnnnnnnnnnnnnnnnnnnnnnnnnnnnnnnnnnnnnnnnnnnnnnnnnnnnnnnnnnnnnnnnnnnnnnnnnnnnnnnnnnnnnnnnnnnnnnnnnnnnnnnnnnnnnnnnnnnnnnnnnnnnnnnnnnnnnnnnnnnnnnnnnnnnnnnnnnnnnnnnnnnnnnnnnnnnnnnnnnnnnnnnnnnnnnnnnnnnnnnnnnnnnnnnnnnnnnnnnnnnnnnnnnnnnnnnnnnnnnnnnnnnnnnnnnnnnnnnnnnnnnnnnnnnnnnnnnnnnnnnnnnnnnnnnnnnnnnnnnnnnnnnnnnnnnnnnnnnnnnnnnnnnnnnnnnnnnnnnnnnnnnnnnnnnnnnnnnnnnnnnnnnnnnnnnnnnnnnnnnnnnnnnnnnnnnnnnnnnnnnnnnnnnnnnnnnnnnnnnnnnnnnnnnnnnnnnnnnnnnnnnnnnnnnnnnnnnnnnnnnnnnnnnnnnnnnnnnnnnnnnnnnnnnnnnnnnnnnnnnnnnnnnnnnnnnnnnnnnnnnnnnnnnnnnnnnnnnnnnnnnnnnnnnnnnnnnnnnnnnnnnnnnnnnnnnnnnnnnnnnnnnnnnnnnnnnnnnnnnnnnnnnnnnnnnnnnnnnnnnnnnnnnnnnnnnnnnnnnnnnnnnnnnnnnnnnnnnnnnnnnnnnnnnnnnnnnnnnnnnnnnnnnnnnnnnnnnnnnnnnnnnnnnnnnnnnnnnnnnnnnnnnnnnnnnnnnnnnnnnnnnnnnnnnnnnnnnnnnnnnnnnnnnnnnnnnnnnnnnnnnnnnnnnnnnnnnnnnnnnnnnnnnnnnnnnnnnnnnnnnnnnnnnnnnnnnnnnnnnnnnnnnnnnnnnnnnnnnnnnnnnnnnnnnnnnnnnnnnnnnnnnnnnnnnnnnnnnnnnnnnnnnnnnnnnnnnnnnnnnnnnnnnnnnnnnnnnnnnnnnnnnnnnnnnnnnnnnnnnnnnnnnnnnnnnnnnnnnnnnnnnnnnnnnnnnnnnnnnnnnnnnnnnnnnnnnnnnnnnnnnnnnnnnnnnnnnnnnnnnnnnnnnnnnnnnnnnnnnnnnnnnnnnnnnnnnnnnnnnnnnnnnnnnnnnnnnnnnnnnnnnnnnnnnnnnnnnnnnnnnnnnnnnnnnnnnnnnnnnnnnnnnnnnnnnnnnnnnnnnnnnnnnnnnnnnnnnnnnnnnnnnnnnnnnnnnnnnnnnnnnnnnnnnnnnnnnnnnnnnnnnnnnnnnnnnnnnnnnnnnnnnnnnnnnnnnnnnnnnnnnnnnnnnnnnnnnnnnnnnnnnnnnnnnnnnnnnnnnnnnnnnnnnnnnnnnnnnnnnnnnnnnnnnnnnnnnnnnnnnnnnnnnnnnnnnnnnnnnnnnnnnnnnnnnnnnnnnnnnnnnnnnnnnnnnnnnnnnnnnnnnnnnnnnnnnnnnnnnnnnnnnnnnnnnnnnnnnnnnnnnnnnnnnnnnnnnnnnnnnnnnnnnnnnnnnnnnnnnnnnnnnnnnnnnnnnnnnnnnnnnnnnnnnnnnnnnnnnnnnnnnnnnnnnnnnnnnnnnnnnnnnnnnnnnnnnnnnnnnnnnnnnnnnnnnnnnnnnnnnnnnnnnnnnnnnnnnnnnnnnnnnnnnnnnnnnnnnnnnnnnnnnnnnnnnnnnnnnnnnnnnnnnnnnnnnnnnnnnnnnnnnnnnnnnnnnnnnnnnnnnnnnnnnnnnnnnnnnnnnnnnnnnnnnnnnnnnnnnnnnnnnnnnnnnnnnnnnnnnnnnnnnnnnnnnnnnnnnnnnnnnnnnnnnnnnnnnnnnnnnnnnnnnnnnnnnnnnnnnnnnnnnnnnnnnnnnnnnnnnnnnnnnnnnnnnnnnnnnnnnnnnnnnnnnnnnnnnnnnnnnnnnnnnnnnnnnnnnnnnnnnnnnnnnnnnnnnnnnnnnnnnnnnnnnnnnnnnnnnnnnnnnnnnnnnnnnnnnnnnnnnnnnnnnnnnnnnnnnnnnnnnnnnnnnnnnnnnnnnnnnnnnnnnnnnnnnnnnnnnnnnnnnnnnnnnnnnnnnnnnnnnnnnnnnnnnnnnnnnnnnnnnnnnnnnnnnnnnnnnnnnnnnnnnnnnnnnnnnnnnnnnnnnnnnnnnnnnnnnnnnnnnnnnnnnnnnnnnnnnnnnnnnnnnnnnnnnnnnnnnnnnnnnnnnnnnnnnnnnnnnnnnnnnnnnnnnnnnnnnnnnnnnnnnnnnnnnnnnnnnnnnnnnnnnnnnnnnnnnnnnnnnnnnnnnnnnnnnnnnnnnnnnnnnnnnnnnnnnnnnnnnnnnnnnnnnnnnnnnnnnnnnnnnnnnnnnnnnnnnnnnnnnnnnnnnnnnnnnnnnnnnnnnnnnnnnnnnnnnnnnnnnnnnnnnnnnnnnnnnnnnnnnnnnnnnnnnnnnnnnnnnnnnnnnnnnnnnnnnnnnnnnnnnnnnnnnnnnnnnnnnnnnnnnnnnnnnnnnnnnnnnnnnnnnnnnnnnnnnnnnnnnnnnnnnnnnnnnnnnnnnnnnnnnnnnnnnnnnnnnnnnnnnnnnnnnnnnnnnnnnnnnnnnnnnnnnnnnnnnnnnnnnnnnnnnnnnnnnnnnnnnnnnnnnnnnnnnnnnnnnnnnnnnnnnnnnnnnnnnnnnnnnnnnnnnnnnnnnnnnnnnnnnnnnnnnnnnnnnnnnnnnnnnnnnnnnnnnnnnnnnnnnnnnnnnnnnnnnnnnnnnnnnnnnnnnnnnnnnnnnnnnnnnnnnnnnnnnnnnnnnnnnnnnnnnnnnnnnnnnnnnnnnnnnnnnnnnnnnnnnnnnnnnnnnnnnnnnnnnnnnnnnnnnnnnnnnnnnnnnnnnnnnnnnnnnnnnnnnnnnnnnnnnnnnnnnnnnnnnnnnnnnnnnnnnnnnnnnnnnnnnnnnnnnnnnnnnnnnnnnnnnnnnnnnnnnnnnnnnnnnnnnnnnnnnnnnnnnnnnnnnnnnnnnnnnnnnnnnnnnnnnnnnnnnnnnnnnnnnnnnnnnnnnnnnnnnnnnnnnnnnnnnnnnnnnnnnnnnnnnnnnnnnnnnnnnnnnnnnnnnnnnnnnnnnnnnnnnnnnnnnnnnnnnnnnnnnnnnnnnnnnnnnnnnnnnnnnnnnnnnnnnnnnnnnnnnnnnnnnnnnnnnnnnnnnnnnnnnnnnnnnnnnnnnnnnnnnnnnnnnnnnnnnnnnnnnnnnnnnnnnnnnnnnnnnnnnnnnnnnnnnnnnnnnnnnnnnnnnnnnnnnnnnnnnnnnnnnnnnnnnnnnnnnnnnnnnnnnnnnnnnnnnnnnnnnnnnnnnnnnnnnnnnnnnnnnnnnnnnnnnnnnnnnnnnnnnnnnnnnnnnnnnnnnnnnnnnnnnnnnnnnnnnnnnnnnnnnnnnnnnnnnnnnnnnnnnnnnnnnnnnnnnnnnnnnnnnnnnnnnnnnnnnnnnnnnnnnnnnnnnnnnnnnnnnnnnnnnnnnnnnnnnnnnnnnnnnnnnnnnnnnnnnnnnnnnnnnnnnnnnnnnnnnnnnnnnnnnnnnnnnnnnnnnnnnnnnnnnnnnnnnnnnnnnnnnnnnnnnnnnnnnnnnnnnnnnnnnnnnnnnnnnnnnnnnnnnnnnnnnnnnnnnnnnnnnnnnnnnnnnnnnnnnnnnnnnnnnnnnnnnnnnnnnnnnnnnnnnnnnnnnnnnnnnnnnnnnnnnnnnnnnnnnnnnnnnnnnnnnnnnnnnnnnnnnnnnnnnnnnnnnnnnnnnnnnnnnnnnnnnnnnnnnnnnnnnnnnnnnnnnnnnnnnnnnnnnnnnnnnnnnnnnnnnnnnnnnnnnnnnnnnnnnnnnnnnnnnnnnnnnnnnnnnnnnnnnnnnnnnnnnnnnnnnnnnnnnnnnnnnnnnnnnnnnnnnnnnnnnnnnnnnnnnnnnnnnnnnnnnnnnnnnnnnnnnnnnnnnnnnnnnnnnnnnnnnnnnnnnnnnnnnnnnnnnnnnnnnnnnnnnnnnnnnnnnnnnnnnnnnnnnnnnnnnnnnnnnnnnnnnnnnnnnnnnnnnnnnnnnnnnnnnnnnnnnnnnnnnnnnnnnnnnnnnnnnnnnnnnnnnnnnnnnnnnnnnnnnnnnnnnnnnnnnnnnnnnnnnnnnnnnnnnnnnnnnnnnnnnnnnnnnnnnnnnnnnnnnnnnnnnnnnnnnnnnnnnnnnnnnnnnnnnnnnnnnnnnnnnnnnnnnnnnnnnnnnnnnnnnnnnnnnnnnnnnnnnnnnnnnnnnnnnnnnnnnnnnnnnnnnnnnnnnnnnnnnnnnnnnnnnnnnnnnnnnnnnnnnnnnnnnnnnnnnnnnnnnnnnnnnnnnnnnnnnnnnnnnnnnnnnnnnnnnnnnnnnnnnnnnnnnnnnnnnnnnnnnnnnnnnnnnnnnnnnnnnnnnnnnnnnnnnnnnnnnnnnnnnnnnnnnnnnnnnnnnnnnnnnnnnnnnnnnnnnnnnnnnnnnnnnnnnnnnnnnnnnnnnnnnnnnnnnnnnnnnnnnnnnnnnnnnnnnnnnnnnnnnnnnnnnnnnnnnnnnnnnnnnnnnnnnnnnnnnnnnnnnnnnnnnnnnnnnnnnnnnnnnnnnnnnnnnnnnnnnnnnnnnnnnnnnnnnnnnnnnnnnnnnnnnnnnnnnnnnnnnnnnnnnnnnnnnnnnnnnnnnnnnnnnnnnnnnnnnnnnnnnnnnnnnnnnnnnnnnnnnnnnnnnnnnnnnnnnnnnnnnnnnnnnnnnnnnnnnnnnnnnnnnnnnnnnnnnnnnnnnnnnnnnnnnnnnnnnnnnnnnnnnnnnnnnnnnnnnnnnnnnnnnnnnnnnnnnnnnnnnnnnnnnnnnnnnnnnnnnnnnnnnnnnnnnnnnnnnnnnnnnnnnnnnnnnnnnnnnnnnnnnnnnnnnnnnnnnnnnnnnnnnnnnnnnnnnnnnnnnnnnnnnnnnnnnnnnnnnnnnnnnnnnnnnnnnnnnnnnnnnnnnnnnnnnnnnnnnnnnnnnnnnnnnnnnnnnnnnnnnnnnnnnnnnnnnnnnnnnnnnnnnnnnnnnnnnnnnnnnnnnnnnnnnnnnnnnnnnnnnnnnnnnnnnnnnnnnnnnnnnnnnnnnnnnnnnnnnnnnnnnnnnnnnnnnnnnnnnnnnnnnnnnnnnnnnnnnnnnnnnnnnnnnnnnnnnnnnnnnnnnnnnnnnnnnnnnnnnnnnnnnnnnnnnnnnnnnnnnnnnnnnnnnnnnnnnnnnnnnnnnnnnnnnnnnnnnnnnnnnnnnnnnnnnnnnnnnnnnnnnnnnnnnnnnnnnnnnnnnnnnnnnnnnnnnnnnnnnnnnnnnnnnnnnnnnnnnnnnnnnnnnnnnnnnnnnnnnnnnnnnnnnnnnnnnnnnnnnnnnnnnnnnnnnnnnnnnnnnnnnnnnnnnnnnnnnnnnnnnnnnnnnnnnnnnnnnnnnnnnnnnnnnnnnnnnnnnnnnnnnnnnnnnnnnnnnnnnnnnnnnnnnnnnnnnnnnnnnnnnnnnnnnnnnnnnnnnnnnnnnnnnnnnnnnnnnnnnnnnnnnnnnnnnnnnnnnnnnnnnnnnnnnnnnnnnnnnnnnnnnnnnnnnnnnnnnnnnnnnnnnnnnnnnnnnnnnnnnnnnnnnnnnnnnnnnnnnnnnnnnnnnnnnnnnnnnnnnnnnnnnnnnnnnnnnnnnnnnnnnnnnnnnnnnnnnnnnnnnnnnnnnnnnnnnnnnnnnnnnnnnnnnnnnnnnnnnnnnnnnnnnnnnnnnnnnnnnnnnnnnnnnnnnnnnnnnnnnnnnnnnnnnnnnnnnnnnnnnnnnnnnnnnnnnnnnnnnnnnnnnnnnnnnnnnnnnnnnnnnnnnnnnnnnnnnnnnnnnnnnnnnnnnnnnnnnnnnnnnnnnnnnnnnnnnnnnnnnnnnnnnnnnnnnnnnnnnnnnnnnnnnnnnnnnnnnnnnnnnnnnnnnnnnnnnnnnnnnnnnnnnnnnnnnnnnnnnnnnnnnnnnnnnnnnnnnnnnnnnnnnnnnnnnnnnnnnnnnnnnnnnnnnnnnnnnnnnnnnnnnnnnnnnnnnnnnnnnnnnnnnnnnnnnnnnnnnnnnnnnnnnnnnnnnnnnnnnnnnnnnnnnnnnnnnnnnnnnnnnnnnnnnnnnnnnnnnnnnnnnnnnnnnnnnnnnnnnnnnnnnnnnnnnnnnnnnnnnnnnnnnnnnnnnnnnnnnnnnnnnnnnnnnnnnnnnnnnnnnnnnnnnnnnnnnnnnnnnnnnnnnnnnnnnnnnnnnnnnnnnnnnnnnnnnnnnnnnnnnnnnnnnnnnnnnnnnnnnnnnnnnnnnnnnnnnnnnnnnnnnnnnnnnnnnnnnnnnnnnnnnnnnnnnnnnnnnnnnnnnnnnnnnnnnnnnnnnnnnnnnnnnnnnnnnnnnnnnnnnnnnnnnnnnnnnnnnnnnnnnnnnnnnnnnnnnnnnnnnnnnnnnnnnnnnnnnnnnnnnnnnnnnnnnnnnnnnnnnnnnnnnnnnnnnnnnnnnnnnnnnnnnnnnnnnnnnnnnnnnnnnnnnnnnnnnnnnnnnnnnnnnnnnnnnnnnnnnnnnnnnnnnnnnnnnnnnnnnnnnnnnnnnnnnnnnnnnnnnnnnnnnnnnnnnnnnnnnnnnnnnnnnnnnnnnnnnnnnnnnnnnnnnnnnnnnnnnnnnnnnnnnnnnnnnnnnnnnnnnnnnnnnnnnnnnnnnnnnnnnnnnnnnnnnnnnnnnnnnnnnnnnnnnnnnnnnnnnnnnnnnnnnnnnnnnnnnnnnnnnnnnnnnnnnnnnnnnnnnnnnnnnnnnnnnnnnnnnnnnnnnnnnnnnnnnnnnnnnnnnnnnnnnnnnnnnnnnnnnnnnnnnnnnnnnnnnnnnnnnnnnnnnnnnnnnnnnnnnnnnnnnnnnnnnnnnnnnnnnnnnnnnnnnnnnnnnnnnnnnnnnnnnnnnnnnnnnnnnnnnnnnnnnnnnnnnnnnnnnnnnnnnnnnnnnnnnnnnnnnnnnnnnnnnnnnnnnnnnnnnnnnnnnnnnnnnnnnnnnnnnnnnnnnnnnnnnnnnnnnnnnnnnnnnnnnnnnnnnnnnnnnnnnnnnnnnnnnnnnnnnnnnnnnnnnnnnnnnnnnnnnnnnnnnnnnnnnnnnnnnnnnnnnnnnnnnnnnnnnnnnnnnnnnnnnnnnnnnnnnnnnnnnnnnnnnnnnnnnnnnnnnnnnnnnnnnnnnnnnnnnnnnnnnnnnnnnnnnnnnnnnnnnnnnnnnnnnnnnnnnnnnnnnnnnnnnnnnnnnnnnnnnnnnnnnnnnnnnnnnnnnnnnnnnnnnnnnnnnnnnnnnnnnnnnnnnnnnnnnnnnnnnnnnnnnnnnnnnnnnnnnnnnnnnnnnnnnnnnnnnnnnnnnnnnnnnnnnnnnnnnnnnnnnnnnnnnnnnnnnnnnnnnnnnnnnnnnnnnnnnnnnnnnnnnnnnnnnnnnnnnnnnnnnnnnnnnnnnnnnnnnnnnnnnnnnnnnnnnnnnnnnnnnnnnnnnnnnnnnnnnnnnnnnnnnnnnnnnnnnnnnnnnnnnnnnnnnnnnnnnnnnnnnnnnnnnnnnnnnnnnnnnnnnnnnnnnnnnnnnnnnnnnnnnnnnnnnnnnnnnnnnnnnnnnnnnnnnnnnnnnnnnnnnnnnnnnnnnnnnnnnnnnnnnnnnnnnnnnnnnnnnnnnnnnnnnnnnnnnnnnnnnnnnnnnnnnnnnnnnnnnnnnnnnnnnnnnnnnnnnnnnnnnnnnnnnnnnnnnnnnnnnnnnnnnnnnnnnnnnnnnnnnnnnnnnnnnnnnnnnnnnnnnnnnnnnnnnnnnnnnnnnnnnnnnnnnnnnnnnnnnnnnnnnnnnnnnnnnnnnnnnnnnnnnnnnnnnnnnnnnnnnnnnnnnnnnnnnnnnnnnnnnnnnnnnnnnnnnnnnnnnnnnnnnnnnnnnnnnnnnnnnnnnnnnnnnnnnnnnnnnnnnnnnnnnnnnnnnnnnnnnnnnnnnnnnnnnnnnnnnnnnnnnnnnnnnnnnnnnnnnnnnnnnnnnnnnnnnnnnnnnnnnnnnnnnnnnnnnnnnnnnnnnnnnnnnnnnnnnnnnnnnnnnnnnnnnnnnnnnnnnnnnnnnnnnnnnnnnnnnnnnnnnnnnnnnnnnnnnnnnnnnnnnnnnnnnnnnnnnnnnnnnnnnnnnnnnnnnnnnnnnnnnnnnnnnnnnnnnnnnnnnnnnnnnnnnnnnnnnnnnnnnnnnnnnnnnnnnnnnnnnnnnnnnnnnnnnnnnnnnnnnnnnnnnnnnnnnnnnnnnnnnnnnnnnnnnnnnnnnnnnnnnnnnnnnnnnnnnnnnnnnnnnnnnnnnnnnnnnnnnnnnnnnnnnnnnnnnnnnnnnnnnnnnnnnnnnnnnnnnnnnnnnnnnnnnnnnnnnnnnnnnnnnnnnnnnnnnnnnnnnnnnnnnnnnnnnnnnnnnnnnnnnnnnnnnnnnnnnnnnnnnnnnnnnnnnnnnnnnnnnnnnnnnnnnnnnnnnnnnnnnnnnnnnnnnnnnnnnnnnnnnnnnnnnnnnnnnnnnnnnnnnnnnnnnnnnnnnnnnnnnnnnnnnnnnnnnnnnnnnnnnnnnnnnnnnnnnnnnnnnnnnnnnnnnnnnnnnnnnnnnnnnnnnnnnnnnnnnnnnnnnnnnnnnnnnnnnnnnnnnnnnnnnnnnnnnnnnnnnnnnnnnnnnnnnnnnnnnnnnnnnnnnnnnnnnnnnnnnnnnnnnnnnnnnnnnnnnnnnnnnnnnnnnnnnnnnnnnnnnnnnnnnnnnnnnnnnnnnnnnnnnnnnnnnnnnnnnnnnnnnnnnnnnnnnnnnnnnnnnnnnnnnnnnnnnnnnnnnnnnnnnnnnnnnnnnnnnnnnnnnnnnnnnnnnnnnnnnnnnnnnnnnnnnnnnnnnnnnnnnnnnnnnnnnnnnnnnnnnnnnnnnnnnnnnnnnnnnnnnnnnnnnnnnnnnnnnnnnnnnnnnnnnnnnnnnnnnnnnnnnnnnnnnnnnnnnnnnnnnnnnnnnnnnnnnnnnnnnnnnnnnnnnnnnnnnnnnnnnnnnnnnnnnnnnnnnnnnnnnnnnnnnnnnnnnnnnnnnnnnnnnnnnnnnnnnnnnnnnnnnnnnnnnnnnnnnnnnnnnnnnnnnnnnnnnnnnnnnnnnnnnnnnnnnnnnnnnnnnnnnnnnnnnnnnnnnnnnnnnnnnnnnnnnnnnnnnnnnnnnnnnnnnnnnnnnnnnnnnnnnnnnnnnnnnnnnnnnnnnnnnnnnnnnnnnnnnnnnnnnnnnnnnnnnnnnnnnnnnnnnnnnnnnnnnnnnnnnnnnnnnnnnnnnnnnnnnnnnnnnnnnnnnnnnnnnnnnnnnnnnnnnnnnnnnnnnnnnnnnnnnnnnnnnnnnnnnnnnnnnnnnnnnnnnnnnnnnnnnnnnnnnnnnnnnnnnnnnnnnnnnnnnnnnnnnnnnnnnnnnnnnnnnnnnnnnnnnnnnnnnnnnnnnnnnnnnnnnnnnnnnnnnnnnnnnnnnnnnnnnnnnnnnnnnnnnnnnnnnnnnnnnnnnnnnnnnnnnnnnnnnnnnnnnnnnnnnnnnnnnnnnnnnnnnnnnnnnnnnnnnnnnnnnnnnnnnnnnnnnnnnnnnnnnnnnnnnnnnnnnnnnnnnnnnnnnnnnnnnnnnnnnnnnnnnnnnnnnnnnnnnnnnnnnnnnnnnnnnnnnnnnnnnnnnnnnnnnnnnnnnnnnnnnnnnnnnnnnnnnnnnnnnnnnnnnnnnnnnnnnnnnnnnnnnnnnnnnnnnnnnnnnnnnnnnnnnnnnnnnnnnnnnnnnnnnnnnnnnnnnnnnnnnnnnnnnnnnnnnnnnnnnnnnnnnnnnnnnnnnnnnnnnnnnnnnnnnnnnnnnnnnnnnnnnnnnnnnnnnnnnnnnnnnnnnnnnnnnnnnnnnnnnnnnnnnnnnnnnnnnnnnnnnnnnnnnnnnnnnnnnnnnnnnnnnnnnnnnnnnnnnnnnnnnnnnnnnnnnnnnnnnnnnnnnnnnnnnnnnnnnnnnnnnnnnnnnnnnnnnnnnnnnnnnnnnnnnnnnnnnnnnnnnnnnnnnnnnnnnnnnnnnnnnnnnnnnnnnnnnnnnnnnnnnnnnnnnnnnnnnnnnnnnnnnnnnnnnnnnnnnnnnnnnnnnnnnnnnnnnnnnnnnnnnnnnnnnnnnnnnnnnnnnnnnnnnnnnnnnnnnnnnnnnnnnnnnnnnnnnnnnnnnnnnnnnnnnnnnnnnnnnnnnnnnnnnnnnnnnnnnnnnnnnnnnnnnnnnnnnnnnnnnnnnnnnnnnnnnnnnnnnnnnnnnnnnnnnnnnnnnnnnnnnnnnnnnnnnnnnnnnnnnnnnnnnnnnnnnnnnnnnnnnnnnnnnnnnnnnnnnnnnnnnnnnnnnnnnnnnnnnnnnnnnnnnnnnnnnnnnnnnnnnnnnnnnnnnnnnnnnnnnnnnnnnnnnnnnnnnnnnnnnnnnnnnnnnnnnnnnnnnnnnnnnnnnnnnnnnnnnnnnnnnnnnnnnnnnnnnnnnnnnnnnnnnnnnnnnnnnnnnnnnnnnnnnnnnnnnnnnnnnnnnnnnnnnnnnnnnnnnnnnnnnnnnnnnnnnnnnnnnnnnnnnnnnnnnnnnnnnnnnnnnnnnnnnnnnnnnnnnnnnnnnnnnnnnnnnnnnnnnnnnnnnnnnnnnnnnnnnnnnnnnnnnnnnnnnnnnnnnnnnnnnnnnnnnnnnnnnnnnnnnnnnnnnnnnnnnnnnnnnnnnnnnnnnnnnnnnnnnnnnnnnnnnnnnnnnnnnnnnnnnnnnnnnnnnnnnnnnnnnnnnnnnnnnnnnnnnnnnnnnnnnnnnnnnnnnnnnnnnnnnnnnnnnnnnnnnnnnnnnnnnnnnnnnnnnnnnnnnnnnnnnnnnnnnnnnnnnnnnnnnnnnnnnnnnnnnnnnnnnnnnnnnnnnnnnnnnnnnnnnnnnnnnnnnnnnnnnnnnnnnnnnnnnnnnnnnnnnnnnnnnnnnnnnnnnnnnnnnnnnnnnnnnnnnnnnnnnnnnnnnnnnnnnnnnnnnnnnnnnnnnnnnnnnnnnnnnnnnnnnnnnnnnnnnnnnnnnnnnnnnnnnnnnnnnnnnnnnnnnnnnnnnnnnnnnnnnnnnnnnnnnnnnnnnnnnnnnnnnnnnnnnnnnnnnnnnnnnnnnnnnnnnnnnnnnnnnnnnnnnnnnnnnnnnnnnnnnnnnnnnnnnnnnnnnnnnnnnnnnnnnnnnnnnnnnnnnnnnnnnnnnnnnnnnnnnnnnnnnnnnnnnnnnnnnnnnnnnnnnnnnnnnnnnnnnnnnnnnnnnnnnnnnnnnnnnnnnnnnnnnnnnnnnnnnnnnnnnnnnnnnnnnnnnnnnnnnnnnnnnnnnnnnnnnnnnnnnnnnnnnnnnnnnnnnnnnnnnnnnnnnnnnnnnnnnnnnnnnnnnnnnnnnnnnnnnnnnnnnnnnnnnnnnnnnnnnnnnnnnnnnnnnnnnnnnnnnnnnnnnnnnnnnnnnnnnnnnnnnnnnnnnnnnnnnnnnnnnnnnnnnnnnnnnnnnnnnnnnnnnnnnnnnnnnnnnnnnnnnnnnnnnnnnnnnnnnnnnnnnnnnnnnnnnnnnnnnnnnnnnnnnnnnnnnnnnnnnnnnnnnnnnnnnnnnnnnnnnnnnnnnnnnnnnnnnnnnnnnnnnnnnnnnnnnnnnnnnnnnnnnnnnnnnnnnnnnnnnnnnnnnnnnnnnnnnnnnnnnnnnnnnnnnnnnnnnnnnnnnnnnnnnnnnnnnnnnnnnnnnnnnnnnnnnnnnnnnnnnnnnnnnnnnnnnnnnnnnnnnnnnnnnnnnnnnnnnnnnnnnnnnnnnnnnnnnnnnnnnnnnnnnnnnnnnnnnnnnnnnnnnnnnnnnnnnnnnnnnnnnnnnnnnnnnnnnnnnnnnnnnnnnnnnnnnnnnnnnnnnnnnnnnnnnnnnnnnnnnnnnnnnnnnnnnnnnnnnnnnnnnnnnnnnnnnnnnnnnnnnnnnnnnnnnnnnnnnnnnnnnnnnnnnnnnnnnnnnnnnnnnnnnnnnnnnnnnnnnnnnnnnnnnnnnnnnnnnnnnnnnnnnnnnnnnnnnnnnnnnnnnnnnnnnnnnnnnnnnnnnnnnnnnnnnnnnnnnnnnnnnnnnnnnnnnnnnnnnnnnnnnnnnnnnnnnnnnnnnnnnnnnnnnnnnnnnnnnnnnnnnnnnnnnnnnnnnnnnnnnnnnnnnnnnnnnnnnnnnnnnnnnnnnnnnnnnnnnnnnnnnnnnnnnnnnnnnnnnnnnnnnnnnnnnnnnnnnnnnnnnnnnnnnnnnnnnnnnnnnnnnnnnnnnnnnnnnnnnnnnnnnnnnnnnnnnnnnnnnnnnnnnnnnnnnnnnnnnnnnnnnnnnnnnnnnnnnnnnnnnnnnnnnnnnnnnnnnnnnnnnnnnnnnnnnnnnnnnnnnnnnnnnnnnnnnnnnnnnnnnnnnnnnnnnnnnnnnnnnnnnnnnnnnnnnnnnnnnnnnnnnnnnnnnnnnnnnnnnnnnnnnnnnnnnnnnnnnnnnnnnnnnnnnnnnnnnnnnnnnnnnnnnnnnnnnnnnnnnnnnnnnnnnnnnnnnnnnnnnnnnnnnnnnnnnnnnnnnnnnnnnnnnnnnnnnnnnnnnnnnnnnnnnnnnnnnnnnnnnnnnnnnnnnnnnnnnnnnnnnnnnnnnnnnnnnnnnnnnnnnnnnnnnnnnnnnnnnnnnnnnnnnnnnnnnnnnnnnnnnnnnnnnnnnnnnnnnnnnnnnnnnnnnnnnnnnnnnnnnnnnnnnnnnnnnnnnnnnnnnnnnnnnnnnnnnnnnnnnnnnnnnnnnnnnnnnnnnnnnnnnnnnnnnnnnnnnnnnnnnnnnnnnnnnnnnnnnnnnnnnnnnnnnnnnnnnnnnnnnnnnnnnnnnnnnnnnnnnnnnnnnnnnnnnnnnnnnnnnnnnnnnnnnnnnnnnnnnnnnnnnnnnnnnnnnnnnnnnnnnnnnnnnnnnnnnnnnnnnnnnnnnnnnnnnnnnnnnnnnnnnnnnnnnnnnnnnnnnnnnnnnnnnnnnnnnnnnnnnnnnnnnnnnnnnnnnnnnnnnnnnnnnnnnnnnnnnnnnnnnnnnnnnnnnnnnnnnnnnnnnnnnnnnnnnnnnnnnnnnnnnnnnnnnnnnnnnnnnnnnnnnnnnnnnnnnnnnnnnnnnnnnnnnnnnnnnnnnnnnnnnnnnnnnnnnnnnnnnnnnnnnnnnnnnnnnnnnnnnnnnnnnnnnnnnnnnnnnnnnnnnnnnnnnnnnnnnnnnnnnnnnnnnnnnnnnnnnnnnnnnnnnnnnnnnnnnnnnnnnnnnnnnnnnnnnnnnnnnnnnnnnnnnnnnnnnnnnnnnnnnnnnnnnnnnnnnnnnnnnnnnnnnnnnnnnnnnnnnnnnnnnnnnnnnnnnnnnnnnnnnnnnnnnnnnnnnnnnnnnnnnnnnnnnnnnnnnnnnnnnnnnnnnnnnnnnnnnnnnnnnnnnnnnnnnnnnnnnnnnnnnnnnnnnnnnnnnnnnnnnnnnnnnnnnnnnnnnnnnnnnnnnnnnnnnnnnnnnnnnnnnnnnnnnnnnnnnnnnnnnnnnnnnnnnnnnnnnnnnnnnnnnnnnnnnnnnnnnnnnnnnnnnnnnnnnnnnnnnnnnnnnnnnnnnnnnnnnnnnnnnnnnnnnnnnnnnnnnnnnnnnnnnnnnnnnnnnnnnnnnnnnnnnnnnnnnnnnnnnnnnnnnnnnnnnnnnnnnnnnnnnnnnnnnnnnnnnnnnnnnnnnnnnnnnnnnnnnnnnnnnnnnnnnnnnnnnnnnnnnnnnnnnnnnnnnnnnnnnnnnnnnnnnnnnnnnnnnnnnnnnnnnnnnnnnnnnnnnnnnnnnnnnnnnnnnnnnnnnnnnnnnnnnnnnnnnnnnnnnnnnnnnnnnnnnnnnnnnnnnnnnnnnnnnnnnnnnnnnnnnnnnnnnnnnnnnnnnnnnnnnnnnnnnnnnnnnnnnnnnnnnnnnnnnnnnnnnnnnnnnnnnnnnnnnnnnnnnnnnnnnnnnnnnnnnnnnnnnnnnnnnnnnnnnnnnnnnnnnnnnnnnnnnnnnnnnnnnnnnnnnnnnnnnnnnnnnnnnnnnnnnnnnnnnnnnnnnnnnnnnnnnnnnnnnnnnnnnnnnnnnnnnnnnnnnnnnnnnnnnnnnnnnnnnnnnnnnnnnnnnnnnnnnnnnnnnnnnnnnnnnnnnnnnnnnnnnnnnnnnnnnnnnnnnnnnnnnnnnnnnnnnnnnnnnnnnnnnnnnnnnnnnnnnnnnnnnnnnnnnnnnnnnnnnnnnnnnnnnnnnnnnnnnnnnnnnnnnnnnnnnnnnnnnnnnnnnnnnnnnnnnnnnnnnnnnnnnnnnnnnnnnnnnnnnnnnnnnnnnnnnnnnnnnnnnnnnnnnnnnnnnnnnnnnnnnnnnnnnnnnnnnnnnnnnnnnnnnnnnnnnnnnnnnnnnnnnnnnnnnnnnnnnnnnnnnnnnnnnnnnnnnnnnnnnnnnnnnnnnnnnnnnnnnnnnnnnnnnnnnnnnnnnnnnnnnnnnnnnnnnnnnnnnnnnnnnnnnnnnnnnnnnnnnnnnnnnnnnnnnnnnnnnnnnnnnnnnnnnnnnnnnnnnnnnnnnnnnnnnnnnnnnnnnnnnnnnnnnnnnnnnnnnnnnnnnnnnnnnnnnnnnnnnnnnnnnnnnnnnnnnnnnnnnnnnnnnnnnnnnnnnnnnnnnnnnnnnnnnnnnnnnnnnnnnnnnnnnnnnnnnnnnnnnnnnnnnnnnnnnnnnnnnnnnnnnnnnnnnnnnnnnnnnnnnnnnnnnnnnnnnnnnnnnnnnnnnnnnnnnnnnnnnnnnnnnnnnnnnnnnnnnnnnnnnnnnnnnnnnnnnnnnnnnnnnnnnnnnnnnnnnnnnnnnnnnnnnnnnnnnnnnnnnnnnnnnnnnnnnnnnnnnnnnnnnnnnnnnnnnnnnnnnnnnnnnnnnnnnnnnnnnnnnnnnnnnnnnnnnnnnnnnnnnnnnnnnnnnnnnnnnnnnnnnnnnnnnnnnnnnnnnnnnnnnnnnnnnnnnnnnnnnnnnnnnnnnnnnnnnnnnnnnnnnnnnnnnnnnnnnnnnnnnnnnnnnnnnnnnnnnnnnnnnnnnnnnnnnnnnnnnnnnnnnnnnnnnnnnnnnnnnnnnnnnnnnnnnnnnnnnnnnnnnnnnnnnnnnnnnnnnnnnnnnnnnnnnnnnnnnnnnnnnnnnnnnnnnnnnnnnnnnnnnnnnnnnnnnnnnnnnnnnnnnnnnnnnnnnnnnnnnnnnnnnnnnnnnnnnnnnnnnnnnnnnnnnnnnnnnnnnnnnnnnnnnnnnnnnnnnnnnnnnnnnnnnnnnnnnnnnnnnnnnnnnnnnnnnnnnnnnnnnnnnnnnnnnnnnnnnnnnnnnnnnnnnnnnnnnnnnnnnnnnnnnnnnnnnnnnnnnnnnnnnnnnnnnnnnnnnnnnnnnnnnnnnnnnnnnnnnnnnnnnnnnnnnnnnnnnnnnnnnnnnnnnnnnnnnnnnnnnnnnnnnnnnnnnnnnnnnnnnnnnnnnnnnnnnnnnnnnnnnnnnnnnnnnnnnnnnnnnnnnnnnnnnnnnnnnnnnnnnnnnnnnnnnnnnnnnnnnnnnnnnnnnnnnnnnnnnnnnnnnnnnnnnnnnnnnnnnnnnnnnnnnnnnnnnnnnnnnnnnnnnnnnnnnnnnnnnnnnnnnnnnnnnnnnnnnnnnnnnnnnnnnnnnnnnnnnnnnnnnnnnnnnnnnnnnnnnnnnnnnnnnnnnnnnnnnnnnnnnnnnnnnnnnnnnnnnnnnnnnnnnnnnnnnnnnnnnnnnnnnnnnnnnnnnnnnnnnnnnnnnnnnnnnnnnnnnnnnnnnnnnnnnnnnnnnnnnnnnnnnnnnnnnnnnnnnnnnnnnnnnnnnnnnnnnnnnnnnnnnnnnnnnnnnnnnnnnnnnnnnnnnnnnnnnnnnnnnnnnnnnnnnnnnnnnnnnnnnnnnnnnnnnnnnnnnnnnnnnnnnnnnnnnnnnnnnnnnnnnnnnnnnnnnnnnnnnnnnnnnnnnnnnnnnnnnnnnnnnnnnnnnnnnnnnnnnnnnnnnnnnnnnnnnnnnnnnnnnnnnnnnnnnnnnnnnnnnnnnnnnnnnnnnnnnnnnnnnnnnnnnnnnnnnnnnnnnnnnnnnnnnnnnnnnnnnnnnnnnnnnnnnnnnnnnnnnnnnnnnnnnnnnnnnnnnnnnnnnnnnnnnnnnnnnnnnnnnnnnnnnnnnnnnnnnnnnnnnnnnnnnnnnnnnnnnnnnnnnnnnnnnnnnnnnnnnnnnnnnnnnnnnnnnnnnnnnnnnnnnnnnnnnnnnnnnnnnnnnnnnnnnnnnnnnnnnnnnnnnnnnnnnnnnnnnnnnnnnnnnnnnnnnnnnnnnnnnnnnnnnnnnnnnnnnnnnnnnnnnnnnnnnnnnnnnnnnnnnnnnnnnnnnnnnnnnnnnnnnnnnnnnnnnnnnnnnnnnnnnnnnnnnnnnnnnnnnnnnnnnnnnnnnnnnnnnnnnnnnnnnnnnnnnnnnnnnnnnnnnnnnnnnccgccgctccgcaaactcctccggaccgaaccacgtctccagccgcatcgggcttccgaccaccggctccgccatccgtcactcctccttcgccgccatcaggccaaacagcgttccgtccgcccaacattacccgatccggctttccggaaacggacgaggcgggcgagtagtggaataggcggggcagggatgccacgacagtgtcgcgaaagcagactgtgaggcccggtagcgtggacgccgggcgcggtgttgtggcattgcttcctgcatctgagggtaaggagtacctatgagcgctgcgacacatcatggcgaagtctacaacctcctcgacgagccatggatccccgttctgatggcagacggttccaaccgccgcgtcggcatcatgcaggctttcgctgacacccacagaatacgcacgatcgcggccagcaaccccatggaccgtgtggctatcctgcggtttctgctggcactgttgtactggtgccgagggaacccggccgatggggcgccgcaagacctgaacgacccgttcctagacggatggatcaccaagctcgaggaataccgtccacggttcaacctgtttggcgacaacgtccggttctaccagtaccggaagcgcggcgaggtacctgacgcccctgccaactacctgatccacgaagtgccgaccggcacgaatgcagctcactttcggcattgccgggacagggacgacggcctgtgcgcagcctgctgcgccctcgggctgctgcgtctgccggtgttcacaacgtcggcaggtcgcggcaggtcgccagggatcaacagcaagccgccagtctacgtcgtgccggagggctccagcctgagtcaaacccttgcccggctgtggagaccagcagcaacgggcgacctagggcatccgagctggatcaagcccaagcggtctctgccgagctcgggccaggtgcctttgctgatgggactgacgtggctgccgaggcgcgtgtggctggacgatcggtctggcccgcctgctgcgtgcgctgcctgcggggaatggacgacactggtgcggacctgcgtgtttgagggactaggcagcacgaaggaggaaggaaccacgaagcgcgactgggtcgacccgcacgtgctgcgggcacccgacgacaagggggaggtcgtgcccgttcacggacgcgatcccgttgcgaggcccgacgcggcggttgggcagtggagccttatccagacggggctgctgggcagtgacgtggtgcgcaacgagggtgaccgagcatcggtggcaaacttcgcaaccgtccagaatgacaagtacctagaggcaaccgaacgcgtcgtcgcgaacccatccggcccgctgggcgtggctcagaacgaaggcgtgtacatgcggtgggactccgcgtcccgcgcggttgggttcgcgcttcgacgcatagctgaacaccccaagagccagaagcctcccagagcggcctcgctcatcgcatccatccgcccccatgtcgagcaccgcgtatctcagcaggcaagcgaactcctgaccggcggcgaggacggttgggcacgagctgccgaggagtatgcgcctatgatggtggccgtagcccgcgcggtcgctcccgcagccacagtcgccgatacggaacgccgccgcaggatcgccgcgatccgcccggagttcgccgccgcgacaacaggctcggcggacgatacccaggatgaggagggaggtgagaccgactgatggctacgcctactgagcagtacatcgacgtgcttctggcgctgaagcaaggcgaactcggcctgctccgtcggtatgccgggcagcctctggaccggaccttgcaggcgttcgacctgttcacagggctctggtggccactccgccagaagagcgcgcaggcgccccggcgatccctcgcatggctcgtcgcgaagctctacgccgcgagaccggtcccccatgagcggggccgtcggctcgctcgcgtctatgcacggtgcgcgcggcgtgagccgtcccggcgcgaccgacttgtgcgcgagttcgacgctcttctcacgacgccggtgtccggcctggagccgcaccttgacttcgccctaggcctgctgcaggacttcgacgccgcggtcgactgggcggcccttaccgacgacgtctcacgctgggagaacccagccgtccgccaatcgtgggcggaccagttccttgaggcttgagaaaggagccaagacatgttgatccagatccacgccatccagaaccacagcccggccaacctcaaccgcgacgatctgggcgcgcccaagacctgctacttcggcggcgtcctgcgctcccgcatcagcagccagtgtctgaaacggagcatccgtctgagcccggagttcgcggggcttcttggcggcatccgtactcggcaactcgcgaagctgatcgccgtgggcttggaggacgacccgaaggcacgcaagcgtgctgaggacgtcctgaaggcgtgcggcttcctgccgaagaaggccgcgaaggcgacggaaggtgaagacgaggcgacctcagccgacaagagcaaagcccttgtctacacgacgcgatcggcagtcgatgcgatgacaaggctgttccgagagggagccaacctcaccgtcgacgagttggcgcgcaggttcgccgagatgatcgcgtccgacatcgccgtgcccgacatggcgctctcgggccgaatgctcgagccggacaagtccgccaaggacacgtggaaggggctggacacaaccgtcgaggcagcgttgcaggtcgcgcacgccatctcgacacacgaggccaagccggaagtcgattactacgtggccgccgacgacatcccgggggaggatgcaggagccggcttcctggacgaagcgatgtacgccgccgcatgcttctacaagtacctgtcgatcgactgggaccagctctgcaccaacctggccaagacgggcgagaaggcgccgaggctggcagcccacacagtgggagcgttgctaaatgccgccgctctcaccaccccttccggcaagcagaacagctacgccgcacacaacccgcccgacgggatcatcatcgaaatccgcgacacgcccatcagctacgcgaacgcctttgccaagcctgttgagatcggaccccgggacatcacctcgcagagcatcacgcagctagcgtcctatgcccacgacctcgacgtgggcttcggtcggccgactatgcggctctggttctccccgaaccttcgctatcgcctcgctgttggagatgacgaaccttcccttgcggatcaggactaccgatcgctcgatgaactggttcaagccctcgtagcggcgcttggcttcgactggaaggatgtggccgaggtcgggctcgcgccaagcgaagcgtgatgggcaccacgaccctcttcctccgcttggaagggccgcttcaggcgtgggggagccacgactcgaagttcgtggtgcgtcgtacctgcgaagctccgaccaagtcgggcgtcatcggccttctctgctgcgccctcgggctgtctcgcgacgacgcgccagcccatctgtccgagctgagcgacctccgcatgggcgggcggatcgatcgtgagggcgtccgatggtgggattaccacaccgtcggggcgggtatggagatgcgccgtgccgatggcggggccaagctgggggctcttctctcgcgccgggagtacctctgcgacgcgtcgtttctggtcgcgcttcagggcgacgaggacctgctccgccggctcgagacggcgctgagaagcccgcgctggaccctctaccttggccgcaagtgctgccctccgtcgcgtccgctcctcgagaagcccatcgaggagcacccggacatcctcacggcgctcgcctcgatcccgtggcagccgcgcctcaagggcgagaaggccccgccgcgccttgagtgtctgctggactggagaccgtcggccgagcagcccgaggcgcccgaagacgccgagatatggtacgacgtgccggtctcgctcgcgccgccggcgcacgcggctcggttcgtggtccgaaccgaactggccatcggcgcggacggacaggtcgcggtggaggacacgccgctggtcagccgggtcccgccgcctccgcgtccgcgcgccgactacagcaactcggcgtacaagcgagtccgggccgagaggctaagcttcgacgagcacctctgtgtgttctgcaaagcgcccgccacaacggtccagcacgtcacctatcgccatgcgggaggcgacgagcgtctggaggagctccggtccctgtgtcggctgtgccacgacgccgtcaccatgatcgagtacggcgccgggatggggctcgaccgcatcaaccccgaggacccgcgatggcgcaagcagattatcgccaggcgccgcgacatcgtcaggttccgctcgcaggaaacccggcgtcggcgtctcagcgccgaggaggtggagtagccatgtacctgtcggttctccgggtggacgtcggtacgaaccccgacctcccgcggccgggccggctctggctccgcaaccgttaccacgtgcatcagcgcctctgcatggcgtttccgtcgtcggaccgccgtaccagggatccgcagtttctggagcggtaccagaccgccgacttcggagactggtctacggacaagcagggccggtgcgttcatgcgccgcgctccgccgccgacgggttcctgtaccgcgtagaggctcggccaggcggcagcgccgtcatcctggtccaatcggccggccttccggactgggactacgcgttccacaacgtcgactacctgcgggcccccaagccaggcgtgcgggagtacgacccgtgcttcgcggaaagtcagagcttgcggtttcgcctgcaggccaatgtgacgaagcggacgccttaccccaaaggagacagctccgcctcgaagaagcgcccgcgcattgcagttccgcgggagcaggtctccgactggctcgccaagcgggtgccacaagcggggttctcgttcgcggcagacactctgcaagtagacaccggctatgtatacttcgggaagcccggtcacgatgacagcaaggtcgagcaacgcgggaagctgttctccgtccgctacgacggcgttctgcgcgtcacggacgccgatgccttccggaaagccatcgagtcgggcatcggaccggccaaggccttcggcttcggtctgctttccgtcgcgccgctgcgcgagtgaggggtcatgctcgacgatctgcacatcctgccgaaggtccgcgacagcatcagctcgctctacgtcgagcggggccgcgttgaccgagaggaccggacgatcgccatccacgacaaggatggcatcgtcccggtccccgcggccgggctcgccgttctgatgctcggccccggcacgacgatcacgcatgcggcaatccgggttctggccgagtgctgctgcctggtcatctggtgcggcgaggagaacgtccggttctacgcggcaggcatgggcgggacccgcagcgccgccccactgctccatcaggcccgcctggccagttccgaggagagccggctcgaagtcgtgaagcggatgtaccggatgcgcttccagcacgaggtcgagcccgacgcgaccgtcgagcgtctgcgcggtatggagggagtccgcgtgcgggatgcctacgccgctgccagccgcgagcacggtgtgccctgggagggacgcaactacgatcggggcaactggggcgcagccgatcccgtcaaccgtgccctctcgtgcgccaactcctgtctctacggcatctgccacgccgccatcctggcaaccggcttcagccccgccatcggctttatccacacgggcaagcagctctcctttgtctacgacatcgccgacctctacaaggtcgagctcacgatccccctcgcgttccgggctgtggcagaggaggtcacgcagttggagcggaccgtgcgcatccgctgccgagatacgtttcgtgagaaccggctcctgcagcggatcgtgccggacatccgacaggcgctggccgttggcgacgaagtgcttcctccggacttcgcgcccgacgaggacgccgcgatgcccaccgacctctggaccccctcgtccgaagccgcgggagaaggcgaggcctgatatggtggtcctgatcctggagcgcgttccgaccggcctgcgaggcgagctcacgcgctggatgatcgagccgcacgcaggggtcttcgttgggcgcgtggcggcgatcgtccgcgacaagctctgggacaagtgccgccacgagggcaacgaaggagcgggtacgatgctcttcagcagtcagtccgaacagggcttcgcggttcgcagctttggcgacacaagccgcgcgatcgtggacatggaaggcgtcacgctggtgcgcgtgccccaacggcgacgtccgaggagccgcgacgcaccggcgtcgccgccgatccctggtctcttcgataggtagacgcttttctaagttttccccacgcacgtgggggtgaaccgaatccatcaggcgcgaagtcctgcaggaagcggttttccccacgcacgtgggggtgaaccgtatggcctctcgcgcaacttccaaatgtgcgagttttccccacgcacgtgggggtgaaccgtccggtccgccggcgagcagctccggcaggccgttttccccacgcacgtgggggtgaaccgctgtgtcagtcttgcactcactctccactgccgttttccccacgcacgtgggggtgaaccgacggcaccacgtccacgattgaggtctcaggcgttttccccacgcacgtgggggtgaaccagctggttccgctgtaccgcaaggcgcgagaacgttttccccacgcacgtgggggtgaaccgtaggaagtaggaaagaggaaacgtcttcctcggttttccccacgcacgtgggggtgaaccgtcggaggcgaatgcgaaggtcttgtctgcggtgttttccccacgcacgtgggggtgaaccggcctcgcgctgccactgcgggggcgtgagacagttttccccacgcacgtgggggtgaaccgtctgtatgccatgtcagc
